United States Patent Application Publication US 2014/0057251 A1 - sequence listing, part 103

SEQ ID NO: 188325 - DNA, 2863 bp, Cannabis indica
cgtagtgtcagtaaaggtatgttcattgttcatgagcgttttagaacatattgtgtcactctcatgaacataatcataatgattctagctgtagatggtagcattcaactttggcgtgttgaaatatctacaattaatttttcttttcttgacttctgtgactgcttggaacatctttagttgatgcttcattcatctagctacttgcaaataaagctaataaataacctaatgttttaatgatattgaataattggtaacaaagcagatttccttcatttctgttctaggatttttttgtttggattatgatgttttgtttgggttgttagttgttgaatgtgatatatatatgtatatatattttccaggtaacttctttagaatacgtagtgcatttgcttttggagctaaaaggctagctagattacttgattgcccaaaagaggatctatttttcgaagtaaatcagttttttatgaacacttgggaaagacatggcagtggccatcgtcctgatgcaccaaggaatgatttgagattatcaaatcacgaccagttacatggatctgaaaatattagaagcagcacagtgagcaaaaagaatgggatgtcatctaatgaatctgaagatgatgggactcatggttcatataacattccgtcccagcaagacagtgcttcgagaattagtaatgtgtctacagtacctcatatgcaaagccaaaggaattatgggaactcaaggaactctgatcctattaagaaagataatagttttaaccaggctgcacaaatggataaaggccagagaagtttgaaatctgataacttggtgaatgatatacagggtaggattctttttgcaaggacacgttctagtcctgaactttctgatgcatatggtgaaatctcttctcaaggtaggcgtggcagagccccagaaagtgggaagagccaaactttatcaactaggttggataatactaggaggaagaacctagaatctgatacagttgcaagtcatggtgtcagactgactgatgatccttcagcagtcagacacatctcttcccgtcatagtactgatgccgctgctgattcaaaaagtggttcaaacagctaccaggatgagtcagccttgggggcgatgactgatgattttgcttctgtttcgggggcccatgggatgcatcaagaggagcaagatcttgtgaacatgatggcgtcttcagtggctcatggtttcaatggacaggttcatgttccagtgaatttagctcctcatcacattccatttccaattcctcctaacgtcctagcttcaatggggtatactcagagaaatatggctgggatggttcctacaaattttccatggggctcacatatgcaattttcacaaggtgttccaccacatatggcccattatttttccggcatgggactggctgcctcaagtccagatgatcccccagaacctgctattgaaaattttggttctgtggaatcgaatctaggggaaaatgatcatgatttttggcatgagcaggacagggtgacctcttctggaggatttgatttagataatgggggttttgaggtacttcactctgatgataagcaacaagcatcctcatctgggtataacttccatccttctcgtgttggcagctctggaggttctctgcgagtccaaccgaagaatactaaagaaaaccatggtccaggaagagaagatgttgtggatgattttcagtatcatgataaccgtaatgaagttttctttgatgatagaactacaagttcaaggtctgtgtctgcctcgcatactggttctttgagaagtaaaacttcttcagaaagttcttgggaaggatcatcagcaaaagtctcaaagtcaactagggaaagacgaggtaggaaaaatgctcctttttcagtgccatcttctactcatgggaaggataagactgtatctgaacattcttctactcaggcagatgatgacaacagagattggaattcattgtcacctgttgccacagaaatagcagagagaaacccagtacctcagtctgctgcttcttggcaagttccaaggcatcaaattcctggtaccgaaccagctcagacaagtggatctgatttaataccctttgctccaatgcttttaaatcctaatgcacgacagagagctatggataattctggggctcttccctttacattttatgctacaggaccacctgttccatttgttacgatgcttccattgtataattttccaactgatacaggggcttcagatgcatcaacgagccagtttggtgcagatgaagtggcagaaaacagtgattctggtcagaattttgactcatctgaggggctcaatcaacatgttgtgtcaaatacttcaaattctatgaaaagggatacttctcttgagcctttagaacagaaacgcgacattctcaatagtgactttgctagccattggcaaaatttgcaatatggacggttttgccaaaattctcggtattcagctcctatgatatcacctgttatggtgcctcctgtttacttacagggacgagcaccatgggaaggtcctggaagaccactaactgcgaacatgaatctctttacccagcttatgagcggtgggcctcgttttgttcctgttgcacctctccaaaccatgtctaatagacctactggtgtttatcaacgatatgttgaggaaatgccaagatatcgcagtgggactgggacatacctgccaaatcctgtaagatagatttcgtatccttttattcttgtggattaccattacttttgtcttcatttgtttttttttttt

SEQ ID NO: 188326 - DNA, 3411 bp, Cannabis indica
ttgtgactaaaaacttatcactacatgataattattttcctagtgccatcatcgtggtatgacatctgaaattggcaaataattagctgaacaacttgcttgttgagatgtggatgtgtgttctacacttgcaccacttctcacagaaaaagctggtcttgtaggagtaccaattgctttggtttcatctttaagcattgaatatatttccagcatagtaggcctattttcaggactttcttggacacataatagagctacttgtaagcatttatatagtttacaaggcgaagaagaatcgtctagtgatggatcaaaaaactccactcctttgccaacttcccacatttgataagcctagaataaatgtatgttactcatgaatgtcaaattgatcaaaatttttagaatatgataggcaataaaatgtcttaaattgacttacatagtctagaagatgcaagttttcacttggtccatagaaatgcctgctcctctttccacttatgatttgcaaaagcaaaaccccaaagctgtagacatcatacttcatggagtatgtacctttttttacatattcaggtggaacatagccgctgcattttgcatacatgaagcatttagcaaaaacaaaaacttgtaagatattctgttcatgaagtatatctatctatatacttactatgttccaacgattcggtctgtgttggcttcaagctcatcttttctgaagagcctagccattccaaaatctgatatctttggattcatgttattgtccaacaaaacgttgctagctttcaaatcgcggtgtattatggtgaagtttgagtattcttgaagatatagaagcccttgggttatcccttcaataatgtgaaccctcttttcccaatctaattggtggtgtcgaataggatctgcaagataactacattcataagaaaacaagtaaaagtttatgctttttgcagttttagaaacttgtttggtttggtattttttcttgtagcttcatcatttatcagaacatgagatattggttattggaaaaatgtcaagcctattacaactatagaatgacaaaagcagtaacagcttaagtataaaatcttaaggagtatgtgaaaatatgcataccgaatatgtggaagtctaagctgtggtttggcatatattcataaatcaacatcttctcttctctctgaatgcaatatcccagtactcttgttagattaacatgttgtagtcttgcagtaagcataacttcattttcaaattcctcaactccttgattcgacgtctttgatagcctctttactgcaatttcatgccctcttggtagtatcccctagtaaaagaaaataagaagaactttctatacattaattatgacaagaaaagtaaaaaaaaatgagatgcataacaaaactttaatattcttttgctatcatcctatttaatattgtccttattgttgaaacaaaatttttaccttgtaaacaatgccgaaacccccttcaccaagcttgttattatttgagaagttatttgtggcttctttgattttattaaaactgaacacttgcagattgggagcattactttcattgttttcagcttctgatgtgttagtattcctacatgagtataaatagtctaatcctgccatccatgtaagatgaatataagagattgcacaaaatgatcagtgccacaaattacaaacagacttacctttcgatttcagtactttgcgtcggagtaagtagcaaattatgagggtgaggggtgccaagattaaagcaattgggagtatgattattagtaatgacttcctattgttatcctgatcaatctcttccccatgagctgcaatttagttttcaaaacttcattagaatctctaatcatatcagcagttcatggactttattatactgctatggtaataaaaatataactgagaataccaaagaatgactgtgatctactctgtcagaactgcatgtgttgtgttgccttccatatattaagttatcaaaacatctgtaatgattgggatagactaatgggactagcttagctttaataacacatcatttcaacccttatataaagttaaaatgttgtctttaattaagataaaaaagaaaactttagataacatattaaggtgaaaaaggcagaatctagtcagtagcttacatcttcaagcctattaagaatcttctatggatacaaataaaagaggaattcagtataactagtgagtcagatgacatcctccaagatggttgagtgtttatatttctgtgacagttttgttcaaaggaagcaattaatttaaccaagttccaacatttattaattcttcaagtttttcctgtactaacaaattaataaaaactcaagtccagcaggaacagagagagaaagatcatttttcatgaatttcaaacaatattcaaacatgatgaggcaataatataacaaatttggccttaagaactaatcatactgaaaaagcttacctgcccgagaaagcacccaattgtcatcattgatgacctgaaacacattgtaaccaagcaatttcttctccttggcataagcaatcttagtcttgacagcctcaacatcatcaaaaccaatccaactcgctcctactacacaataattcacaacataagtagcattataaactatattagttccataagtccgagtgttccacttgatatactgatagctcactgaaccatcttgtgtcacggccagaccagatgccggcgaaccaactccattgtctccaggattcaccagggtccatgcatagccatgaaaaggcaaccccaaaaccagtttgtcagaaggaaatcctctgctcaaccatttccttataccataatctgtgtttacattactattggggtcataaagagcagcatgagccccagtaacattttccttgatagacaaatgatagtcataagccacaacatgtccccaatccaaattcctcactaaggactcaatagggtaatttaatgatttaccatattcaggcacatacctaagagccattgtaagcaacaatttcgactgagttgagttccttgactcggactccacagctgctctccactcgtctaataaaattcccatgttagacatgtctgaagctgatctgggatacagccataacaagtcaaggccttcaaatccatagattctggctgttttgattgatgactcaataaaggcccttctgtttgaagttttttctaacatggcagagaacacagagtagtttcccttttcaccaactattgatttattggtctcagctaggccgttccagatggagagaagggttttgattgaagggtttcctcgtttgactatggt

SEQ ID NO: 188327 - DNA, 1659 bp, Cannabis indica
aaaaaaaaatcaggacctcttgcagattgctagtccaagcccactgccaccagaatttcgagtggctaatggttgagtctgtgtgaatttcgtgaatagcttaggcatatcctgcgggctaatacctgatcccatatcttttacctatgataaaagataaaaagattaaccgcagataaaactataattcaaaagactaaagggaatttcaaggtcttaatacagtactaagaaaaagcaaacctgtacacgtaggtaaaactgaccctcacttggtaccggaaaaaattctgcagttcgatactctcttaaagattctggttttataacagaagctgccattgagatgcttccctcctttgaaaactttaccgcattaccagagacatttaaaatggtttgcataaggcgcttctcatcacccaccgcgtatactggcacatctgaagctatatttaatgtaaccaataattttttgacagatgcaacaggcttaattaagttaaggacctgcaggcacaaagttcacatccctaagcaatgcatgataatgtatgagacattgagctttaacatacataacaattgcaaggaacacaatatcttacctctttaaatacagaatgaaggttaaaagttcctttttcgagctgaaggctgccatcttcaagtcttgagagatctaatacatcatttataagagtagccagaagattactgctcttaagtattgtttcaaccatcaggcgttgttctggagtcaattcggtttcctgcagtaaggaagacagcgcaataattgcatgcataggagttctcatctcatggttcataacagccaggaaatcattgcgagcacgaatggcagtttcagcttccctccttgctagatcaagtgcaacattctgctcaaatagaagatccctagctctcattgactcttccaatatagcagcatgtgaaagagctactgcaacctgcatccacattaatagtagagaaatcaattcttctggtctgtaagtcacccaatatatctacataagagatgtaaaatcttataatttttaatctaaaaaaaaaacttcgtttcagtataccctcattcatgttttctagaccaagaaaactggaacaaactttgaatgcatgcacataccaaaatatttagtaaacatcataaaatcacattacaactccacctaataggcagaataaaaatctagtatattaacattattaagccctaaactgagaagatcattttgaataagaaaacatgaaaaatatagtttataataatacaaagcattacctcaaattgaagttaacaaattaaaaacagagggaaacagcttacaaaaaatttaattaatatataaaagaaaaaagatttaagaatgtcaatcaaaaaaacttcatgaaggcttctgttcattttacactaagagtacaactcatgttaggaaaagattccaagcaagtcattcatatacaaaacccacaaattatttatcataaaaacatcttcatgaaagcatcatcactacaatatggtgggggattagggtttcagaacaacaatggaggaaagagtctcctttgtacaagtgaaaagagaattaggactaatcatgcctttgaccttcccacttattt

SEQ ID NO: 188328 - DNA, 5584 bp, Cannabis indica
tttaagagaagtgtgaattactcaaatagaaattattgagtgaacagttgcattctcctgactgaaagatgcaaccatttgcagactaaacaatacatactaaaagtttcatcccacacagtttgcaacaatttcatgtaaatgtcaaaataagaatctgttgtcaatcggttagaatctgaaattaatttcaaaataacaaaaggtataaaatcccttatggttacagcagaataaaatgaaaacagtatatatatatatatttatatacatatattagcatatttcaaaaccactaactaatgctcttcttttgaactattcttcacagagggatactgttagtctcatctaaactcaaatacagattaatttcaattgctttaacattgaaattgtaaccataggaaaaaaataaaaactttaggagagaaaccaaaaaattatgaaaagggcaaaacgaaatctgcgtagaaaaggtaccaatcctgattaacagcatcaaagccgtacctgcgagtgagtgagtgaagtaattgtggtaatgaatgaagcggagttggacaacacaagggccaacgaaattcctcctctcctgtccgatcagttagtgaaggaggttgataatcattctagagtacctgagagagagagatgaaatgaaatcagttgtagctttggatctgcttcctatttggcttctcatacatacccgcatttctttttttttttttttttctatgaaatgatctaatttcttctactttttattgtgaaattctcttatcttttaattatttgagaggagtgtattgttaaacttttattaaaattatgttaacttatgtctttaaaaatacatgttagaaatatttttttaatgaaggtattcagtgttacatcaacgctatatatataattaatttaaaaaataatttaattttactgaattctactaattattaattgatttttagtttaataattttttagaaaatgcataatttttttaatgttaaattataaatgtgacactgatgtgacaactaagcagtcatgtcatcattttatttgtcccgaaattagaatgaccaatttataacattgtaaatagttcaagaactatttataacaggctaaaaatttcaaaggcacaataatatatatagttcaataaaaatcaaatagtttataatagtaaaaataatgttctaaatttttttttttttgaaagtaatgtctaaatatttttacttactacacgtgtaaaaaaaaagtcaacaaaatatttttattttaattttattaaggtaaactgtttagaatttttttaaacttaacaaataatactaaatatttacattatataatttacaaaactttcttagattccaaaaatttttatttacataaattttagtgtatgaggaatattaatttgcaaaaaatttttttttcaaggcagtgcacatcctatcctcattccttggatctaaatttaatagcaatcttggagaccaccgagtagtcaattagagtttatacactgtccttaagatggttgacgtccaatgccctctcatatagaataacatagcctacctaatgagaaatgctaaaagacactaatagcacttttttttttaataaaaaagacactaataacacttagtatttttttcagtgccatatcgcaattaatacaattaagtattaagtctcatataacttaaaaagtaataattttatcactaatcctaaaataccacttctaaatgatactaaatactactaagagtagtgctaagaacactctctatcacactctcttactaatacttaataagaatactcttatgcaataaggctctcaaatatccattactcccaaagaagggctaccacgaactccaccaagaatattaactgaccaatttagtatttccatatttcttaaaaaaaaaaaaaagattcccactcacgtgcatagaaagaacatatcagtctttattttttgattcttggtagattccttttgtgctttatttgttctataatataataatagtatttatatattccaaaccaattccaatacgaactcttctctctatcctccatcaaaaaaacttacttacaatgacagcctcttcttcttctcctgaaaacaggtaatgaaatctttttatttaaatttgattgaaaatttcatctgggtttttcttcttttacaaacttcagctttagtttcattgcccgtaaccatattgtattgaatttattccaaaatggcatctttatataatgtgtatgtatatatataaatgtttagtggttcgcatgtcaggggccatactgataatttgatctgtataatatatatatatatatatatatatatattaatctcttaaaagggtttttggtttcatacccaattttcatcagatgtggctactcacgttgagctttaatttcttgtagatttagttgcactagactagtaagtgggtggaaagagttatagtatgtatgtataatgtatgacccagatgatagatttttgaattgagggttgagatcaattgatcaatgtctaatagttcttgtatctaatcagatttgatggtgtgtaggaccaaaaagatgtcaatacttgcaatcttaaatgagactttatactgtttgtttcatttattatataccttatgcctagattgatctttatttgtgattgtgccttaaaaatggtcataggataccaaattgcatatattagcagttaaattggttcaaaattgcagtgaggcctgcacttttctgaagcaaaagctaaatttttctaaatttcagaattatgttcttgtagattattctctcaattttttgaacatgaatactattactatctaagtttgtatatacagtatatattgttatacctgatttaataccagagaagttttaatttttttttcaaccatgttagatgagattactgtagaagctattttttgtactttgttgtgagatgaattgcctttgaaccttttacagtttcattctttttcgccttaattgccttattcttctcttgttgaatcagcaaaagctctctctctggactagctccacttgaggcagtactatttgatgttgatggaactctatgcgattcggatccacttcaccaccaagctttcagtgaaattcttctagaggtatgtcaattgcgcctcccgaatcacaaattcatgatcctctaattcttttaccaaaattatagaatgatgtacactttctctggttgacaataatgaagtttacccaacctgatacttttgttaacttaaccattctgagaaatattagtctaagttgattcataatgtgaatcttgtttggttaacagataggttataatggaggagttcctattgatgatgaattctttattaagaatattgctggtaagcataatcatgacattgccagggcaatcttccctgatgatttcgaacgaggtttaaagcttacagtggaaaaggaagttgtgtttcgcaggtaatttagtttttcgctcttcatttaccttgaatttctgttgaaacttcaagctaaataattctttcgattatgtaacataccagattggcttcagaacaattgaagcctgtggaaggtctttataaagtgaagaaatggatcgaagatcgtggcctaaaacgcgctgctgttacaaacgctccaagaccaaatgctgaactcatgatctcacttcttgggctttcagattttttcgatgttctcattcttggagacgaatgtgaccatgccaagccacacccagaaccttacttgaaggctctggaagtactgaaagtatctaaggatcacactttcatatttgaggtttgtttcctttttttctaccacagcccttttattagcaatctaaaagcttatccaaacttccatgatagtcagggccgtctttagggtggggcagctgaagctgttgcccaaggtgcctcaaccgaagaggcttccctcccgattaacatttgtccataaggctccaagaacttatttgaataggtcccataaaagctaaagagggtattgttgatagtgtaagttgtctcgttttgtaggactcggtgtctgggataaaagccggggtagcggctgggatgccggttgttggtatagccactagaaacccagcacagttactgatggaagcaaagccaatcttcactataaaagactatgcagatccgaaattgtgggaggcactagaagagcttgataagaaaggaggtaatggtgctaccaatgaagcttgaaacactttttgaagttggaaaaatgacaataattttgtaggagccttgttgtgttggtcctcctcttaccattcattatctatttcacttgagaatcataacatatcattcttatttatgacattgttacagtagcttcatagctacatacatatatctatagaaaaaatattattactatcatcttcttctttatgatttgattctctttttttattccccttttcctcaagagtgagctgaatctcagaagggtagaataataatattgacttacatttagaaggaataaatttggaattgttgaatatatttgtaaatggaatattacattacatcatacatgttttaattgcactattttaagaaaaatgaagcaagaagagtgttgaagtggtctattgttaatctttcataattggtgcccaaatcaaaatgaaaaactatgataatatactattggtgcgtttggttggaaggaatagaaatagaaaggtataaaatttaaaatgtatataaaaaaaaagtaaaaatattattaaattttttctatcttctattagaatagtcttttcttctatttaaaaatgaaatagttattctttcaaactagtgaaaaaatcatttaaatactttaaaatgcaacaaaacgaaggaattgaatgaaaattaattcttttacattctattctattttattatctccaactccaatcaaacgcaaccatgaagaataggagaaaagtagagatgaatggaatgcaaggttttgcacagtgaagcccaaccctagtaacatagacacctgtagagcctaactcgatactagaatcactcaatactcgatagattatcgatgtcagaacctccaatagcaaacaacacagtctcgccccaaccaccaccaaaaaagaaaaaacgtatccccacaaaaaacaccctttacatctcaacaccactaacccatatatcaaatagcacctctcaacctagagtttaacttaaaaaaaaattactttactcacaagtcacaataaaatttatgaatgaatcgaaaagattatgattaaataaacatttttattgtcgtttagtctataactaaaaatattagttataaaagttacaatttgttgtaaaatatatattgtcacaataaattttaccaaatatatatgtacaagtaccaaagtattatttatctaattaccaaaactctatcatgcgttaaggtt

SEQ ID NO: 188329 - DNA, 651 bp, Cannabis indica
aaattggtgttaaaaaacatcatcccattcactttaaaactattggatcagataagtaataagattagtaacttaatagttggaagcttaaacactaaacaaaaccaagtccttgatacaataaattttaatcaatacttaatcttaaactgcctagaattctgatagtttaggctgctaattgcaggttctgtttccaatgcaaggaaagggtggtcaagatccaattttttaagagcagctaatctggtgatgtatttattttgtgtggggtcataattgaaaatcttttgtacgtaatctttcaatattgtcactacttgttatggaatatatctatgaattccctttttgttttactttttataacttagctcgaatagtttttaatatgtacagttcatattgtttttaatatggttgttaatgttcatagtgttggctgatgtagaaaaaaccccacatatttgttactaggacaggtggttattgctaccttataatgaacattgttgctattatttaataaattagttgaaatttgtactcaaaaattcagagtaaaaatacttgttagaaaagtgtattcagaggcaaaacaaacataagggaaaaaaatgtagtagaaattgcataaattatggaaaaaaa

SEQ ID NO: 188330 - DNA, 2631 bp, Cannabis indica
aaaggttgtagtttttgaagagtactatatatggtggatttatatcactacaaaatgatatttttagtcacaataaaatttatgattaaaagtaaaatattgtgactaattataaatcattattcctatattatgattaaaaaatttgtggctaaaaatattagtcacaaaaattacaatttattgtaactaaatatattttcagtcacaatacgttttgtgactaaaactaaattaatgataatttatttttaaatactatgttttagtcacacgtaactttttcttgcgactaaaaatcacatttaattaacatttaatcacaaaaaattcatgttgtgactaaaatattatcactaaatatatgtacgcgattgattagcgatattccgtaaaagttattacatttaaattctttgagatatctgatacttaattctatcaataacgatataatacttaagatagtactagatattactggtatctcttagcatttctactaaaaaatgaagtaataattatatgggttttagaattgtctaaaacaataacaacagaaaagagattagtatcttatgtgatccaattttttttctactatgtaataaaaaaaaatgaattggagtactattactgagtttgggaatcgagtattgctatttattattctaaggtgttaaatactatatattgtgacatgagttctatgcttttttaatatattttattttaaattaaaataagtaaaacttaattttaaattaatgataacaattaccatatattagatattaatatacactatatattattcatcaaaaaaaaaatatacactatataaaatcttacttttaattagtcaaaataatttttttgataaaaagtgaccaaaaattatgactaaacataaattattattcatgtgtaatcactacaaagtttgtagctaaacgtgtagtacgtagttacaaaaattataatttattctttaaatatatttttagctacaatttgccatgattaaaaataaattagtgacaacttgcatttaaatactactttataatagcaaataatttttgttacaactaaaattaacatttaatcatataaaaatttattgtgactaaaagattattacgtaatcatataagatcacatagtaatatttcattaaactatcatgttcaatcttcatttaatattattaaggtactcatgaacattccctataacaatatattctatttttttttttaatataatagtgatgaagaaccacttgtgctgtattaattatttgatctctttagctttataacatgaatattaagaccatatattaaagctccttgctctatcacaaagtcaattcaatgttttgtcttgttttagtatatataatcaactagtgagtgggtgggtttacctttttaactttggtccacttacttttttaagtttgttgtttcataagtcaagtcttttgataaaaatcttgccttgtgttgtcaaatatataaatatacatattattatataaaaataatatttgtcttgttgaattggtattctagttcttggactactaagggcaagaaaataatttagaaaaaaaacttaatatatataatattagatcatatacatatattattaaaaaaaattatttttagtaatgactttttagttacaataaaaaattatataagatatatattttgaaattttgactttcaataattacataaaacactatttttttagtaaattttttatatttttacgtttaaagatttttttaacatttttacgatattttataaaagcaacaaaaaaattacataaaaataacatccaaatcaaatcaacaacaaaaaataacatacaaataataaaaatcaacagtaaattaacaatagtacaacataaaaatacatcaaaagaccgtattttctgtaaataaaattataaaaatcataaaaatatttaaaatttcgtacaatcgtatttttgttttttttttttatttatttttgtgtattttaaaaaaaaattccttcttttttagggattttcacaattttttttatccttccacaatttttttagtacccttttgatttatcataaacgaattcctttagaatcttataaatttgaaaatgaattgatttattttttttttaaaaaaaattaatagtattgttttctattttaaaatgtatagagatatatatttttcaattcataaatgaaaaaaaaaggtttggttagtatagaagacaagaaagcttgacttttttttagggaaaaacttgactttgcaatcttatgacaagtaaatttggactactatgcatgtcatagtgtttttcttgtaaaactaaatgtatttcctatctagatagaaattgttatctataatacttgacaagatgatatgaacaaagtttgttgacccgtggccaaaaaatgtacaagtaaaacaacagttaaactcataatgcactctagtgtgatctatttcaactatcttctttagaggttgaatcaactctccaaaatgatgacctaaaaaagtcacttgtaactttgcatcctgcaactaacaaagagctttttgaa

SEQ ID NO: 188331 - DNA, 533 bp, Cannabis indica
aaccctttttcaattcctttttttttgttactaaacactactataacttttttattctttaaacttttctatgatataatttcttttctttcactttcttctctaccaaacataaaaaattattactcttaatacatttcataaaaaattagtagagtaaatactccttttcttcgaatgactaccattaattcttgtgccataaaagttaaaccaaacaatataatagtgtgagaatttggaaataaaagtgaataaagtgtgattaaggtgcataaaatttcattccaaaactaattaaacaataaaaagtaataattcattcatatttctagagattaaaaatgtgaaagtaactctatttagtaataatgattccatttatattgaacaaaacatgactttgtaagggtaaacgattctgcctgagagaacggtagaatttgccccaatttgatttaaccctaatttatacaggttccaaattttgattggtttatttcaatatgatttttcttagttttttttttttt

SEQ ID NO: 188332 - DNA, 1255 bp, Cannabis indica
ataataagatatacagaagctagaaaagaaacatataaagagtcagagatatacttattagttcttccattaattccatgcacgctgtctgcacaactttctttatattccatttttgtaactatatatttatataatggatcgtatcttattttatttattgctattattttcttgaaacaaatgacaagccaaaagtgatagtttagagaaaatgtatttagaatctctacttgctaactaagcaagtagcaacataattaagttctttctttttgtaaacaattttggcagtttgcaatgacaaagtcaaggacctttatatatatatataaaataaataaaataaaaaccaaagaatactaatttagcttatgaattgaatatgtttctcaaattctagatgaagtttgatattttattagtgtttattattattttattcaataataaattgttaaatataaaatagtgggacagctaggtgagatattatatgagttggactgtttacttaaatgtacgtgacgaccaagtactaatataggaatatgatattattattagcctattaggatatctgtagacatttgaatatgtatatatagtaaataataataattctcaatctcataaatttcagaaacagatattggtatgttcaaacatttattacataatcagatttgtttcttttaagtatgagttatggcatgaccagttgtgggttgggatgtgggagctttttgtgaagattaggttaggtgtggctttgcttaatgagcaacaaaagagctataagtgtgtgtctaagtcagtaccaaaatcattatgtattcattaatttgatgatgaattaatgaatgagtgagtaaaaatagacaagtttgagtattatcttatcgaaatctatatatgtatccagatataagtatatgataaattcaaaagggggtgcttaaagtcatcatgaaataatttaataatattaatagtaataataatgaaaaaggcatataattgaatactgattataatatgtatttatatacttgtgtgtatctacctaacctggtgggttcagcattgcacaatcattccaaggttgagatgaaaacctgaaatctttggatatttgacaggtggtggtggtgggtgagttgaatttactttatatgtatctattctatataaattgtataactgaaatttgtatgagaatttgatggtaactttttagttttatttaataaaa

SEQ ID NO: 188333 - DNA, 2070 bp, Cannabis indica
ttcaaattttaagcaacctgtcagctataaaaccaataggccatttctcatggaaactaagcaatccatataaattgcatatgaaccattcttagtaagtagcacggatttttcaggttagcctttttgcgaatattagttcttgtgagacacactatgatatgatgactattgcaccataatccatggccacaaaaaccctccaagacattcaagtaaccaccaaattggagaattaaaataaaagtaatgattataactgaatgttattctaaattaatcaaatgaacagctatgaatacataacactgattaaattaaaacagagaacaaaaccgaaaataataataatactgcatttccataacattacacggtcacaaaaaaagccccggaaacacttgaatttcattcaaataagacgaatcaaagaaacgacagtaattaaattaatcagacacgaaaacggaagagaaagcttacatgagcttcaaacatggttgcgaatcgtatgattaagaataatcaaaaaatgaaattaaaagtccgatcaaggtggaagggaggagagtattgccattgcagagaagatcgaagactgaaacggctgaaggtgaaacaaccaaagctgaaaccctcttcttcttcttgtattgtacctcgaacgaatgatacttttgtgtacagagagagagagagagaggacggtttgaaagaaaagagaagaaaataaaaaaagaagaaaaaaaattgaagaaagaggtagaaaatgttatttataggggtgacggtgaggtcggtcattgggaaaaataatgttttaattggtttgccattttctgatttggaatcagtttcaggtttttatatatcttttgctatccatccactactccctaatgtaaccacctgtccccacttctcactcacccctcaactttatattttattttcctattttggaaagtttattttaaaatatacatactttatatgttatatactcaaataattccattttaacttaatacaattttttactgctttttgctttcaatttttacataaagttatacttttaaaaaaaaattgaaagagattgtgaatttcagcaatagttctagctctactcactaaaattttccaattttcattagcaagaggaactattttaaaaaaattaagtttgaaccagagaagctgaagtcggtaacatatttttaaaaaaaatatcatttatagataaagaatattagacctctcggtcattgtatatataatatttattagaattgttgatgcttcaagcaatttagtcaaattctaagcataaattcatttagccacattataaatcgcaaaattataaatttaaaagtaaaatagaaattagttacagcccacaaattaccttaatttgtgtgaagtgcccttgcaccaggcgtgagtgcaccagttttcacttttgatgctggaagctgcctttggggaattggagagattttttggtaatggcgcataggtgggcaccgttgtgcgcttcagtctcctagtcgggtcatgttttgagcaaatgctccctttggacatttgttgattatagcaaaattgcatttgagaagaaggaggaaagattggcactaggcggatgggaatgccccaagtcttactgctcggtcatggaacgttgcgcccaatgttgggtatgtaacattgtgatgtttttcttaattttccgccttgtaatctcttgcaccatgttaaaaacattaaccatgtcatcttatcaaatttttaaaataacagctaagcttctttaaactttttttaagcctttagaattaaaattatatatatttttgaagtattttgttaaacaataaaaaaagaaaatatttttttaatttacaagtcattttgaaagaatctaacattgatatattaatattaaattaaataaatttatcaacaacgattgtgatgaaaaatataacaaattttatttttttgacatcacacacatatggttttaacaccaaactttgtactaattactaattactaattagc

SEQ ID NO: 188334 - DNA, 1062 bp, Cannabis indica
ttttggttgctttagagcgtatgaatcctgagaatgtacttgaatattacatgctcattatttgtaaaattacaagaaggctgtgtagaatgaattttttgttgaaaagctactaataggtttggctatggattgtgtagttgacattttacaagctagttttggtacaagtcatgcttactatgctgtttaccttagtttttaactgtacccatctggtgaagtgtatgattataaatagtgtcaatcatgaaaacttgtatagttgggattgtgttttcgagaatttgctaggtttggccaaattgttcttactaattattgcatacttcttggtgcaggcatgaaagatgacaaagcaagcaaccatgacagcgaggcaaaggaggaaaaaagcaaacataatatcccttcaacagagtataagatgcctcttgtttggatcgacttagaaatgactggtaagtactaagtactcagtctgttgtttgatcactatgaaagagtgcttagttagtgcatgcttgttttctgcaaggtcttttaggagatctgcctaaatatgtttatgattcatatatgtactatagtgtatatctattctctgaactttttttcattcaaatttatttatgtcttgcttgacagtttatttttacatagagaagaataaatgataaatacctaaggaatagaaagagaaaatgttctttcgaaaaagagaaaatgaatttctaatgagttcaatactttccaaattcataaaatgaagtggaatttcaaaccttatttaaaacaatgcttcagatgcctattaaatggttgtttagcaaaagccccaacatctataaaacaaaaactatccctgtcagtaatattataattttataaaatttatgttcatatttcaacttttattcctttttcttgcggatatacttaagatgggtaatttttttttattattatttttttttttaaatctgttatcacctacttatgtgtgatgtaagaatattaaatttctcatcagcccgttggctatgttgtaaacttactttc

SEQ ID NO: 188335 - DNA, 6121 bp, Cannabis indica
taaaaaaaaaaaaaaaaaaaaaaaaaagagtagcctctcctggtctgttcaaccattgggctcatcgttggatacaaatcatataggtgtggcccatgctagaaacccgaaaaacgcgcaccgctttgatttccctccctcccatcaaatttctaattcagtgagttgacgcgctgaaagcgttttcttagattgcagcccaaaaaccctaattccccatttttcaacttcactcaaattcgcggttcagcgaatccactcggaccaaccaggtgagttaccagtgtcctttcttttcgtcgagaacgttcatgcatgaacattcttttgtacagttttacatgcaattttgtgtcaaaaattgtcaacgtgtaggaacatttatggtttaagttaaatactctacacattagggctggcacctcagatatctttgttgggttttgactcacttatgataaagaatgctttataggaaatgttgaatagatacgtgtgaattttctggtttatctgttttcatagtagtaatagatggcctgtggtttgtggaagatgtgcagaaattcagagcctgtttttaaatgtctttgatgaagtgaatgcccatttggttgtatttgtagttacaagattatcatgagtgtgatgccctagaattgtagagtggtttcctggttggtttgtgagttaactgattgattggttggaaaccttttggttaattcacccagtacaggacaatgggaactccggtttcaaacagttctgttttgaagcgttctttgagaaagaaatcaggtttacggaactatgatgagaatttgatggatgaggtcattgagaagcatctgggtgctacattgaagagaaagagtagaacaaaggaggatttggagaaagaaactgaaactgaagctatgatagctgtgtctcttggtttcccaattgatgcacttcttgaggaagaaattcgagctggggtagtgaaaaaattgggtggtaaagaacagaatgattatattgttgtgaggaatcatatattagcaaggtggaggggtaatgttcgaatgtggctatcaaagggacaaattaaagaaactgtgagtaatgagtacgaacatttgatatcatcagcctatgattttttattgcataatggatacattaattttggggtttcaccatcgttcacgtctcatgtgccagatgaggcaaatgaaggatctgttattatcattggtgctggactggctgggttagcagcagcaaggcaactcttgtcgtttggattcaaggttattattctggaaggtagaaatcgacctggtggaagagtttatactcaaaggatcgggcaggaaggtaaatatgttgccgtggaacttggtggcagtgttattactggtatccatgctaatcctcttggagttctagctagacaacttaccattccacttcataaagtaagagataattgtcctttatacaagccagatgggtcgccagttgataaggaactcgattccaaggttgaagttatcttcaataagttgcttgacaaagtcatggaactgagacagattatgggtggatttgcatacgatatttccttgggttctgttttggagagactacggaagttgtatgctgtagctagaaatgatgaggagaggcagcttcttgattggcaccatgcaaatttagaatatgcaaatgctggatgtctttcagaactttctgctgcctattgggatcaagatgacccttatgaaatgggtggggaccactgttttcttgccggaggtaattggagattgataaaagcattgtgtgaagggcttcccatattctatgggaaaactgtcaacactattcgatatggaaacgaaggtgttgaagtaattgctggggatcaagcttttcatgcagatatggtgttatgcactgttcctcttggagttctaaagaaaaaggctattaaatttgaacctgagttaccccaaaggaagcttgcagcaattgacagattggggtttgggctgctaaataaagttgcaatgttatttcctcatgttttctggggagaagacctggacacatttggatgtctcaatgaacaaagccataaacgtggagagttctttttgttttatggttaccatactgtttctggtgggccggttcttattgcacttgttgctggagaagctgcagaaacatttgaatgcagtgatccctccagtttgctcaatcgtgttttaagtgtcctcagaggtagttaatataattcaaatttgttacttcatttcatatagcttccatggcatccatcatctaatgtgtacatatgtaatattttttcttccctttcaggtatatatagtcctaaaggtgttactgtgcctaatcccattcagtcaatatgtacaaggtggggcagtgatcctctctcctatggttcgtactctcatgtcagagtacggtcatctggctccgattatgatttacttgcagaaagtgtgggtactaggctgttttttgctggtgaggccacaactcggcaatatccagccaccatgcatggggccttcttaagtggattgagagaagctgcacgcatataccaagctgtaagggttcgtcaaaactatcatagaaaatttgttcaaaaaaatgttggacccaacaatgatatgctggcatatctctttaagaagcccgatctagaatttggaaaattctcatttgtgtttgattctttagtagaagacacaagatcaatggggcttttgagagttacttttgacactagcgaaggcagtggccaagaagacttgggaactagtttccgggattcctttgacttgccattgccactttacactacaatatctcgtgaacaggcacatgaacttgaacaagtcacaggaggagatgaatgtaggttgtcatacatggtaaacagtcttggattgaagctgatggggcctagtgctgtaggaaatttttgtaattctttgattactaatattgttagcacaagaagaggcaggggaaggaatcgtttgtttgttgaacagccttaacttttgtggagattatgttaatttcaggaacttaatcttctaaccattctgttggcctttgagttttgatgaaaacccttgggtgccttccaaactctggtttcatctttagatgcaactaacttctgtatataacatagctgtgtaggttattcattgtcttcaagagtgatcaagtttcttggagcttggactggaaagccagtttgcttagtaaatgtagaattttttgtagtctgacggtccccaacttggtggccacctagtgagacagccttgatatgtgactgaaattttatgtacttcaaagatgtatcattttcattttttgtttggatgaaaatagaatgataatgtaattttgaatgggattctttacatgtcaagaattatgtattctactatattttaccgggctctgcttgtgcatataaggtgtttaacttttcttgtaagaaatttctgttaaaataactgtcctaatcatagtactgatctaatttaattctagtttttttttttcgtcgtctctgcggctaaaatcagttacttcaggtttcattttcgcttagtattatatttttgagtgtttttatttttatactttaaaataggtttttttttttgtatttttacagaattttatatagaaatccctattgcaactaacggaacaacttaaatcgcaactaaaaattgtatagcaatctacatagaaactaccggagaaattactttagaaatcaaaccgtaaatttgaaaaaaaacaaaaaattaaaaaaatagtatttagagtaattctaaatataagtaaaatcagaaaagattaacttaagttttaaaatagtctttcatttctaatgagaaggaaatgatgagaaatggaaactaatgtatgtatatgagagaccgcctcctatagaaaccttattctacttagtttttttggagattgagagaaacaaaaagaccaaaatcaatcactattgcaaaacattcatcttaacaaaatgtgttgaagtattttattgaagaatgataatgaccagccaactgatgcaagaggtctgtgactatggtgatgcattctgcataaagtcgacacaagtgcgacagttgcagtcgaagtatcggcatcttaagcagccaaagcagacacaagaggtgcagccatgacaccatgaattccgaggacatcccctgacgttcttacggctctccctctcttcttcatcttcacaggttattctggtatgtcaaattattcatcagaagaaaataaaaatagagcttagtttaattacagattatcatcgcaataaaaaaactacatgaagacaaaaacaagatttgtagcaatgtttaggatcttagttagtttgtctacgcaatagaaaatatggtagaaatgaaagatgtagaagttcatctctactcaactaagttaaatttctttaagaaaacctgaaaaaaaaaaactagacttgtaattcagtgtaaaacatgaacaaacaatcacaaaatacaacttacttgtcataaggcctatcagaacacttccacctcctagtggccaaagcatcatggaagattctgcattcctctttggtccttaagcgaaacctgcgttctttcttacaccgcgagcagctaatgaactcgtccctatggaagttccatttacgacgaatgcagtctcccggggttggaaggtttgagccgtgcttgtaatatttcagcagaccacttttccacaatggaactttggctctgtccaccctgacccaaacgttccttttccaatttttggggcctcttcttgatgaatgtttctcaaactcttcaagggtcaacctttctgtgccaccattaattaatgaattcagtaatagcctttgtgtttgagatatgaacccacataccaaaataacatacacgctttaatcaaatgttatttaaagtacttgccttctttgcaaccatcagagcaattgcaggatatgagaaactggcctgaactgaagaccttgagcttaccaatagagtccccaaacttctggctagtgcagccgcatgtgacttcaatgtagtctggcccacgccgaagcccatctatgtccttcagattctcatcactcaacatttcactcgctcccctaatagtactcttctttgtcccaactcctcctgcatttacatatcaacacactcacatatatatatatatatacaaatatacatatatcttcagtataacatgctgtgaagtacaggaagattgtgtgtgctgagtaccttagatgttactagctatagctatgggctatagctgcttaaccaaaatacatggatctgtatttacatgtatatatatttatacttaataaaataaactgacataaaagtatagtcgtaaaagagaagtaaacacatgtagtggtatataagaatggcaaattatattaattagacaagtgtatgagtttttttgcatggtaagaaaaagaaaagtacgtgattcaagggagagactcggctcgggtttttcttttcaatgtcagtttaaaagtaaaaaatttccgtttcttaagttaatgctttgtagctttattgatatgcacttaaaatagtaaagtcctccccattttggtttgattttgtgagaaaaattcattttatttttttatttcctttgaacggttttggttctttgccaaattatgtatgtgagataaacgtgtgcaactttggatatgatatcatgttgtttatgtatattttatacacaccaaatgtgtaatatgcatttcttttaaacgtttgtttgaaagtttcggtctctagctacatttgctaactcattaacccattattgattcctgcctatgtatgacattgtcatactcctaatcattcatgtatatacctaaatcttctaccttaatgtaacccattaattgattcatgcgtatgtgtggtattttagtattcctaatcatatatattgcttaagagtacctaaaaatatgtga

SEQ ID NO: 188336 - DNA, 1080 bp, Cannabis indica
tttttttttcttctgattcttgaagtatatgttgagaatcttagaaaaaaatatcacctttcattcttttttttttactttttttatttaaaagataaattttgtttcatttttaaaatgaactttcatgaaaagctaattattttcatatatgtggctagatttcaagctttgttaatcttgttatggatggagctgcgaacagtttacaatattgttgaaaaactaatttaattcagttttatatgtccttgctctggtgtataattttttaggatataggctatgagggttgtgcatgtctatttctttttatagctgtagttagtgagaactacttgttgagactctagtctagctcaaaaaagaaaaacatatattgaaaagaaaggaagttgtttcctttcttatgtctttgtcaaacataccctgcagttgcattggtcaattcttgacatttgaataggctagatatgggaaagaagttggaatcacaaccctaatttaaactttttttttctttcttcttcttataagaaactgtaaatagttaccagctgtttgaaccccagacttgttacatacaggattcataccagtcacgtgttctagaagccctcaatttcttttgtcatgtctaggtctatatttggttgcagttattgagaaaggaaggattagtctgtccttgaaataagagattaatgactgcaaacatttgtttttttcttttacttggttttcgtctatgatttgaagcgaaaaggaaacaatgcattgacttgtttcaacttcataagttgttgattgaaaatgctatttcccaggaactgtcaatatacacccaagtttgttgccgcagtatcgcggtgctgctcctgttcaacgggcattgcaggttctattatatgttttttgttatcacttttatcaggaataatttaaaattcacattcttctagtttctgcgcaagaattcatttgtaaatcttatcaatagtccaatgattaggatggtgtcaaagtaaacaggagtgtccctagcattcacagtacgtgcacttgatgctgggcctgtaa

SEQ ID NO: 188337 - DNA, 1896 bp, Cannabis indica
cgttactatatatatatatatatatatatatatataaatataaaaagttatacaatagaagcgaaaattttgactctcaagattaaattaaattatatacttattttttatcaaaatgaattaaaaaataaaatttttattgtctttactttttactttagaacatctcacaacaaaaataaaattatccatatatatttttcaatttaacactcttaaactagataataaatgttgagtatcatcccaagtttacattagaagaataggcaattcagagtcgtattaaatataagtgttccacctactctattaaaacattttgggaagatatctaaaaacaaatccctaagcttaaacttaaggcacataatatcatactaatgtagggatgagcttgtagctcaacaaattggatgaacgagacccaacaagtggtatcagagctaaatgttcaagagttagaattgtgggctaaactcttagtgtgatgacctcgcgactgaaaatttgcatgatgccttgtatcgaaagtctttaatattgtggtagtcaggcagcgtgtccagatagagatatgtgtttagtgtcttgtgtatcgaagtcttcctgacaatgtagaaggtcgggcggcgagttttgttggtgatagttgcagtagaaagataatttcgccaaaggggaagccacgagtaagtggtttttagtttgaaaagattgcttgggtatcaattcaagtctaagaatatgtaagggttgtattgaatataaatatttcatatactttggaaggtgttcaaaaataaattcctaagaacatatcgtactaatgtcagagttaaaacgagattgtgcctccacaaactggaagaagaggccaacaatatgttagtaggaatagacaaatttggttccttcacctaatattctatctagttttttctctttttttttttttggttgatattggcggcaaattcacttatattttatattttttaacagttaactacctgaatcattttttggtggcaaaaatacacaaatcccttttctattagttatttaattcttttgttcaaaagactatgttaagtgtcacattggacatgccacagtggacacaagtatacacttggcaaatttttagtagtctacgtaatattaatttaaaatattttttaataattaatattacgcggactactaaaaaatttaccacgtgtatacttgtgtacattgtggcatgttcaatgtggcttagcatagtcttttggacagaatgagtaaatagctaatagaaagaagatttgagtagttttgccaccaaataaaaaatgtaaaatataaatagttttgttgtcaatatccttttcgtttcagaaatacttttatcctgtcaatttgaaggttatttaaccaacttttttggaaaagaaataaatagaaaattgaggtttttgtaaaaatactagattttaggcaaaaatttataatttattgtcacacacaactttttacaaatatactgtctttttataaaacaactgtaaaacagcaaaacagaacaattaaaaaataacaataaaacaactcaaaaataaccgtagaacaacagtaaaaatttaacacagtatacagcataaaacttacacagtattttttaaataaaatatagtaatttttaaaaaaaaattctactccaagaagttaaatatttcagtgtaaaaaatttcgagaaaattctcatttcaaatcttggctgggcttcaataactagttacaactgaggggtaagttgaaaaatgcctcttttattaattaattaaccaaatttgcttctaattttatatttatttgaaacatacctctttttatatgtattgtatccaaaat

SEQ ID NO: 188338 - DNA, 1394 bp, Cannabis indica
gtgagatgggaaccgaattaaaaagattcccaacaaaggaaaattaacttttgagtagaaaagatctttctcttagaaattagtaatgtttgatttcaaataaataaataattagtaatgaatattatcacattacaacttttttaatacgcaagttctcaatgtttatacttggtatcattcaaatcccataattagtgtgtttaaatatttattgttaattaatagtgtgaaagcaaaacaataagtcaaaaccttaatcctaattttatattatagagacccaaagaaacaactcaccgtgactgatttccatatgggtataattaatagttcacacacacgatattaattggtatatttatcctaattttatgtgttgttttttaaagttgtaaaaagctgtggtcgaaggaagcatactagtcatggccaaccttggtgataatgcacctccggggaggcttgaggtttgtgatttcatcatattttccttttcttggattttaatgaagcaaagggtatatttgctaatgggaatttctgaatactgatacatatatgttttttcctatcaaaggggaggtatgctgccatggtagtatgctggcttctgggaaatggttgcctcttttcatggaacagtatgctaactattggagattattatggttatttgttcccggtaaagcaaaattatttcccctctttccaatttctcacttgctatggctatctgcatgttgaaacattcacatggtttagatgttttacctatacaattacttcatacaaaaataatcttacacaatcatgttttggatttaattcattatgatatacatctaatttagttggcatatataggaactgatactacttatttactactaagaattttttcaattttattagtactagagagagggattagaattataaaatgcgggtattgagtagactatttcattgaattttatacatatgaaggattagaaattaaacctgtgatacattctgcgttgaaactatgatctcatgtataagtcaagctcatgtgattgttcgagtgattaaatttagctccaatgacattcaaatcaatctatggattcctttcatctgatatacattctattgagttataaattcaagtttaactttttgatgcagcgataccactctgcaagagtacttactttggtataccagccatttgcgcttggaacactagcagtactcgcctataatgaggcaaaccttaatactagaaggcggaacctgttgggatacatactctttttcatagcttctgctatggttttggtcgtaagtgtgtttttgttactatatctaattctaatgtaatccaatgaactaacaactcattgtga

SEQ ID NO: 188339 - DNA, 6651 bp, Cannabis indica
taagtagtagtaggtaatgtaaagttgttatatatatacacatgagttttttattaatttttattttgacaaaacctcttagacaattatatatatcaatattatttgtttattttgtaactgtataagttttttttgttcatagacatatatataggtaaagctttttaggtaggtggtattttgggtgcattatataggcggcttctttgaatcaagaattattcgatcataatataaagtgtcttcatccattaaaaaaaattagaaataattattactaactgttctagtcgatgatggtggactttataataactatataacttcctaaaagttttattttattttattttttactaaaaaaaagaatgaaagtataaaggaatatatacttatgaggatattctagtttctttgggttttgaataaggagccattgaagtcttttctgttttagatttgttgtgtttttttattgggtttggcggttcctaattgcgtctcttaaatgatacttgaacttattattatgttcatatatatcgagaaaataaatttttgttatttttttaatcatctttttatataatttaaagtatatttttagttacaataaaaatttagttgtaaataaaaaagttatatttaggaaattttttatttttacactttaaaataattttttttttttacaattttacggtaattttacataaaaatttctattgccactagcagatcaacctaaattgcaaccaaatattgtatagtaacccatatagaaattaccggtaaaactactttaaaaattcaaaccgtaaataaaaaaaaataatatatagagtaattctcttaaattaaatattatttacggtgacaatattaatatttgttgtgagtacttattctagctctcttgttctaataactaaaagtaagaaactaactatacatataactatctcaactagctatattcttatttatttataatgttaaattattatttttgtactaatatttatagtaatacactaattataatcattgtttcgatgaacgttatgtaacatatgtattattatgatatttttgaaatcataaacttttaacttttactcacaaattcataaacattaactttttgtaatatacattatgtttaattcttcattttatccatgcatggaacaatagagttgttgaaaaaacaaaattgaaaaattatgcataaagtggaggcatattgtagcgtctatatctcctataataaggttaatatttacattaatgcatctaaagaagtgaataattaaggattacactataatataattcaataattgtgattatatatacactaaacatatttagaaacatatttttgataaagttaactcaaaattttattaacataaataagagttgataaaaattaatttttttaatgcttaataaataatgtgtacttattaagatgagtgagagatttttgatgtagttttgtagttaaaatttacatattctacgactacgagtctatttcaaatctgatgttctttgattacagatgcaatttggcaaaatttcctctcagttggaaaattggttgtacattttatgatgatttgatctgctatgtataggagtaggatagtatttatttttgatctaatctgtacaataattatgaaacgtgaatattctccacgttttatatgttttaaccgataggcgtgaaataacatgtaaccaattttattttaaataaaataattgcttatttgacttggtctttgtaatattttgtaacatgcggttgtcgaggcgcttgatttttgatgcataggccttagggaatacaccaactcttggaggtatgcgtctagtaacatattccttgggaaacatactgattatatttctaaggtgatgaaccagagtaagcaaattaagtctcgcaacgtcaacaatgtcaacaacatgaatgttcctaaattccttaacaagcttagcatcttcagttacatactaggaatgctttaagtgtctcgcatttaatgttgcaagtatcagcatacctcgagaagaacatgtataggcttcatactgcgaggaggctattcatgtactctttaaataactgagttaatttattcccttcattatacacgtgttatgtagctagacccattatttattgctcgaaatatgagtatcataattgtcttttaaaaaatatttttaaatttgaaagaactttttattcattatctagggaaatgatccgttcttttttgcttattgagtaaaccacactctcctaacagaattcctcaacgaattcaaagaaaaaagagatcaggccaacttgaagttacaagtttaccaacaaaaggtatatttcaacaagcaagtcaaggacaaaaagttctttgtgagatatgtggtactacgaagagtatttctaaacactaaagaccctgcagcaggggtacttggcccaatctgggaagaaccatatcaaattacggatattacaagtttgggcgcatacaaacttggtcaggacaatgagaaaatagaactaatcctgttaccaaaatattagaacgaaaaatatctcagaaattactactaataagccaatttgtaaaaaaaaaaaaacactactttcaagtagtggttcctgagcggtatgccgcacacgaatttgtgtggcttctacatggtatgttgtgcagaagtatttgaatacttaagtttttgaaagcaaccatgaggaatttaagattttattctaatacatgtacgttgccagcaacaacacatttgtaaaactaatgaatgaataaaagtgattctttcactcggattgtgtcaaataattttataataattgacttattaaaataaatattatgtctaacatgcatacaaacaagtcaatctaagaaactggatagacaaaggctaaagaacttggttaattgcaagtgaccaagagaccataagtctactcaatcacttgaggggaacctacacccgcacaacaagcaaagtgaaaatacttaagaaaataatttaaagcaaagttaatgcaaaaaaattgaaagttgagcatgtgcaagtggctttgttacattaagggaaatcattatgggattaaaggctgaccgaccaaccatacgtcttaacaggaaataaagccaagattaaaagttgtctggctgactatatgtctaaaatttaatggccttaggccgtgcagaaaataaatgataaacaaagtaagagcttcaaagctctgaaatgtcaaaagaagtagtgggttcatattatcaccgacctagtcttgaacagcaggttaagaagatagcctgacaggagggtccactggatcaacaatctatcccgcatcatcagtagggtggccgaaagagacaacaacctgaacggagttattctccccagagggtttagatccctcaaattcctttccctaagctactagggattcgagcaactcaaagctcacgtatccgtaatcaccctcgggattctatttccagaactcgtagaaggtctcaatggccaggttgccatatatttccttctctgtagcccgggtttatttcacctcctctagcttttccttaagattagcaactccccatacaggtgaactagcagccaacccaaagactctttctggtccgtcaagtctctcacctacctctttgcctcctccaagtccttatctaactttgcggtggatggcatgtcttcaattttttacttgagttccttaacttgattgttggcaacaagcagctgtttcttcacctcgccgagctgggtctccaagtcctcaatcctcttcttggtggcaacgttggtctccttgagacgggcataagtgtgcccaaacttcagagacatctaagaataaaaattacaagttagaacaaaagttgcacgattagcagagataaatcctctagagcgatcaaaagagagaagataacttaccaaggtcacatcctttaggaagccaaaggctaaggtctcaatcgactcgctgtctgtgtcttgcagctgcttgtctgcttgaactaaacacctatccaaataattgtggacaacttcttttactttctctacccgaagaggaacaaatgaaggaatgggtctctggcgatccttacttgattttctatttgcaagaggagaatgcccctccaagtttctcaccacgggttgattggccagaggaaagtaaggaggaggcggtggaagacctgagtgggtagagcttgacccctccttccgggaaaccttcgacggggactcttcccctaaagtacccacggtatttctcttgacaaactctcccaatttggaagccatacctccaaagatacaaaatactagtcaataacttaaaaagacaacattcaagtataagttggagggatttttactctcagccgactcggaaatatcaacccgggggaagttgtacggaacatcatcatcatctgaagaagactcctcgctttcctcactagcaagacctttaccctttcccacaatagcagttggacgggtagtcctagcagactctgacccttaaggccttatgagaacaggggcctttccaaaagactcaccccggtcaaccctcttccaagtagctctctctctctctctctctctctctctctctctttattgttttctcgggaaagttgtatagatagtgatgtgattttcttttctacttttgttaagatattgttttctttacttgtgtactttatattaccagaacaagaaatttttggacttgagcttttcttgcattcaaacaaaatttccgacgagtaaattggttgaacttaattttatgtaaaagggtttcataaaagtgaaaccaaattgctattttgattgataattttgaatttagattgttgaagtggaagatgggatttttggtttttcttatgtaggaaaatgagtgagcatggattcaatcgaagtgccaagaaatgtaaggagaagtttgagaacatctataagtaccataaaagaactagagatggtaggtctgggaaatccaatggaaaggcttatcggttttttgagcaattagaggcattagatcaccactcatttgatcatccttttcctccttccggggaccaagttaacacttcattaggagaatctaaaacaactgcggggacaacaagaacgagtcctagtaatgttgttatcaatgctatcccatgttctgttcataagccagcttcaaatttaggtgatagttcgccttctaacatttcttcttcgagcgaagaatctaaaggtatgcgtaaggagaagaagagattgactcagttttttgagaggctaatgaaggaagtgacagatagtcaagagaagctacaaaggaagttcattgaaacattagagaagtgcgagcaggatcggttagcaagggaagaggtgtggaagaagcaagaattggagagaattaaaagagaaagcgatttgctggttcaagaaaggtccattgcagctgcaaaggatgctgctgtgcttgcattcttgaagaagttttcagaacaaactgaaccatttcaatttcctgagtacccaattgtgagtgtggagaaagatgtggataagcaggaaaagaatcatagtggaaatgatgaacagacatgtttggacaatcaagaaaagttcaacaataataagaagtttgtacaggttagttcgtctcggtggcctaaagatgaagttgatgctttgattaggctgagaactaatctcgatacacagtatcaagataatggacctaaaggaccactatgggaggatatttcggcagccatgagaaagcttggttacaaccggagttcaaagaggtgtaaagagaaatgggaaaacataaacaaatacttcaagagggtgaaagacagcaataagagaagggttgaagattcaaagacttgtccttatttccaccaactcgatgctttatacaataagaagactaaaaaagtcgatgacccggagaatactgggtacgatatgagacctgaggagctcctaatgcacatgatgggtgggcaggaacagcaacaacagcctgctgaacctgctactgagaattgtgaaagtgagaatctcagtcaaaatcatgaaggagacaatgaaatagtagacaaagatggttataaagatacagctaatccttcttccatggaaattatgggttagagttgaagttggtaggcaaaaattattttaacgagtcaagattcaccatcagttgtaggactacccttgtggttgtaaagtaagattttctggtactgggaacgtttttgcagaagatagtgatagacgacgactccttctatcaccatgtgtacatggatggtcaaattatttgttcattagagagagaaagaataaggaggcttggtgttttgtgtagttaaaatagctttcgatactccaagtcttgatgtgttcaaaagttgaaagtggtcgttttgcttttgtttgtaatcaataaaaactgttgtagttatgttatgctgcaatcaaagttgtattaattctttttgt

SEQ ID NO: 188340 - DNA, 1978 bp, Cannabis indica
aaaggaagaatgggcgtgtctctggtccctctaccctcttcgggttagggttctcttcttctctctctctctgtaaacatggcgaaccgtacggacccagctgcgaagagcatacgaggtacgaaccctcagaatctggtggagaagattgtgcgttcaaagatttaccagaacacttactggaaagagcagtgttttggcttgacagccgagaccttggtcgataaggctatggagctcgaccacatcggaggaaccttcggtggaaatcgcaaaccaactcctttcatgtgtctcataatgaagatgcttcagatccaaccggagaaggagattgtcatcgagttcatcaagaacgacgattacaagtaacttcatatacctacttctttttttttttttttttggtaattgggttttcgccattgttgaaaatctttaatgtgtgtgtgcagatatgtacgagttcttggtgctttttatttgcgtcttactggaactgatacggatgtgtatcaatatcttgagcctctttacaatgattatagaaaagtcaggcaaaaatcacctgatggaagtaagataaccatgttcacttctcttaaatttttccatttttgttactttttcagtgtaaaaatcaccaataatacttattttgatttgatatattttcagggttttcattgacacatgtggatgaggttattgatgagcttctaacaaaggactattcttgtgacattgctatgccgcgtattaaaaagaggtgcttagtttcatttgagtattgatctgatgagtttttacttttttagaacaatccattgtgaaaataattagaatggcttcccaattctattgttttcttgttactatttagtaaattctaagcctttgttttaatgtttgtttaagattgtgaaacaaaaaattgctagaaaaatggtttaaaaaacttatctgaatttcattttatttctcaaataaaaggtccatttcttaaattttgtacagccccataaaagctaaacacggcctgcaatgaacttgagtattaatagtattgatctaagcttttagagatttagaacaatgagttctctcttagtatgtgttgatcaatccatattgaaaataattaggatggcttcccaattttacccatccatagtgaagagttgtttccttgttaccatttaaatgattgtgtactttttgtgtattagatggactcttgagtcacttggctcgttggaacctagaaaaagtgctttggaggaagattttgaagaggaggaagagaaagaggacaacgaacaactcgatgatgatgatgatgaacttgaagatgagggacatgagaaggtttgtgtatcttccttttcaaagaaatatctgctatgtttcctttttcattgatatcattaaggggatttttaaaatttggtgttgttatttctaaacaatggctatttattttatttctgcaggattattatcgtggccggagtcctgtacgagacagagacagggatagaagacatgatagtcacagatataggtaaagtctttcttcatatgtgtttctttcccattgttgcgttttaccagaataatgtcaatttcttgttgagtttaagcttgtctgtaagttagaagattccctagtcgaacttaatcaatttttaagagtgtctggatctgcaaggattagtatataattaggccagatctttcgaatctttggttagacctttctctaggcactttttaactggatggttctttttttacattcattcaaaccgaacacaacaagaaaagggccattccctcatctcaacttttctttcctaacaaacatatttggaactcagataaagattttagaaaggagagacaaaaaaaaaaacaaatcatttcatttcatttctcttgtctggatctcaaactaaaaatgagttttttttttttt

SEQ ID NO: 188341 - DNA, 2137 bp, Cannabis indica
taataattagattagtactgtaaaaaagtgatcttgttaataacaaaaacaaaagaaatgaataaaatggaataatattatgtgatcaaaaataattaattaattaattacataattatgtttttcaagtttaattagtactatatatatatactacagtcacctgaattaatattaatatatatatttgtataggtcagaatcttgaagatccttcttaaaaaggagaccaattattatctatagtttttcattttttattgtatgaacaaaattaaaatcttttaaataagggacccattttataaacataaaatcgtgtcatatgttttttaaagagattttctggtaataataatacaaaagtttgtagtagtaagtaccaacattaaaatattccttttttttaatttagtactttttattacatatagctacgtagtcccatttatctagggttttgaaataagacccaattctactacaagggtttatataaatatatattaattaatcatataatataattaaattattaccttttgatttaggggaattttgcaaaaaagccatagttgaattcaaaatccatcactggtgatgatgatgcatggtgaagcttgagctatgatcatgttgatgatgatcgttattattattattgttcggtttattaagaatcggattaagcttcttcttctttttcttggtgtagggaattccacgagcttttgcttgggaatccctaacatcacgaagataaactcttatagctccacttgcaaaagggtttgtctcggggaggccaccattctcttcataggcggctctcagccgtcctatcagagcatcgaggcttccccaagcctgcctaagtgggcaagaacaaggccccggtggctcaggttgaccaaaaaacacacaaccttgcatgtgaaccttagtttttccgaattgatctaagtaccttaaaaattccaacacatgattggagttgcactgtgatagggcaactggcggcctctggttcctcaggtattgcccaaaagtgttccaatccctcctcttctgagactcataacgactcagaggcggcggttgatctcctcctcctcctcctccttctcctccaccacctccagatctcgacgatccttctaccacttctttgcctttatcatttgacataataagaaaataatttttttgtgtttttgagagagaatttgaagatgaagaaatagatgatagttgaatgagattgaatttttttagaagagaacaaaataagaaaagggaaaaaaaagaagaaaatcacatcaaaaatttggagaagtgattaggggagacatggtttattggtatgggacccaagtaaggaagtgctttattaatatagctcttctttttatttttattttcttcttttctctctctcatatattattttcttgctttagtggtactaattaatattactttattattatttttctatatttttattattgtgcttccatcatcaatacaatcattatcatatatagctagtcttattaattaattaataatcttaattagtaataataaatttcaaagttaattttttttttccatttatgaccttattacagttcaataatctaagccgtctcccttttttgtgtttaataaataaataaataaaaataataaattattttttaaggaatatggttagttaattaattaattaattgaactaattatttggttgttgttttagaatttagataacgtggctcatattttattatttattttataaatactgaattggatagcagctatagaataacacatatatataccacttttgactaatatttaattggctttaattaaataatttacttcattaattaacatttaattgttatagttatagagagcattactagtggacaccaactttctataggtgacatcaattagttagcgatattttttttattaaagttattttcttaagttatcatatatatctgatacttaattacaccaataatagtagtataataccgagctaggcgccaaaatattggacaacttagaccatattgtataaagtccctatttttttaaggcctaatttttt

SEQ ID NO: 188342 - DNA, 4090 bp, Cannabis indica
ctgaagaggagatgaggaatgcacagaagaaaagaaatggcagcagcacatgtagaacccaaacagatacccaaaattacccatttgaaagaagtgggaaggcgacaatggaaagatgtttggaaacaatatggtggtggaagctcgacatggtcagaagccactcgatcaaataggtattcatgaaaactatatttggacaggactctagtttaaagaagatggacatttttccatagctaccagagaatgtggcttcagtttgaaggtcaaatataaatgagaaaagaagtttagtggcatagaaaaggtgaaaacagccagataatcagaaaggcgagtgtcgggatttgtttcgagttgtgaaataattctttttactaattcacaaaagcacagaagaaattttttttttgtttctttgttttttccttgggaagtttgaaaggtatccagaagcttagattgatgatggtgatggttcggaggataaatccacacggaatgtgtacaaatgagatggagtataacttaacatgcagatgagtaaaagctaagccagaaagtaacttgcttcaggagccaggagccaactaatctggttgaaagaacatagaggagactgcagaaaggattttcctatgggaagaacgatcaattttgtgttgtgtttgtgtttaattttttcctttattttttttacctcattgaatttcaaaaaatgaaaaaaaaaaaatgtttcattagaatatactgtcaataaactgattatacatgagttgatagcttttccactgtatagttgtatttcttttctaattacattaactataattgcagaaaaataaatatttagaggaagtttgaatgaaatatttctcctttcatttccattcatgtatatgtttataaccatctttcaagtcatatatatatatatatatataaatatatagtgtttgaaaaattgcatatttttctctcctaacaattatggttgtgtaaaatggggaaacctctttaagaaggttttaaacttccaccacctgtttaacataaaaacaaagaaagcttattaagtggatagccaattgtatgactttttgagtcaaccaaaagacatgtttgtatcacagatgataatataatatatatatatatatatatatatatatttatatataaatgcatacatctcaccatggagaatggtagtggatgagctgaaggagactactagtgattcttttcagaaccttatacgtatatgcctaaaccaagctcctttgggtttgtttccaccatccaagctggtctgtcgagcaaacatgttcagttgtcactgtataaaataagtaaaagagatgtaacgtaagatgttaatattttgtgttatagactggaaactatacttgttcataacaaaattgaatgttccttgtgaaccgcgtttgagaagaacttcccttgcctccacagcaattccttcaggctgcaaagtaagataatccaacaaaatattaggagttaagttttggcctacaaatgcctaaaacatgtattttccagcaacctacctcttctggaaaccacaccccaggctttgtacttccctccagaacagcaagagcaaatgcagcagttgcagttccaactgaactgaaacacaaaatgtatatgttgaagatgataattcagtggagagccttttaaagacagatgataaatgctttggtacttacacagagagacttttgtgactgaataacccaatagtattgcgcccatttggaaactccaaatcaacctgccacagataaaaacagtaaaaacaaattgtggaaaagaagagtggggtgttcattatttttattccacttctcctcttcttactctcattgagactctctctccagcgaacccatcaagcgctcgaactatgggatcgaaaagttgaaccaactgttgaactttgtttttgtctctgaaatactcctgcaaaaatgaaaatatgcaaattaaacctggtacaggtcttaatttttgataacaaaatcatgtactactgaaaagaaaaaaaaaaacaggaagaattggaccatagtacaataatcaaacagcaagtcatgtatgataaactcctttaagtaatattaaatatgaaaaaatgttgatgtgtaaggtaccataggaagaagacttgtcatggcctccatcccccaattccaaaagaatggtgcagttccaaatcgagcactgacagtcggtattcctaggatttcatgagcacttttaacctcaggcagattcctgaaaacaagaacccttttttcaggcatctgtacatgtcatcacatgtgcttggaatccaatatattaacaacacaactggtatattggtaggtgcttacaacagataaacgtctctctttccaatgccccttccaaaatcaatgttgagcattccagtatatggctttagtttgatctcttttcctaacaacccattattggttctattaaatcatacatatgaagatgtgatggaacataaaatttaaataacacttcacaaaaaaagtcttcagaaccaacctttattataagcaaccacctcctctccaagtagcaaaaagctagtggctaatatagttggaccagccccaccagtaccggctgtgtaatagtagaatcttcaaaagaagaagaaaaacttggcagataaattgcccggacaatagtttcccctgtctatgtttgatcagggacttccaaattcaaatctaatcaatgttagtaatataaacttgttcgtcaccttagtctttctggttctaatttgttttcacttcttgctagacgaactagttctgctgccattactgtcatattagagcaattgttttttagcattccagataaaactttgcatggtagcagtatgtgccatattgtattacagaagaagaagaagaagaaaagcttatgagagaccattgctcactccaggataaattccaccggttgtaatagctggtacatttgcagcaacagctctgtccttgaaggttttagcaagttgagcgtaagatgtatcatcacaaacgtctacataggctgtctgtaagtgagggacagaaatatttctatgactaatactttgataaacagaaagcactaacatgataacatttatatatatatatatatataaatatatatatactcactcaacactagatcaaaagggtaatgttccacgagaaaaaacacagatatatacatgtagagatatatgattataaggttatgtttggagagtaggattatactggataaatgaatatatggatttggggtttaggtgcataggctgtctgtacttaattaaaaattattaaagcctaatcccacctcacaaacacgacatataagtatgaattattatatgcaacactataatctacaatagttacattttctcacctttgtgtttatggcagcttctaagacagaacacttatgtgtttgttgaaatggcccagcagcatgtacaacaagatcacaatctacccacattcaaaacttcagaagaagaaaaaagttcaagcacaggaaaatcaaaattaaaacaatatgaatcaatatacgcaccattcagagttgcttccaatgaattaacattgtcaatatcaacttcagcaaactctgagttcccaccaagagtagccaccatagcagctcccttatccctaacaatacaaaactcataaaagtttcagtttcatttttctgtgaaaataattaaacgggtatgaagttttcccatatgggtatttgtatatcgtacctgtttcgaccgccaatgagaatgcgaaggtcggggcagagcttggagagagaaatggcagtggatcctccgacccgacccgttccgccaagtaccaagaccttcgagttccggatcttctccggaagttgtatggttcctggagcacaagccattggtggaattgtgggcttggggttaattaaatgcagagaagctcctcctcccgccatagccatatcttttctctctctctctctc

SEQ ID NO: 188343 - DNA, 6326 bp, Cannabis indica
atctttctttctttcgtttttttacggaaaatcagagagtttattgattacaaataacacttctacagatatggttacaagttttagaaaaaacttccaccactcattatcttttctactcaaattctattagtattcaacgagttcaatttagtagggaacaaacactattaacaatctgagtatttgtgtatcatttcttttaggaattatattttttttaatatttattggaattgaaattaatgtttttttttcatgagtgaaatttcattataatttatttaatttttggtaatttaatattcgtaatgattaattacttcaggtttaacggtggagatatgttgaagagatacagaggaaaaaagataatgtttgttggggactcacttagtaacaatatgtggcaatcactcacatgcatgctatacacttcagtcccaaaaactatatacaacttaactcagtctggctggcttcacacattttcatttccggtacactattttttatttatttcatcttttatatttcctagtgtaatatattttacatgattatttaacattgtcacagaatcgaaaatgactcgaatattaatgtacaaaaattatcaaacaaaactattaggcaaagaaagtcatttaatcaaacacccctaattttagttatagttatagttagttatactcaaaggaacactatacataaaattattacttcataaccctgatttgttttgttttgttttgtttttgtaatgtaggaatatgatgtgacaattatgtttcagcaaaatgggtttttggtagatatggttgaagaaaaaataggaagagtgctaaagctggattccatcagtgatggcaatggatgggagaaagtagacatgttgatcttcaacacttatcattggtggactcatactggtagctttaaaacgtacgttttatactcaaaaacttaaaaggcttaaagttttggtgacaacattaatctaattaaatcgaactgatccaatttaatcttatttataatttaattgaatgtcaattttaaaattcaattaaaaacgatgcaattcactcatttatatatatattaaaaataattatttatatttatttatatataataaaaatattaaaatatatatatatttttagtgaccttttttttagtgaaattgtaacacttgttgttttatgtaatatttgtttttataatgttttgttttattttattactttggtttagttttcttaattttttagttacattaaacttgtaaagatgatatttttatgaagtattaaactaatgatatttaatatttaaatatttttcttcataagttaatattaaaaattagttgtataattagatatccaattaaaaaacgatccaatcataattaaattggataggatgatattttccaaatctaattactaattgaatcaaatcgaattataagaaaaagattagattagatcggaagtgtctaaccctacttctatgaaacaacacagagaagtactatatctatctcatgtgagttcatcatatgatccgcattgatgataatttacttatagctaccctcaagaaaaatcagttcttaatgttagacattgtatattttttgttagtttggaattaataattgaacagtctaatttatttagttattgtggttttgcagatgggattattttcaagtgggagataagatagtgaaagaaatggatcgtttagtggctttcaaaatagcattaacaacatgggctaaatggatagattctaatattgatacttcaaggactagggtgttttatcaaggagtttcagctgttcacctcaagtaaacccttcatttaatttcctttattcaaacaatactagcttgctaatctctgtttgatgaaatctttgatttcagtggcaatgaatggggtgatccaaaggcaaggaattgcaaaggacaaactgaaccaattgaggggtccaagtacccaggccctacccatccaggtgaagtcattgtaaagagtgtaacaagctcccttggaaaggtggtctatttgctggacattacattgcttacacagctgagaaaagatggtcatccttcaatctatgctaccacaaacaagacatttgtggactgtagtcactggtgcctacctggtgttcctgatgcttggaatgaaattttgtatgcagttttgctcagtagttagaattttctttaggaatactgagcagactggactataaatcaattgtggcacttcacaattcagctcataattaattatgcagtgaattagtttgtcgtttgttcaaatgccaataattaaaaacttaaaattggtcttggtcttggttggattgggaattagagaacataacacctgcaaggcaagaaccgaagaacaattcttcacttgttttcttctagatcaaaaagtcaatgataaaaaagtaggagcaagataaaaatttaaaactctaagtagcctctagacgatgacatgaaaggattaacaatatccaaaaccaccccagattatttctacttttggttctttattggtctaaacttgaaaaagtgtagcatctaaagcatcgacttttcataccccagtagtaatttcacaaacataaatgtttgttcctgagtaaataaactcaatgctgctgtaatattaactgcatatcaaaatacaaatacaggtaagtagctgacacctataaaataagcatcttctcgaataggctgaacaacggaagaaaagaaaatagaatgataagataaacatctacaaacaggacatttataagcaaaaggcctccgcatggtaagctgaagcatgaaactcacgattacagtaaccaaaaacacgaaggtgttgcgactcaagactacagtattgctcattggatcttgttctagacttgttgcttcaaatctatctttgcttctgtattcttttgtcctttatgggcaactcaacaggctgctgggcctcgtgtggatgatctgggcccttgtaaaccttcaggtggttgaagagtgctctgccaagctgcacaaaccattatccagttaagaattaaataggtgcaactatttgacaattccttttgttatgattaatacatgcactatatttcctagcataatgggaaaaaggcaagactatgcgttcacaaaattaattatctttatgcttaactcgttttttcaacgagaagaacatataatgcagcaaagcaagaatatctcatttcatgcggcaggaaggtatttaaaattgcagaaggttaatagtctgtcactaaaaagtaactgctttaaggcacataaagcatcccgctaaacacaagacaccaaataccaaattgtagtacttctgcgtatattaggaccgtatttccccatctcaaattcaataatctaaagtaaaagaaacaaaataacattacatatcagttagtgtgtgtgtgtttcccattatttttgtccatatcatatcagttaaagcaaaaaatagatttagattaggaactcaccctccctttgggaagcattccacgaacagcatgctcaataattctttctgggattctctgttgtaactggtcaaaagtctccactgtcataccaccaggtcttcctgaatgccttctgtagagcttttgggttcttttctttccagatacagctactttttccgcattaacctgtagttcaagctcgaaatgattatttcatcctctttgacaatacactatctattgataaatgtgaatccatatgtataaataacccacttattataggagatgagaaggaaaaaataaatgtttcacactttatacttttgttcaagagaaatcagtagctcattctagttgcaaaaaaaatggtatgaagtataagcaaacgctaatgaccatgattacacccacagctatttaatggaaaagatagagaaatgtctattgtaaacataataattcatctaaaaagtattctaaaattcattagacgtaatcctaagcattatgcaagcaccacaagtatgtgttgtttatttcataaactccgaagagataattgtgacacagcttacactcattccctgtaattttgatgaaaattctagtgcatacataactaagtaaattacataccacaataacaaatgcccccatgtccacactaggagtatacgtagccaaggttttcccacggatgtgattcgcaattgtagatgctagtcttccaagaattttgtctgttgcatcaacaatgtaccatggtttttcagtgttgatgtgatcaactgctttcggataccaagtcttgttccaaatgtcctacagtgtcaaacatatctaagtgaagcatgttaacaggaaagatatgcaaaatcttatctgtaggtgaactatcattacaacagcactatatcttcttaacagtgcatttcaaccgctacttttccacttatgaagaactgaaacatttttaagcaagtctaaaagcatcacataaggtcaaatccttcctacactacagactggtaatgaattttactaaaagaagttactttcagaaaaaaagtagaacattatagcaacatgtgcaagttactttcaaataaatggcaatagacgatgatgatttaataggcaaccagtaattatgactttgaatcccctaaaaattaaacccattatctctttaatgcttcaggattccagaaaattcaaatacatttttcttagtgaaggccatattcactttctgggtccagaatgtgacataaaaatcccatatcttcattttctcagtaaaaaaaagaagctaattcatgaaagaaagcatcacaaagatggaatagtagttttaaaaagaaacacatacagggccaccagcttcagcctcgtcgaacatccagcgctgctcaaggggaacacgagaaatttcctggcaacggacctgtaaactccttcccccattttcaccacttagaggaagtttggctgtggcggagggggtaggaagccaaggccctctagaaaggctgaccgagaagccaaggaaaggggtttgtgaggtattgaaagaaggtgataatgaggaccttgcggacgaaggtagaggtgatgaagaggaagaggaggatggtaatatgtacgaacacgatgaagctgagactgagagtatcgccattttctctcgtctcaggtttttctgagtttgggttacagcttacagtgtttgaaggatgataaagcggataagattgcccagcccaaaaacactacccctccctccccttctccctcttcctattttatatttttttacaggttttttttttccaaaaaatatttataattatagactgtaaattagatcaaaaaaattctatcaaaaaaagagggttaaaaaataagggaaaaaaaatattcgcaaaccaccacattattcgtgaaaaacgacagctttatcagaaaacgacattactgggagaaaacgacaccatttttttaagttaaaacgacacgatgttaaaaagaaaagaaatcgtcaaaactacaaaattttaataaaataaaatgacaattaaaagagaaaacggtgacattataatgttaatgttttttttaaggattataatgatatgttagtaatactaaaattcgaatcaaaataaataaaaaacaaaaacaaatgattctagttccctttgtggttagctatcactttaggctttagctaatcaatatcaattaatcatctaattcacagagaatatcagcagcacaacctcacatgttatcaatttataacttcaattaggatcttcacattctttgctagtttgcttattagtttggggaaaaaaaagattttttttaacaaaaaagaaattaaatgttgagtttgaactttggtgcaatgattatcaaagaagtaacttaaaaggaaaattgaaaattgcatgtatatttttcattagaattagaaattatattttaaaaataaaaatatttttaagaagagagagagaagaaaaagaaaaaaaaaaaaaaaaagtgttattgttttgtgtgtctgactaggcctctcttccctttttccatagcctaagtaagtctaagaacacagcattaaaaatggctttgtcaagtcttctgctgatgcccatcaaaccctctccaattccttccttcaaattccaacattcttctcttttctccttcaaaaagaccctaaccctaaccccaaatccaaatcccaa

SEQ ID NO: 188344 - DNA, 3655 bp, Cannabis indica
ccttcgagacagagctgagttctgaccgagtcaccagctcgagttgtactctacttttactttacttttttttttttactatactgctctaataaaaacaaagattcctcctttcttgaaaatcgaaacgcccaatgactttgtcgtaaaacgacgtcgttactctcttcttcttcttgttcttcttttctttttttttttttttttttatttttttttttaagtatggattctaagatgagatttgaggtttctgcaactgaaagtgagtgattatgttcaccttcgtatgtaacaacaagcattgatggatcatcaagagctctctctacatgtttacgagctggacaacctcgtacactgctacacttgtaatatcccctgtttatcatataaaaatctaatcttaatcgctaaaatagataaacaactcaaaatttcaaactgggtaaaactatatatatatataccttgggtgtggagatcctttaatgggtttttgaccgtactttctccaagagtaatcgtctggtggaatatccgccatttttcaaacttatagctggaactctcacaactctcttcaaccttagttttctgtttcaacaaacaaaaatcaatacatatatttatttatgaaagagaagctatatatattattaaagttgagatttttaccttttcttggagcaatggcatcggccggatgaaccactggtacatttaccggaacccaaattctcagagctacactttctcttaagagaagaagtcgaaatgggtggctttccaactgaagagatctgagaaagattagtaatctgaaaaccaggcgaagaagacgaaggcttattatgattatggctatggtgatgatgatgatgatgatgtgatttagtatcggaatcgccagtaacagaagacaaaaacgacgtcgttgtagtattagaaaaattaatagttgttgttgttgtagaagtgttttcctttttagtaatgggtaaaacgacagcgttttgatctggtggtgggatctgttgaatcggagtagcgtaataaactctagaaggttcagtattattgttattatggtgaggtggcaatggagctcgtctgaatcgggcgtgaccggttcgagtccgacccagaagagaaataactcgcctgaatttggagactgccacgtcagcaacagcttgacaatccataccaatttccattgaagaagaagaagaagaatgatgatttttgatagtgttgtgaaattggggtgttttggattgggattgggatagtaataagatgagtttttcaacactttctaaaccagcagctgcttctttaacagcagctgattcttcaagtttagatgagaaattgttgttgtttttcttttcatttctatagcccatgaaatcaactgccatttttgcattaacctcaaagaaagaaagaaagaaaggtttggaaaaagaagaaaaaaaaaagtgttatgagatgaagaaagagagagaaaggagggagagagaggggttgtgttgtgttgtgttttgatataaagaaaagaaaaagaggaaagagagtttgtttgtgtttttgggtttggtttggtcaaagggtaatgaaaaatcactttggtttgggtgtcattttggcccactttcggtgacatacctgtcacgctaacacttgccgtcaagtataggtaccaatcagatccaaccacatcactaattaacattataaattaggctaattaaaatttttatccttaaactttttttgccgttaaaaatttctactgaactatcgagattattagatttaaagatttttgtttcattttattcaattttactatttcagtgattgtttatgtactaaactatgttccccaaactttgatatctacctaatcgtactgctcgtactttgacatatattaaatcatgtctcctgaactttcatctatgttagaattttttactaaagttagataaaagtccttaaatctaagaatctcaatagttcagggggcatttttaacgaccttaaaagtttgggggacatgatttggtacatgtcaaagtttggggaataaaaattaattaaactataaataattaaggtgacatttggtttaatagaacataactgttatgataatggaaatgtaaaagtatttcgtactatgctccttaaacacgtttattagttaaaataaggagtgaaatttaaaaaaataaattttaattatacaaaaatgactctttataatagagatattagagaatgaatagaaagctctctattttttttacttaacatttttatttaatttatatttaaaaaattcaaattatatgatattattaaaataattaaaatacagagcaaaattggaacaactacaataaaaataactttctatttaatttctttagctatttttaagaatagtaataggaattaattacaatatttattttggtattgaaataaatatcagagtaagtgataaatttacaaaattatctccactttattttttaaaatttatataataaagagagtattaaagttattttagttttactttatttagtctttgtaatgtaattcttattacataggtttttcagtttattggaggttcatttatatgatgccatcatcactacattgtaattttattacatcatttttaaaagtaaatcaaacattgtaatggtaattgtgttttcattatgattactattacaacaaactaaacattacctaagagtattgatattaggtattttaaagtgtccaacactagactgatttgacgcgttgtgaatggttaacaccactatcaggtagcactttataattagttagcgagtttgtataatctttattaaaataaaataactaggacctaatattaaattgtactaataaagattacacttcacaaaaatgctagacatcatagtgacgttatgtatagtgaaaatatctaaatcgttacgttttaaataattaacattgtactaataaagatttttcgaagacttttaaacaaattttcaaataagtgcaaaagtaactatgtatagtaaaaatatctaaatcgttacgttttaaataattaaatacttattttttttttttggtatagtaaaattatgtaagtagtaacaattgaagcccctaaatctcaaatcaagtgtattaaatgtaaaagatacatgataaatatatttaattgaattatttaaattgcaatgattcaattatttttacaaaatatttatagaatacttttcattgttttagatatattttattaattttttgaggcttaattttattttttttataagaatatgtgtatatattaatattatgtctttgaaatgaataaaatatattaaaatttgaaagaaaaaaaaattgtgatctataagagctaaattaaaattctatcgagtaactgagtcaaagagccgcttgacgagctaaaagagccgtttgtgattcagagaattggttttgaaatgaaaccttatacactttactatacactttcatatattttactaattttaaagaaataaatgtatagtgtagtataaatatttgaagtaaaatataaaaagtaaaattt

SEQ ID NO: 188345 - DNA, 2155 bp, Cannabis indica
aatatgttaaaaaaaataataatgaacaactcgaataagaatcgtcttccttttatgaaattacttaattctttctaggcatggtacatattttatgatcatgcgcataaaactataatgttcaccaatatcttattataaatgagctttgaccatatatatataactttaaaactctacattccataagtcctcaaaacgttggggacgaagatcttattctctacttctaaaccaaacagaaaatcatggatctacaaatatgcctcattaattagtttatttgtttttggcaatagcattaattagttattcttagacagaaattgttcctcccttaatttgggaaataaaaatttaataatttaataaaactgatagcctgaccactggtcattaccctgcagtaacaaatgtactgcaaataaagcaaaccgaaaattaacaacaaatgataaaaaaaaaaaaaacaaaaaaaaagattttaatacatttatttatttattttaactaaaataaataagtaggagcatctggtcgtcgttgcagcgagtagggcccacacaaattttttttgcttgtgttgtttcctttctctcaaaagtataaacgataaaactacccactcccatcattttgtattactaataatcccttcttctctctttctctttcccttttcttccaccctggcatcctcgtccgtactttgtccctcccttctcttctctctcctctcaattctggtttacccgttaccggttcaaccagtcacccaattaaattactcctctctatcaccccaaacccaaccccgcacacgtgtgttgtccagagaggaggagcctgcctgccttgcactgttccatccatgaccatccgcacgtgccacctctcccatactattcctcctttctgtggtgcaacacattaaaagttgaagagagagaaaccaagaaaacacaagctacacacacagagagtgtgataaagagaaattgatagacacagagagagagaaacaccatttattttttcccttctctaagtctctctacctctctccctttccttcgttgtgttttgtaattttatttatttacagtatacgagtcttctgcttaatttctattcataattattgtataattagataaaagtttgactgtgggagagagagagatcatttttttttttttttctgttactaaatctattgggacaaacccagtagagtcaatcttatcttgaatcgatgaggatccgtaaaagacaggtgccgtttcctctctcttcactctcgccgatacctatctcagatcccctcatcaacctcaatcagccaccacctgtggtggtgcaactccatcactacgatccctctcgaaacgacgccgtcaatctacatccacaagggaatccttctcgggagccttatccagctactcacttcactcctcagccgtctgatcgtcccgtgaatcatcgtctatcgccgatcggggcaggaaatataaacagaagaaccgacggctgtgatttctctgatgccgacaacagaaatgatcacaaggatacgatgaacaacaagaaaaaggaggatcgtttggtaagtgaaaccaaaaccttctgacatatacttttatttattttattttaatttttccgttttgttatttcatgtttttttttttaatttttttattaccagtagtgcacttctgttcattgtgacctaaagaggaagtttattaattttcttttttcctttcatatccattattctttaattaatttctattagtgcataatatttggatgacgtttatacttattttgtatatcttttgtattttttcaggaattatttttaaaagacggagaagataataagggtgatgatatcaggtaagaaattgaggaacaagaaagaaaagattatattaattaattctaaatggattttttttttaaaaaaattacatttatgtatacatatttgtatatgttcttcacatcttcatgaattcttgtagtaaaaaaaaaagtgaaaaggagagacccataacatgatataattaatttacccaacaaatagaaatagaaaaagaaaagaaaaaaatactgcaagtggaaatactgttttaggtgtttt

SEQ ID NO: 188346 - DNA, 1218 bp, Cannabis indica
aaatcatatccctatatttttatttttcttttacattaattttgatattttttaaaattactctaataataaatattattttaaatttattattatagtcttacctattataatttaataattatttgttttgattttatttttttaaaaaaaaaagattatggcaccaatgccaagtgtttcttctttacttaacactcaatcatctctaatagttagcttttttcaaatactctaccacatgaacaagcactctatctaaacaccatcattgtccattgagaatattctaaggtgtcaataccaatacgttgcactttgtaattaatcagtaaaattttatattatttattaaattatagctagataatagaatacactaaaaagttattttcaatacaagatttaaaatttgtactaaattttgtataaaaaataattttgtgtcaaatttaacttattatttacaatttattttagtaatttttattattgataattatttaatattttattgagaatgcaacttttttttttgttgtttaaaccataataatatagtaaatgaaaataataaaattattaaaaataaattagtcataaaattagttacattataataaataaaaaattatcattttagagcatcactaaagtagtagtttatcttaaatgtttctcttgacatttctcttaatacaacaattattgaaagttttttaagtacccaaagttttgttattttattgttcataacactttcttctttatgtcacatttttgatactctatttaaaatgagattgttaaacaagtgatataatatagttttgatatcccctctgaaaacctaagaaaaactgttttcttaaaaatgtaatagctcaacaatatttctagatttaggttaatactaccaaatttattaaaatataacaagaatcattggataattggtcaaggtgttatatagtttatctagtgtttcatcctttctttgactctacttttagtcaaactgttgcttttggttacataccgttattatagttagttgttaggatcttgttttttaccacagtttggttattatttagtagagtctgctaagttataggttcggtcaagttaactcgattactccctctttgtatatatatacaactcttattgctctaactgtaacttaaatattcatttatggaattcttctaaaat

SEQ ID NO: 188347 - DNA, 1006 bp, Cannabis indica
tatatatatatatatatgggacatcgagaatcaatttttgctcatcaatttttgttttgaagcgaatgaagaagacaaagcaagggtcatcaagtaataatgcttcagcaacgtctccatccttggaagagttcaggatcaatatgtagttttacacgtgttatgtatctgcagagtacataaagagtgattttgtttgtattaagaacttaaaggatggagcacccaaccataagtacaccacacttgaactacatattaaccatgcatcttctacgtccctcagaaacaactcacttgaaaggctgttctgtgctaggtgatgtttcttggtcgatgtaaaccagtaacactatgtgattagtttgttagttagtggtagttaaaattagttagcaagttgttgagtttcagttagttctttctattttctgtacaaactcgatcagtataaataaagtgcaaggcaaaccaattggctaagcttcttcggcatttctctctctctctctctctttttcaaatgctctgcttctcactcttttctaattttcagatatgccattgttaaagttttcatggtgtcaatcgatattgacctttgtccttgatggcatcgacagagaacacctttgatattcaactcgatcctgcaaatctcacagctaccactgctactgctcacacaattggcccctcctcttggtcgaatccatggaatcccttcgcacatcctcttttagcttccttgaaaatcaaacttgatcgcatcaacttccttgcttggaagtttcaagttgtccctgtcaagagaagttttaactgttttggttttctgttattagttacaacagtgtttgttagtttttctgttatttggttgtatcggtttcagctgttgtaacagcttctcattttgcttttctaactctgtatataaacacttgtaatccttctcttgagtaatgtacagaaacaattcattctttcctttattgtttcttca

SEQ ID NO: 188348 - DNA, 1800 bp, Cannabis indica
tggtctgaagctcccatttccttatcacaatcgtttggaatttattgattactacactatgctcccatgttatgaacaatcccaaattaggagcttcaattcatgcatatttggtagaaacatgcattcttttgataaatagtgccagtaatatttttaaagtgaaggtgttgttcagtgaaatttatgctctttcttttttattcttctgaatattttttttttgttttgttcttagtttagtaattaaaaaccatagaactgactttttaaatgttaccgaccagcacagaaacttttactcacatcttgattataattttctctggtgttttaaattatatacttcaaatacaacagacaatagtgatacagagggaatatttaaatttttatttaatttaatatgattgtcgttgaagcctgcaacctataaaatttgttactcgtaaacattaatcaaaatagctcaatggcaatgtatgctaattgatgatttcattaattattttctctcccaggagctgacaataaatcttgaacatcaaaagatttctggagaaacaactgttcaaaatgcaattactgaagttgctgcaatgatgggtgaaaatattaaacttagacgggcttttgtgatatctgcatcatcacaaggtgttgtttctacatatctccacacaagtccccaaccaggtagtttaacttttaaataaagtttgtttgtgcagtgctttaatatggttataggtcataactttcaatatcttggtccttcagtgatgtctcaagtcattaagtagttagggaaatggaacctttgtgggaatttaattttggcttgattgttttctgctttatcctattcaaagggttgggtcgaattgccggagttgtgtctcttgaagtagaagatgggaattcgcaatctgaggctctccaacgggttggatctgaattggccatgcatgtggtggcagcaaagcccttattcttaacaagggaacatgttacttctgatgcattggagaatgagcgtgaaattcttaagtctcaggtaattagtgatacctggttaatctttgaagatggctattgctgtctatgatattatgacattgttttaaaagttttttcttccttctctatgttggtgacattgtgctacttacatagttcagatgggacaccacctgatcttattattattttttttaatgaaaccaagtgtcccagacttatccccatttttcagtctctactgagctttttatatttccaatagcagccattctctttctttcttcgcttttatcctatttgactatttgactgtgcttgagatggtgtatttgaatgcctacttatatgaaaggctacaatttgctttgatctaaacattgggttgtggtggaatgttgcacaatattgctcttattttgggtactacatataaaactgatgtaggtttgtaaagcattttattggttagaagactaatttcataaagtatggaagataattaatatgagtacttgtttaattatattgttttggcagctgggtagcatcttatttattccattgcgaaaatctattagtcacgttacttcaccatttttcatgaaattcttcttaaaacgccattgcagcgctctcccttactttagtactcaaaataccataaacccattagccaaagaatcccaaatttgccaactttgtaggataggttctcttccggatgcatttcagattctgaactccattgatcccggcgaaatcacagtcaagccgatt

SEQ ID NO: 188349 - DNA, 4108 bp, Cannabis indica
cccgtcttgctcaaacttcctttacgagtgctctgcctgtccaccaatctcggactcctttagtgcctagaaatcttttcttgggtgaatcttcctctgctatctctcagcatccccgatctccacccttaagtgcatcttttgaaactcaattatgcacatccactgttagtcacaccagtagccttcttgctgcaaccaatcatgctgatctgccttcagttaattcaaatgttgctacccacactccatttatacattcacagccctcccaaggcttctcatatacccattctgcctgtgcctctgcgaaacaacttccccttaatttgtgcaaaactcatgattcacacaatgttcctgccccttcctatccaacttctcaccaggccaattctaaactcaaacagcctatcactttccctcaaacactaccaccacagtcttcaactcccatctccacttcggttgatttatcacacatttttatgcctgatttcggaacagctgtatctcatccttccgcttcccttaacacctttgctacttaccctccaaacccacccgtggttaacatggattacactaacaatcagcctctgccatctctctcttcgaacccccttacacactttgcaacagcttccactcttacatcaattccctcaatcctgaaccatgaagatgacaaagagaacactcctcctaatgtcaacaccaaaagaagtaataatgactctctctctatgcgcaaattcttaaaaagatgtcgtggtactgctggcacagccacatcctctcagtcacaggatgctggtgttcaggtttaagtttcaacaagccttgattctcggacctcatttgactcctcagcggaggttgttatgcaaccccgcctttcgccatgaaaattttaagctggaatgcacggggtttggggaacccgagtgcgtttcgacatctaagactgttagttcaacaacagtctccccaagttttgtttctcagggaaacgaaactaagtggcaactctattgatcgtgtacgtacagctctacgtttttctaatggccttgagtctccacaggttggtttaagtggaggtttaatgcttctttggactgatgaagttgaggtgactttgttacattttggaaaggtcttttttgattgttatatggcaccaattggagggccatctttccactttacagccttttatggtgaacctgccaataacatgagagaagcttcttggactctttttaagcgctttgcggatgttgctccgctcctaccttgggtagcaatcggtgactttaatgagatactctctaatgctaataaatcaaggggttgtctacgcaatgaatctcaaatggaagcttttcgcagcactcttgaccgttgctgcctatctgaaactcaggttgaggctgatgttttcacttgggccaaggatcgtattgctcctaattcccttcgtgaacgtcttgattggtgttttattaatcacatttggagcccaattttttctcagccacatgttcaacatttggatttctttggctgaccaccgtgtcatctcagctactttttctactgccacatcattacaacaacctgaaaaaagaaggagtcgctttcgctttgaaaaactgtggttgtcgggccctgaaagtgcagaaattatcaagcaacattggtcctgtcataatggtgttgaaccaatcgatatgatactacacaatttagagatatgtgcagctaatctacaatcatggcaccaaaccaaatttggtcttatgaaaaaaagaattgctgcaacacaagctactgtcaacgatctcaataactctgctgcccgtactgatgattccatggccgaacttcgaatatctgaggctatcctagatgagttgttggaacaagaggaggtgtattggcaacaacgatcccaggttgattggcttaatcttggcgataaaaacacaaaaattctttcacaccaaagcctcggctaggaactccaacaacaagatcaaattccttttaatgatgctggggttaaagttgcaatctaaatctgacttggctgcggaaatcaatgcttatttcactaacatattctcggcctctgtcgattgatgaacctgctctgctgtcaactttcgaatgccattcctaccttcagttactacagacatgaattcagatctaactcgaccctttcaacctgaagaagttgagacagctctgcattctatgggttcggagtaaaagtcctgtcatggatggcatgtctgccatgttctaccagcaaaattggtctacagttggggatttgggtcacaaaagtggttctgcaagttcttaatgaaggggctgatccttcaaggttgaacaaaacgcttattacgctcatcccaaaaataaagaagcctcaacgtatgcaagactaccgccccataaggctatgtaatgttatctcgaaacttgtcactaaggtacttgtgagtcgtttcaagtctgttcttccacatgttatatctgaatcgcagagcactttcttgcccaaccgactcattacagacaacatcctagtggcttttgagcttgttcatgccatcaagcataaaactgggggacgttctggaattgcttcatttaaattagacatgagcaaagcttttgactgtgtggagtggcatttcattgaagaagtattgcgaaaaatggggtttgcggaacaatggatcactctgataatgggttgtgtgactaccaatagcttttctttcttattaaatggggaagttactggttccttggtacctacaagaggacttcgtcaagggtgccctttgtttccatacctattccttatttgttctgaagggctatcatgcttactgagaagcgaggaacttgctggccagcttaatgggttcaagcttactcgtcaagctccttcggtatctcatttactatttgcagatgacagccttcttttctgccaagctaatgaacgatcttgtcttgctattaaacgggttttggatacttacacctgtgcttctggtcaggttctcaatcgcgataagtctgtgatgtccttttctcctaatactacattagctgctcaactgttctttcgtaggcagttgttgatgccgatttcagagtgtcatgagcgatatttgggtcttccctcttactccggtagagacaaaaaagagctatttagtgacattaaagctaaagtttggaaactcatgaacagttggagtgaaaagatcttctcagcagggggtcgggaggttctgctcaaagctgtagttcaatctattccaacctacgctatgagttgttttcgtttaccgatgtatttctgcaatcaacttgaatctatgatggccaacttctggtggggattaaatgaaaatggctctcgaatacattggtgttcctggaaacttttgtgtcagagaaagcaagatggtggtatgggattctgatcctttgagcatttcaaccaagctttgctggccaaacaagcttggaggcttcttgataaaccagattctcttcttggcaaaattcttaagagtcgttatttttctcagaactctttcttataagaggctactcttggacactccccttctcttacttggcaagggatacgattgggggaaggagtttacttgctaagggacttcgttggaagattggtgaaggacattccatcaagtgtgcatcagacccgtggattcctgggcacaactccttcctgcctatgtttttttttctggttcacacactgatacagtttcggcttttatcactgaaaacagagaatggaaccaagctatgttgcagacatttttctcccaaattgatgttgacaggattcttacaataccactaagttatttcccaagtggagatcaattagtttggcaccatcacaattcgggtctctatactgtgcaatctggatatcattttgcttgcatcattagcagatgcacgtgactgctccacctcctcttcggatgcatcctggtggaacttcttttgggctcttaagcttcctcaaaaagtt

SEQ ID NO: 188350 - DNA, 3486 bp, Cannabis indica
ctaaattaataaacattataaacattaaccgcttcggcgttggcaaccagagatgtaaatgaaagctcagcaaaaaccccaaacaaagtaaaacccagattcttcactttctactggtttcctttacggcttcacaatatacaaacctaagcttttctcagtttttcattcttcaacaactataataataaggttcattcgcttccctatttcatttttctttgtttgattcgactttttcctatttatttctctttatttggattataactgttattttgaatgtactggttacgcttgttgacgaaatttatagcatgagttacatgcatatttaattatattccgttcagattttttgcatttgattgcttggtttgacaatctgagtgccgttttataatttttttccaccaaaatttatgatcaggttgtacatttcacttgggtagctttctgttttagcgttggttgaagggtttttggagtatgagttcttatcattgtgtcaaaatggggattatttctgcaattcttttaagaattgattagaatttagaagcattttttgaatggttgacttttggggtagtcttttgacatgtctgggtcaaatccaaaccaagatgatgttgggaagagaagcctcccttcatggatgaataaggatgatacttctgtaaagaaaccagctggggttggtggaagtgaggaaagtagtgaaagggaaagatcaaagcaagtcaaagggcataatagtaagagaggttcgggtgccaatgacatggagaccaacaagaaatcttctgcctcgagttctggaactggaaaattctccaaacttttggtactctattgtgaatctggtttattagcttgccttttttttttttttgcttatttgaaattgacaaaaactaatttggtattacaattgtgtttttgacaggaaggggtagtgtttgtgctatctgggtttgtgaatcctgagcgtggcattttgcgatcgcaggctttggagatgggagctgagttccggcctgactggaactcaggctgcacactcttagtttgtgcattttctaataccccgaagtttcgacaagttcaggctgattgtgggactattgtttcaaaggtttattttattcatcttacttccaaagtccacatttgtttgttttttattttgttcatgcattgtgttatatactgtcaacggtttaaaatccattgattttgtagaaagacttttcagtatgttttggctactctaacctccagatgaaaattataggaagatctggcaacatagtcttttctttgtgctccattcataatctaaaaaaattccttaaaatattagatagatcttacttattgggagcatcattagattatttgtttctaaaatttctccatttgttcatgttaggaatggatatcagaatgtcattcgcagaagaaacttgtggacattgaaagttacctcatgcatgctgggaaaccatggcgtagaagcagtgttgcacctgaaaccagtgccggtaatataatcatttgtacataattagcttaaattgattggtgatcatggtgattttggtaatttattataatttggaattgctaaggactgattaaaagttttgacatgttgagctgaggtgagcttgtagcttatttacataagtgtttaaactttcacaagattgtatctttgttgggatatttgtgttgttgcttatcgaaagtgtgaaggcctattaaatttactgtattcttcaaggtattgcggaccttgtgttttaatcctatcgtacgctcgacgaatgactaaatcacgctgtgaatttcaactgtgcatgcagaattaaaagagtccccgcctagaagatttcagaagaaagatggaggatcacactctaaagcaactacgtcagctatttcgaaggtacatttttagaacatagtttggtattggtgcaattaacttctctctggtctgttctgagtgttttccctatccccgtacataacagaacagagattctaatcgtgccaaaacacacttatctccttccaaagtgaagaattgggcaattgatgatttggacaatacaatttcctggctggagagtcaagaagaaaaagtaagtcactgagttatctacgtaatgcagtttgtgactcagaaagtttatctttgccctcttcttttacagccagagccgagtgagataaagaaaatagctgtcgaaggggttctaacgtgtctgcaagatgccattgatgctcttgaacaaaagcaggtaccattgcaaataacccacattgcttgtgttaatgtaaagcggaggagaaaattttaaagagaggaaaaataacaagtaattgattcagtgtcatgtataattgtcgaaaaaatgaagtttcgttctgagtagttaacagttactagtatatgcatgtagaactttaatttggaccccaacagtgtacaaaatccattctcttctttattatatcctctatagttagagtgctagagtgctatcaaaaacattgatttaatttattttctaaatcattatgttattaacaggaggtagggaaaataattgaagaatggaaattcgtccctcgtgtggtgaaggagctagcgaaacttgagggaatgggagacaatgactccttgatatcaaatgaagatctttacaagcaagctatggagtgcaaaagggcatatgagaaggaatttggtagtttagaagatgatgattcgacggagaagaagaaaaagcccaagactaatgaacaaaagagaggtgaaagagggactgggtatgacagtgatgaaactatagagatgacaccagaggaaatagatcttgcatacaatgctgtatcttctaagctccataaatactaactcagttactggactctctcatctcgaggaagaaagtctgtatgtttgttcaatttcccttgtcgtttttttagtttttgaatgaatatattgtcgttttagtttttttttggtttaatgcatatattgtcgttttcttgtcctttgaagttttggtaaggataaggctaatttaagaccaataacattgtcgttaaacactttaagcaatcggaagttatatacccaattgagaaagacaatcaagtaaagtattgtcaccaaaggaggaagacccacttgtaaagaattattatttgaataatttaaattagaatgcaagttatctacattaaatgacacaatccactttattaccaaatttatgagcatttaaactatgtgaacttgcatcactataaagatagggttaagtacattaataaagaaaagctatacgctagcttgattattaaccctaacaagataattgtgaattatagtttatttttattatacatttttttttgagtacaaaatgctgacaagtactattaaattttatatattttaat

SEQ ID NO: 188351 - DNA, 2200 bp, Cannabis indica
aaaaattatttaaatttaacacagaaacataaattaaagtaactaaaataaataataaaaatgtcgggaacttaatgttgttaaagaaataaaagtttgagaattaatttatcaaaatataaagtttgaagaccaagttgccaatacatatatagtttacaaattaatttctcaaaaaataaagtttgaaaactaacttaccaaaatatgtatagtttagtacaaataagcctataatttaaggtcatttgttataatttagtatctattttttttattcaattaaaataaaataaaataaagaagatgctagaaattaatggacaatttttcttctttctttttgtttctttaaggatcgttggtcctttccaatgaaaccatggaattgtagtgcacctcacgtgaccaattatttgcatgggatctaaacttctcgatataaaataaaagaagccactttttaatccccaaaacacgtgtactctactgttcacttatgtcttcttttttatgtttgtttcatgtgagaggggaagatcacatccactctaatacactcaaataaataaatatatatctcttaaataatcaattaaaaaataatatgggaagacttattgtgtttataatgagcattgttaattagtattcgtctaatactacttaaatgtgatactttgagattcatttaccatattttataaaaataattatattaaatcatatgaaattttatatttaattacattaataatattaaaataccttggagaatgctaatattttttagtatttttattgagcattacaattgggcactagtattacctaatactttttatattttgcatcttataattagttagctatattatttaaaagttatttgttttaaaattatatgagatttaacacattttttttttaaaaaaatatgatatgagatttaatacataattatactaataacagcataacattgaagaaagtgctggcaccaataatactttttaatatttctctgttcgagcattaagacactgtatttatatattatattggaaacaaagaattaaggaagacacaacaaatattaaatttagaaaaaagacaaaaatatattattaataaatttgcatcttgccccaatgcagagctgataaggttccaaatcaagggcatggtgtgttgtttttatgtaattgttgaacttatatatattattattattatcattattatttggttgttttaatgtacttgttgaacttacattattattattattatttgcatgcacaatgttatcgaatcatctcacattctcatgtatttttttacgttttatctttactgttaaatggtgggaagaacgtttaccaataagaaatatgaatatctgaattgtttagtagaataatcataccgaggtgtgtgaggtggatgctctgtcaatattgctttaattaacaaaacttttggttacatttcattatctttttcgaacggagcaaataataaaagtgtatgtatgggatcgatgtggctgattttgggaaagtttcaaacccaaccaagtataagagaaacaggggtaagaaatgtggttcgcacgagcaatgcaaccacaaacaccacgaaaagacaacaagaaaaataaaaaaccatgaaaaaataacttctatttacattgtctaaattgagctaaatgatacccataaaaatatttatattattgcaaatgccaatgaagaaccagagattcacatttcatctcaaagaagatctaagctaactaagctaaacaatgcttttctcttcctaaacccaaagagttagagtaaagcatttcaatttagagcttaacataggccccttcctaatctaatgccatgcccaaccaatgccgaatccaagatccagttcatgcttgaaagtcagagctagtcttcttcccacgaatagctactaataagataagatgaaccactactagtcctttttccaatagagttggggggcgggggagttcaataggtactgattctgtaagagcttcttcaactcaacctctcccagggaaaggttgtaaggtaggcaggaagtagatctactaggcgttcaaatcacaagaagttggaggcagatctttgatctttatttagtatttccattccggtatgtcatacatcgagaa

SEQ ID NO: 188352 - DNA, 1870 bp, Cannabis indica
cctaaatattgaaagggatattgaaacttgaaatagttcaaattattacaatcacttaaatcggatcgtacgcatgatttaatattaaacaaagttgctaacttaagaggagaatgttgaataattaagagtaaggatcactacactagtagtagtagtagtaggagtctaggagagtgaaatataaaaggtgttaatgacaaaaatatatgcataataaattaaacgacattactaacaaatagttaagttaaattagaatatttattaagagtagatgagtaaatacctcgaccaaagcagttgacagtagtgttcatcccattggggcaaatacaagcaaaagactgatccaaacccgaaaacccacaaaacccttgactctcttcacaatctctacacccactgctgtaatatgaatcattatactccaacaataccccaaaccgccatttcatcgggtcaccttcgtctccaaactcgtatatcgacgtgtaagacgagcactgcaacttaggaagatccagttcgtaacccgaaccaaaacccatcggagaatcgtacacgcaacacgtggatgccggagaattcgtcggcaacccgattcccgccacacccttgcacgagtacatgcctctgcagacccggtaccccgacccggtatcacagagatcttggtccgggtcgaagacgggcgaggtggtggagcacccgaggaggacgaagatgttctcgtcggcgatggtaaaagggcttgctcggtccaagctgaagctgccggagttttgcattgaggtgcagttggacatgagtgggtcggtcacaattatggtgttgctcgggtaatcaatggaggaaatggtgtagcttccggcgccggtggtgagctggagcgttccgccgttgcatttgacgtaacgggcgaaatccgggtgtccacatccgaattcggttccaaatgggtacttcaccgggacggtaccgcacgtgtcgtggcacgtgcccttggtggtgggattcacgtgatctgcttggagagtgagaaagaagagtgtttggctttggaggaggagaaaagcgttgattaagaactgggttggagttggtgaggaaaacgacattgtgttaatgaagtttttaagcttttgaaagacagagagatcagcatgagatgaaaatggtggagcaaaagaaaagacactcatctaaatcaatggcttcacattaaatgaagacagtcagattcacattgaaaaagatcttctttttattcggtggaggtgattatttttcaaagttgtcctccttttttcttcctaaaaagaagagcctagttattgaggttttaaagctgtgtaaatgggtcaccttgttatgttcaggtactcctttgggttttctctctaaaaatggattgggttttcagttctttattctatcatccaaatacattattaaaattttattttgtttttatttattttacatgacacataaaaggagaaaaataaaacaaaataaataaataaataaacgacttgtatcacttatcaacgaccaaatttctgtttaattttataaaaaaataaaaataaataaactaataggtgtatcaaaatatccctgtacagaaatgtactaaagattttcacatacaaatttccaatttcaagaacttggaatgaatcttagaatatcataaataaaagtaaaaacacaattagtaaactaagcataaaagaaagtatatgtcaacacacgaattaattattaatgtaattttcttcctatatctagatctcactagtgtttctttctcaatccctttagcaagcacgtccacaattgttgtgctccttaatccctctct

SEQ ID NO: 188353 - DNA, 3421 bp, Cannabis indica
aggccaaatccgtggtgtatgcgcgaggaggagatgaactcttggtggtcttcgactgtgaaggctagatctgtggtggtggcctccatttttgacgacgaaaggcaaagcttcgtcaatggcaaaagaacaacccaacctcgacacttttggttcttaatacatatatgaatcataacacacagtatcttatcgcacattgtcatcacatacgataatctactctcactcatactgatcagacatgaagtgtaacctatcctacctcgagttgttctcacactcgactatattacatattaaaataatttaaatattacatataaataaaaaataaattaaaataatttttttatttattattttttattattatataaaaaaaatattataatagaactgcacaaaaaacagctatattccttaatttattttaaaaaataggtaaagaaattgttgaaatgctcttaaagcactaatagctcataaagtataaatataaataaacattgttaaaaagaaactccatcaagctaaaatagttcaaaattttaactcagaatagtgtttgttcaaatattgtatcttgacatatatgtaaattttgatatatttttttaaaaattcttaaagcattaattacaaatagagcagtaattaaccgattattttaatttaaatattcatttagatatcagaaaactattttacaaattcaattttaaatatctttgcaaaaataaaaaaattatatacttccatttctgggaaagaaaaattcaaacttacaaatttaaaatatacatttttttttcaaaagaccaaaaacaaatactaaatttgcagttcagaaacttatttaccaattaaactctctaacttaggacatcctttctctatcgttgaataatgaaaaaaaaaacatacactgccattatctgagatttatctaatattttcccatcaaactttgccatttaagagttgaagagtttggtcttagaataagctctgtttgtgtgtatattcctaattcagggaaggaatgagaaaccatcaatggcagatcaatttggatttcttcatatacatctttgccaaactatatgatagtctctaacccccaaatacatcaaaaccccattaaatctttacctgttaaatctttcaattctccttcggcgtagctcatctagagaaaggcgatcatccgaacccctcgaaaatggaggactaaaactcgataaatcatccccattcctactggtgccacacatctcacatatgcttaacaagccataattatcataggtgcaagcagggcatctccaagtggcctgagattcagctcttcctcgcctatttccgccccctccaacatatcccctaccagatattcttcgtctcctccatcgaaacaagtccttaacaatcctcattggccatgttacaaagctcgtgagaccttgactgaaagctccaatgaggatagagagcgggtcgggtccagaaaaactacccttcaaccgaagataagcaatcccagccagaattccacccagatgaccgaggaaggaaaccccgggaacaaacatttggataagaatcagttctgcccaagcagcatagcgagatgggactatgagtccataaacgtcggtgtagtttgaagactgtgcgttgaggactactttcatggcaaataagaccccggaaaatccaactgcatactcagagtaatatggttttccataatcgaagaacaatagaagcgacttggcaagcagaagggttattccttgggacattgcgagcaaagaagcaaccatggatgcgaattcaacactcgacattgaagtttcgagctgaacgcctttccataagagtgacaacatgttgtaaaacaaatgaggctcgccaatgtgatagaatggcgacaagaaaaatcgcttcaagtccccatactgttagaattaatcaaccatatcaagctaataattagtctacaaatttaaaaggtttcaacagttcatcaaaatcaaagaatttccagacttaaaatgattatcaatgatcaaactaataatgatgatcactcgtatcaaactaataataactctacaaattcaaaaacataaaaaatcaaagaattcccagacttaaaatgattatcaaagatcaaactaataatgatgatcacccaatcattacaaattcaaagagtttaattgtgtccaacaaaatcagagaattcccagacttaaaatgatcatcaatgatcaaactacaaaccatacaattaaattggtaaggaaagaaattctaaaacaccatgaaaaatatcagtcctacgcctaccaaataatttctctgattctttgataaattcttcctgtttactcaaatcataaattcagttaaattggactgaaactaaatcagtggggaaaaaaatgcccaattaacaagttctttaatcataattatagatatgtaattgttatattggattaagaaccttaagaactcagaaattaaaaaacacaccaattatccccaaatttctaattcttatacgaaagttaaatttgaaaacttttgtatctgaattgaatattactgaatcaaaacagcagaaataataacaacaagaatcaatcaaaactcctaaagatcataaaggaaatcggtaccttgaaaatgagacgaggattgaaccagacttcatcaatggtaggaagaatcgaatcgagaaaagcaggtctcaaatagataagacaattagcagccataagtccggcagtgacgggaggcttcctctccaaccttcgataatggaggacggtttcaagtgcgagaaatggcaacaaacccctggttctaccgcctcctcttcccgccatagcaaaacaacttttattagccctaaaattaaaaatgagagatcaatttgggaactttagagcgtttagagtgtgggtgtttgaaggtacaacaatggcggaaggaaatggtgtgaaattcttgggctttaaggaaagaacaatcaatgggtctttggagtgttctagacacttcacttgttccttctattttctctcaagttttcatttttgttttttcttttttaaatatagaataataatttaataaataatgagtgttaattaattataacctttgtgaaaatacatctcgaaatattttattttaatttttttttcataataatatttattatagttacaattttaatttaattttttttaacatatctagtaaacataaatataaaaaaaattgttgtagatatcataaattattttttttttttgaaaatttaatagggatattttgtgataaaaaatgaataataattttatttacaccccaaaaattcctaagtacaccccattttaaa

SEQ ID NO: 188354 - DNA, 2977 bp, Cannabis indica
gtacgaagagatagaaaaaaaaaactgtaaggtgaaaaatctatctaacaaggggctgagaaaataaaaaaagttcagggtaatgtaatgtagactgtatatatgatctcagaaaggcaatcttacttcttataattaattatacaactaatgattattatgatttagttttgatgtgtgaagtcattgtcttgtgcagaatgtgcttctctacctgctatacctcgtggtgactggtattgtcaatattgccagaatatgtttgaaagagagaaatttgtagaacataatgagaacgctcttgcggctgggagggtctatggaatcgatcctatagaagagataacccaaagatgcattcgtatagttaaaaacatagaagccgaactaagtggatgcgtattatgcaggtagtttttctgcaggactgattgttctctttattttttttcatatctatcttcttgtgtagttctttgaaacattcaaacattgttttcctctctaagttatttattttgtctgcagaggctatgattttagcaaatctggatttggtccacgtactattatactttgtgatcaggtattttctaaatggttcttgcatattgaatatatattttgatttacttgatgttattcttgcatatgtatgaataaatggtgcacttaatttttcttttatatttcagtgtgagaaggaatatcatgttggctgtttaaagaaacataaaatggcaaatttaaaggtaagatcgtggataactattcatgtactttaatttgttgaactaattatatgtactttaattctgttattaagtgttaattgctggtagtggttcaacaggaattgcctaaggggcagtggttttgttgcatggattgcagcaggatacattctactctgcagaagttactagttactggacctgagaagctcccagactctatttcggatgctatgaagaagaagcacatagagaaaggtttggatattacaaatggatttgatgtgagatggagacttattagtggcaaaattgcttcttctgaatccagggtattgctttcgaaggctgtttctatattccatgtaagtagtgtactcattattattaattgactcaggtttatgatcatcctaaaatacttgttatatttctggaactgggttttgttcttttcttccctctgttttgtttttttttgacacttaaacttgagaaatatagtatgtcctttcttttccaaatgataggaaatttatttttgctctgctgaactaaggcttacttgtgataattagtttgtacgggaaagagtatctcattgctttgtccaatagaagttgaaatcatggcaatatttggctgatattttatttcaatttttcaggaatgctttgatcctataattgatttccaatctggacgtgaccttattccagccatggtctatgggttagctaaagatctttctccttttctcccgactttcttgccaagttttggcacattttcatgctttctaatttttatgtgtctctcaggaggaatgttaggggtcaagaatttggagggatgtattgtgcaattctaatggtcaagtaagaacttgtctagtatctattgtctcatatgttgaacatctggccacagttttttttataagaatctcatcttttgtacttttgcagttctactgttgtgtcagcgggacttcttagagtttttggacaagaaattgctgaactccctttagttgctacgagtaatagtaaccacggcaaggtaagatttttaattgagctaaatatatgtattttattttcctgattttattattgttattggagaatatactattttagtaccttcctgcttatcttggaaccaacttagttaactagtaccttgtataatcaatatgggacggtattgatttcacagaactcaatttgcctaattttacagggctacttccagttattgttctcatgtattgaaaagctgctagcattcttgaatgtgagaagcattgtactgcccgctgccgaagaagcagaatctatatggactgataaatttggttttacaaaaattagaccagaccaggttaacttctacaacgtattgaaacaagtgattgtcatgggctcaagccacatttttacttatctgacatggtcgctttgtttgccttgtgctgcagctcatcaactatagaagggtttgctaccaaatggtgaccttcaaagggacatccatgctacaaaagagagttccagagtgtcggatttcccagacatcgtcattagattggtaaatgaacagtttccatggcaagcttactaatttttccagttcatgtttgtaaaaaagaagaagaagactgatgaattgggttgcaagcctttttgtgcatatcaacatcatttgtcagaagtttgagccagtttggcttacctgtaatttattaatccgtattaaaagctctaattccaaatgctttcaaaaccccctgcaacaggttttttgcattagaccagttcaagcttttaggaagagtagtgtgtaccaaataccaatatgggaaaatgcttattgtagacgcttcttgcgaatttatgtgcaatttatagggagatttaggagcttggttggacaagtatgtaattcatctagtttttaatttttattgtcacttttttaatctgaaaatttagtaaattacgaatataaatttgaaacgcatcctgctatttttttatttttacattttatataaatatttctcgatttgtgtgtgtcatccttgcgtagaatgtttcgaaagggaccattatatataaatatagatactagtgaatgtgttacacatgtaattaattatagaaaagtttacataaactactattttgttggtaagcagttttttacacaagattaattttatgttataataatttata

SEQ ID NO: 188355 - DNA, 1730 bp, Cannabis indica
caatgttgatggatcttcaattacaacatcgaattcaaaggatgaggcgtgtaacaatgtttcacaagaacaagtcatacaaaatcctcagggtgttcctccccaaatgccatgctttcctgggcctccttggccgtacccttggaatgctgctcagtggaacccttcggttccaatgcccgctttctgtcctccaggatatcctatgccattttaccctgcacctgcttattggggttgtagtgtaccagggacatggaacatcccttggcttccaatgccaacatctcaaaacccagccaccccgagctctggtcctaactctcctaactccccaacattgggaaaacattcaagggaggaaaacacagttaaatcaaattcctcagaagaagagcaaccaaaagaaagcaattctgagagatgcctttggattccaaaaacattgaggatcgacgatccaggtgaagctgctaggagctctatatgggcgacattggggattaagaatgataaagccgattcaatcagcgggggaggacttttcaaggctttccaaccaaagaacgacgaaaagaaccacagagcagaaaactcagtcttacaagcgaatccagctgcattgtcaagatcgctaagctttcaagagaggtcgtaatttagtaaacttgtgaagcaagaatcaattcttgtgtctggcctcggagaaaccttcctcgtaagagtaggcgtcgtttacttttagctcaagtagtgtcacttgattttttttttccctgctccgagtgctagaaaaacatatgcatcttgttcaatgtttgtacatattttctttcttatatatgtaatagtgagagttagaacaagagactgagtttttcctactataaatcccatatgcaagtaaataatgtgggaattcaaattaagcttttttgctactttggttagacttgtatcccaactttttgtttattaatgtagtcaattatatattttggtttgaaaaagataagaggcaacatcagaagagaagagaaggaaaggaagtaagatgatgttggtcattttcaaagctcatcaagtaatgatgtgagtgggggcatgtgggtctgtaaggagtacaaaacttggggctgcaacttaatgtaaaaaaagactgaacaaaaaatcacaaaaggttgtaggccctccttttcttcttcttctttgacacacaaaaagttaaatcttcattctcatttatgctttacacaactagacaactagagtcacatagagcaatgataaagtttgcctgtcttcattgtctagtacctttcttttttttccatctttatcttccaaacttttcacaagtttatattattggaaataactgtagtacggtacacaccctctatttctttcacttctcgggccatttaaatttcacgaatatctcatataccctaaccaatcgagctgtgaatatttattgtttagaatacactcaattttactcaaatagtattagatcatattaagcacagacctaactcacttatgcctaggctcaactctatgtgcatcaaaaataaagttaaaacatatatttatcacgcgtataagagaaaaaaatataataaaatatttgaatcttatttttgacattataaatcaattaaaatttacagatgacccaaaataactataacgtacataatcataaaaaaaaaaacctaaaaatt

SEQ ID NO: 188356 - DNA, 3828 bp, Cannabis indica
ttatttatatatttatattgattatacctgaacattagcttcagcaacagatccagtgtttgtagaatcactacatgctttcttgtacttgtcaatagttgctctaacgctgcataatattttatatttaatcccaaaaaaaaaaggcttaattaattaacaagcagtcaacataaaatttttcattgatagagcccagttttaataaaataatataaataggaaaaaaataatgacagttaatattattggagttatattgtatggtttagacattgaagaaatcagaataaggtaaagagagagaaaggtataaaagatagatcaaagaaattgtgtttggtattaatgaaaggattgaagaactaataatctaaccaaccaatactaactaaaccagctgtcatatctaacaatctaactgaaataacaaacactaaacagttagacactcatacaaatcaattttaatatcaacactaataattaagatggagaaaccaacaaactagaaaactaacagtgggttatatacattattagatacactaccagtctaatcatttttggaggatcaatacaatatatatgtatatatataaattatttatttttatttttaattattttacatgcaatttaaaaaagtttgggggccaccacaccctttgacccctaagtctatcactgactatactcgatccttttacaaatatattcgataagtaggattatatatctcatgaatcacgtagaattatatataaccagtaagctcttgactctatatattaattaattattttttttctattgtctttcctttggattttagtttataaactttgattaatcatgcagaaatagcatcaaatgttgtttatgttaaatggaaacttcaataacaaaagtaatttttttgtatatataaaactataattaaaaataattgtcctaaaactagcatttcaaaatatatctatatatatatatggtaagtctatagtatattggccaccactctacaggagtagtatttttttatttattacggtatatttaataaaaaatttgatcctattttttttttttttatgattttgtatgttttcaagaccacttgtacaaatattttaaccaaataatgtaccacacgtataaaaaataaaataaaatcaattgacaataaaaaatatactttattcatcttatatatgttaatttatttttacgctaacaaatgttagagtaactctataataaataaaaaattattaagtgtttttttttttatgaaattatatcaaatttagctaaatttacaaaactcttattttatcgtttgaatcagaaaacaaaaagggtcataaatttgctaacaaacaaagatttttccagcactccctttccccaaaaattatacattattagcatagtatatattaatatttaagtatctataatttaataaaaattattaatctacttttattatatgatagcagtcttctctatatatctaattaattaattactaaatataataaagggtgcacatggtttcttccataatccaatatagaacttattatgttgaacaaatttatatataaatatttaatgatagctgtaagactcattttgtcttatctagtaattagggcaacaagtagaacaatagaaatgaatgattacgatcatgactttgacttgatgagattagtaccattttgacaagaccctattatatatgctatatatatactcattgatattactaccttaatctccccgagctagtgattgtaagtgtagtctctgctaacctagctcacagaagatcccaaactatgattggttgaatatctcaaccactacacttatgccacgtgtcaaaaacccattatacgaggagtaataaccaatatacaccgccaaaatccaatacacacaacttaaaatatatattatatgtttcaaaaacgaggacctaataataataatgatgaaaaagaaaaaacaacagaagagaacagaacagatccttttacagtctgatcataacacagaaaactgattaataaaaaaaaaagagtgtgtgtttgatacatagtgcaatatttatgctaaactctttcactctcttttactctctctctctttgtttctctccatgcatcttctataatcagctaagtcagaaaaacacagataatctcattgggtcgtacccctttgtttattttgacccattttcatgtaaaactcttccttcatctgtcaccctcttatatcataacttgtctcattagattttgattttgatcattaagaattatagtccaataataattatatatatatacttatgtaattatatatgtatataaggaaactggtataagaaagaagagagtaaaggaatcttgtaatgcattatgaatgaaagtagtgaaaaatcattagtgtgatgacgtgatcaaaagattcgtgtgtgtctatgtgttttcaatatacatttatatgaatatggtaaataataagtaacataacattattattactgcttaaacaagaaagccctatatatatataaccatctaatctaattaaggtaattccaattctacagtttgcaccctctgcagtagtcataaactgttgttttcttttaatgggtaattaatgtttattagtgactgtaattagtatatgaatgttaatgaattaattactaatatttcttaaacataccgttttaattaagcttttgaaaccctaatttcgtttacctataaaaaaccctaatctgtgctatttttctgttgatgttatggaacaagtgactaggcaagtgatattatatactgagaaaatatatagaggagctatatcttaggtatatatataggcacagtgtactcatgagctagctagctatagctaatgagagagtgacacctctctatactcttttttggttcattgtatatttacatatatatatgacatgggaaagagaaaataaagaaagatctagacgaataatatatatacaaacataaaacacaaagtaataaaactaacctaagaaaatcttttagtaaagcctatatatatatctactaatctacaacttaatttgccctaaaaattacaactacaactatttattggctcagcagatctacaatatattctctgttgaacaaaggatatttatcacatatatatatacatgaaatacagaaaggaaaaactaacatatacatctagttcattaatactccacaaaagatttttccctcaaaaagttcacacaaaaataaaaaaaataataacaagagtaaaatgaatcaatctttgcttcttttttttctttgtccaagttaaaaaatattaaaaaaagaaaagaaatcaaaacaagaatcaagctttgcttgagatctgaaatagaaacaatatagttcacataagcaaattagaattaacaagtatattaattaattaattaagacctgttgttggcatactcatagaggcgtccacgggttgagaaaacgattagagcaacctcagcatcacacaaaacagataactcataagctttcttaagtaaaccattgcgtctcttacagaaagtcacttgtctgtttgttgtgttttctattctctttatctctattttccctcttcccatttttctatgtgaagagctctctcctccttcttcttcattattattattactcccaaactccatccaatataaatatattcctgtataacaaagtattataacctcaaatcaatttcatttcatacata

SEQ ID NO: 188357 - DNA, 2310 bp, Cannabis indica
cgtgtgtatatgcagaaaggcatgtaatatcgattaatactactatatagctaactaggaacacttttttttagaaaaaagaataggtgtatagctagctaggtacatttaagaaccccactcttaaatattaataacttatttttgtatgtatattttttaaaatatttaagtattattaattaaatatcgggtcctacataataaattgcagttactggaggaaccatcctcagatgatctggggtttattgggatggtggggaactctaggcaacgccttcggagttccaagcgtgccaggagtgggagccaacgccaacttgaaagacgccttatcaaacactcgaaccgacggtttcggtgagctatacaggcaaggaacagccgccttcctcaactcgatgatcgaccacaacttcgcctactctaacaagcaagtaagagagagcttcgtcaccgcccttggctccaacaaggctgccgcggcccaagcccgtcttttcaagatcgccaacgagaaaaacactaaaaatcaaaacagaacagagtcactatatactactagctaagcatgcaccacatgcagataatcagtgtgttaattgaattatatttatattaattaattgctgttttattttatgaaattagctctacctacgtacgaaagactttattaatttctttgtttattattattatattatgtattgttttaattaagtactctcttattataaattacatcttgaattaatgttcttaattaattaagttatagttttattccggccagcaattaaaaactgcattgtcatagaattaatatgatcattatcaaggattttattatatatattgttgattcttcatttcgattaattattaattaatacattgtttaattattagtacgtacgctgttaattattcaatttttatgttttttctttccttaccataatattatgagaattgctaaaaaatatctttggtatttagcacactttttagatgtgatgttgttattggtgtaaataattaagtatcaggtctcatataatttaagaaaacaatttttatggaatatgtcgctaattaatggtgcccaatagctaacgtcaatgctctaatattatcagtaagagcattattattgagtataagtatgttgtttagcaccctctatataagtgactttctataattagttagcaaaatattttttaaaaattattttcttaaattatataatatgataatgacattgaggattgaggaaagtgctagagacaatgacttttagcaattctctatcactaaaattgatcaaattaaaatattaattaattacaatccgtatatttaattgacaattgtaattaaattgcttcagggaaaaaattgaaattaatatatttgttaatatagacaatttacatgcatgttaacttaattattttaatcataatttaatttagtcattcttaatcatatattattaaccctttcaaaagaaaatcatatattatttaatatttatatgcgagatagacagaatatagtatgtgaaagaagttagggttggaagatattcgatcgaaaagaaagatcacaatgccaatagatcatgtaataagtactactttccaattaaccaaaaaaaaaaaaaaacaaactttccagattttcttgttttgataatactgttttccagaaatgactatgtaatatataattcaattaatcaaatctgtctaatatttatatatatatacaagagtggcccaaatcctaataaattatatagaaaatccatacataaaaaccagaaattggacatgtgcgcgtaattaatattttggtaggaagacaggtgtattttatagataaatatctatgtgcacatattacatgcatgctagtatgtccaaagaccagttgtctctgcaaatatttaatataaaattgaccactattttttctaataatataatctatgtgtacaatatgtatgtacgttttttctttttcattattttaaagcaacgtttattttcattcaagtttttaactgtatataatttctttaaatatatagaacattttatgatatatcgatcctcaaaggtatattgtatagggtatgtctataacttggttggcttggctgctaataattaaccaaacattcaagtatagggtatgtttataatacactttctaagatatttagagagttttttagcttaatttatttctatgttatagttatttaatattatctgtaaatttttaaaatttttt

SEQ ID NO: 188358 - DNA, 1352 bp, Cannabis indica
aaaaaaaaaggaagaaaatttactttgccatcatactctctgcgtgaaagaacctctggtgcaatataagctggagttccaactgtggactttggtcttgaatgaagcaaagatgactacatacacaaagataattttttatcataaagatataaactttggtcattttctttagttgggtcaattatttttaaaaaagaaagatttagatctgaacatatgaaagttaaaaatgaaccttagagtaaccaaaatcacatatcttcaaacgaggagcagggcttccatcaagaagggtattttccagctttagatctctatgacatatttgctgcaaacagtaaataagtactaataaataaagaaaggagttgcagagttacagttgcagaaagggtaaaaaaagtcaaaaaaggtaaaaactttgtgttgttttatttaccagagaatgacaataattgactccagaaatgagttgttgaaagaaatatctagcctgtgaaacaaagaaaactcattttgaaaactgaaatcattgtgagaaaaaagtaaaagtaaagtaaagactaaagaaaacctcgtcttcactgaatctgccagcattgcaaatacgttcaaagagttcaccaccagaggcatattccataacaatggctaaatgggttggagtcaaaacaacttctttaaaacgtatgatatttgggtgcctaagcgatctgtggttaatgatttctctagctacattctcatcaatcttctgacctctttctatgtatttcatagccacaagctctttagtctctttatgtctcagtaacctagcaaccccaaaattcccagctcccaaatccttaaccacttcatacctttccatttcaaacccccaaaagctagaacagagaagagagaaagagaaagaaagagttttgctttgaatccaatcgaatccaatccaatcgaatcgacccctctctcagtcttatatataaatatgattttatagaataaaatatttggttttttttttatgggaagttcagtggtaaagtaacccacgtggaagagagtggagtggactagttggaagaagatgaagaagaagaggacgaagcataaagctttgatttttgagtctcaaactgaaacttccaaaaacacttttgtttgtttaattcaattcaattgaatattttggtaatgtttttttttttatatattatggaattgggaatggtcttttcattacattattatctttaatttatgtattttcatttcaactttgcctttattcattatttctataaataataataaaaaaataatattaattgtatttttttgggatctcc

SEQ ID NO: 188359 - DNA, 2670 bp, Cannabis indica
taaatgtaaaaaatttcttgtaaaagtataaatataagatttgaaaaaaaaaagttagtatttacaattcagtgtaattttttttttaaaaaaaaaataagttcaattagccaatcagaagttacgaagaggaaaaaaaaataaaaaataattgtgtagcggtgagctactaatattgagttttaaaaagtcaataatttaaatgtatatgagtaatgagttcattttggtgacaagtgcccacactaacatcagaagccttaatgaaatgttaagagtatgcaaacaagtgattgtaaatgtaaaatatagcctattttgtcaaaagtctattttaaagttgagctaaattgtgatgttaattaatatctcacataataaagaggatcacaatatagtatgttgtaaaatttgtattacaataaatgctataattttatatttattataatactattttttaatattttattattaaagtttagtttttatattaaatgacttctattattattgttattttattattaaattttatatttattattgtaaaattattattattttatatttttataaattattagataaatattaaatgacatattaaattttgttttacaattatgtattgaagcatgatatcaaaagttgattaaaaaatattacaaaattattatttgaaccaaatatagataatttttatatcttccattgaaatgatgttttgattgtttataaataaataaataaaaaattcacgtaaagaaaaaagaaaaatcagctatatttactttttcccacattacatgatcagaaacctcaataaaaaagaaagctcagttataaagaaatccagataaaaaaaatatataagaactctgattatccatatatatcctcattcttgtttcatttattgcgagtaaagtttcaaaggaacaccctccttcttgctctggaagtttggcgtaataaacctacggtttgattctttaataatttcctttctgtttttttttttggtatttaatttacttgtgtataattactctcgtccgcattcttcgatttgttatgttaaaattgtatatgttctttaaggttgcatctatgatatcaactacgtcaaaatatttttgtacattctttcgatgtgcttagcactaaattgcctttctcttctttcataattaaggtaaaagaaaaatgagtatcgagggactttccaaccatctgatgagtgacatattgagtaggttagatgttaagactttggtgaaatgcaaggcggtcaagaagttatggaaatctttaattgaagatacgctatttgtttcagttcttcattttaaccggtcttctcttggctctttcgatccacaaccgtacgatgattatgttacaaccatacttgactccttctgtggattggtatggtcatcttattctgctggaaattttccacattttcttcataaccctgccattggcaaagcactttatttgcaggatcccatgaaaggccaccttggcactggaactgggagaatcgctttcaacagagcgactcatgagtgcaaattgcaatatatgtataacgattgggatcttctgactttacaaacttttgaagttggtaaagacatcgaatggcaatgtattgggagcgggagacaaagaggcatattagatgttcccgaagaagtgattatgaaaatttgtcctgagaaatttaaaggctcatttcgtcgtagccttagttttcatgttcttagtgtgcaaagatcaccaaaagtagatttggatgataaagaattaaaagtgtttggcagacgaaaatttgagataagatgcagtggggtaattcattacattgatgtattttctgaagagtacaaagaaactaaaaggaatcgtgtcactctgttagtcatatctaataacatttgggatgacattcatatttttaattatggtttccctaacggtacatcctttgatttaatgaaagcagagttttttgaatgtgatgattgtctagctatttctgaaataataggggaggatcttcacttcttgaaaatgacacaatatgatggtggggacttgaggtggagtgagcgtaaaactattgttgcattgacgtttttatgcacagaaccctatttggcggaaaaagatggagtactaccaattttatgtcagtctactcctcctctcctgtggttttcatttaatcggggaaggccattttcttacgatgtccaagcattgagcattgaaaaatttggacctccacatccaaagagggagtacttccatgaagtcaacagaataagaagaatgatatatatcccaagtcttgtaaacttgcaaggaatgagagaagatcgtcgtttgacccatgatagatggcaggaaatggtaaattggtaaggactggaactgagtatatataggactattatacttttacgtacaatttgcctttgctttcaattattatatatattgctgacttataaaataaaatttgttattgctactgtgttttgatgtcttcccctctcatcctttgcaggtatgatgctgtggacaatgaggacgatgaggacgctgagctcctcaggatgcggaggaacgatgcagacgaagacgctggctttt

SEQ ID NO: 188360 - DNA, 7281 bp, Cannabis indica
agggccagtctgctttttacaagacatttatgtgaactaatacaaatagaaatatatatgtatgtatacatacatgttaataattttgctttttgaaaatgaaactacaactaagtaggctatgaaactttttcagctaattaggtagtttgactaaggtatatgcttaataattttttttccagacgagattttatatataaaaatatgtgtgtgtctgaaactgaagctccctctgttttgattgttggttcaattttgggaaagagaatatctttagtgtttggtaacattattacccaaatctctctaactagaacccatcccacatgcaaatatctcctatgttcaattcaatagttcttatccacgattatgagatcaacttatttgtttattaatagtattggctttaaataattcacaattatgtatacacatgtcaacttagaagctcataatggcaatagcttcatatgacaattcttgacatgaacgttgaaaaacgaattgaggtaatattaccatttaatttgtgatgtgcaatctaaatatagtgtcacattagctttgagaaaataatatcaacgaacgcatatatagacaactttgttcgtgaagactacacaggtcaatttttactattggcaccatatttctattctgatatcgatcgaaagagattgaatatgcaatgaggtcccaagtggtgttgtttatttcaacattgaacttgttttcaactttcaacaaacacaagttttctcgttatggcttatatgcaaacatataaagtgcatatatttcaatgtgtatttgagaaggcacaacacacaactctaataataataaaatatatttttttttttttttggtttttcttcaaagattaaacttcaaggttgtgaaacaaactatctttgatttttttcttttttgtctggacttttcaatagacgtcacgaaaggttcaaatgccatggatcattaattgttcatttaataatggaataatgcaataaataaaagcataactgaatgaatgaatcatacactggatatagaaatcgaaacatttgacattgcttgttttaatcagaccagaatttaatgttttaacatttcaagtttggcttcagcaaattttatagctacaatagtacatcaatgttttaaatttaaaccttactctagtctagcctaataaaaagagctaaacccccaatttaaatgaagatgtttgatataacgaactccaacatttattttacatataaacttgattttggcctacggctacaggtctgactttaggatacattaaagaactctatagtttgacattagtaataataatactaaatatttatttgttaattttttttgttttttgaacaaaatgatgagttaatatcattttggattttatgttttgtaaaaattattaattagtaattagattcctaattttgttaaattacaaaataaatactatattttttaatataatataaataagattctaagcttaatttttgaccatttttattaatatagccaatttgaaaataattactaaaattatattaaatttgtgctagattcgtgagttaaaaatttgattattaacatataattatttgaattcacaaattctgattgtgtaaagtatttgcaaaaaaatatataaaaatattaagtatacttttataagagcaatcacaagacgatatatctaaaggtgttagacactatgagtgtccaatagcaatgctcacaaagagaaatgctaaaagataccaatagtgcctagtaccctcctatgtgtcaatatcgctattggtccaataagtatcgattctcatatgattttataataacttttagagagtcactaaccaaccaatcgtaaaatgacatgtctagagatattaaacaccgtaagtgtccgatagccatgctcgaaaacaaaatgtgcccaaatatgagctcaaataaaaacacaactagccaatttaataaatatgggttaacttgcttataaattgagaccatcccaaatgagttggatgatctcaattttgtacttttcttagaagattagattcaatagctaagcatctgaatcttgtggtttgcagaataaattcaagtactattctgaaccagattttgatcaaaataatttcgaacctagttgcttgtatgatctttctgaactcttaatgattttttttagaacccaacaaaatttatgtccagaaggcacagcagttacagatagagaaaggaacaaaataaatttcattgttgcttgttcatgttgtggtccttgtggaatagaaactatgcatatagatcagcgaagacgattatgcaaaaacattcatcaacttactgatgacataggaaaaaaagaaaatcattttggttacatttttcgtcgaactaaaattatgactgccgttactttttgtaaacctaaaacagcagggctctcatttcatctttgcacttaaacaagatttcaaccccatggtcaactgatgatatagcaagcaggacaaaaaaactataaaactgtaccacttgggaaacgccaagatgaactcttggcatcaaaatgggataaataagaagaataagaacactatacctacataaaataaaacgaagggtgtagtatcagtgagaagctgatggcagcttccaaaagttcttggttgcaacgagaatcttttccctcccgttggattcgggttctttctggtgtatggtagctgtccaccttacagcacgagctatgcgagccaccttgtcaatgacgtcgggagaatctctgaccaaaactgttccttctggacgcaacattcggtccatctccaccatcaaatccacgaggttacacctggagcaaagccaagataacagaggcaaggtaatttaaaatccgctgcttttccaaataagttaagaaattgaagctatctatttgagttacaggaaacgatgctcgaacttcttagtttgcagagctatggatagcaatggcatcttaagttcactcatttgggaacaatatacatttaaacatactaaatgagaacttatcactgcacaaatgatgatcaaatgacaaaactttacatgctttctgttgtacactgaaattcatggctaaaatataagtttaagaattagaaataccttttcttgcctgaacctggatgtttgatgagtgattcaataccagtcacatggataaaatcgtaactacgaggatatgttgagaaaggctcacacctgtcagtttgaagcatgcatcaaacttctagcaattaaaatttttttacgaaaatggaatttacacggataatattacattactacatgatcaaatagaaaggtcacaattcggagaagtatctgacagatgagagattacagcaatctaaaggactgttattctatattaaatggaaggcttcgatcaaatacaaataatagaatttataagcactccttaatacctggtagtatgtaaattgacaaccatttcaaatgtgcagagtgcaggtttacgatttttatggaaatgccattggacaaatgtttttaaaaaatggtgcagtagcaatgagataattgtaaaaaaccagacaacaatggtgattaggctgtagattgcatgatagggctatttatttcaagaccactagattacatagctaaatgctttcaaatataatggacgatcaaataccacagcaagattagctagtgccagtcaacagtcaaaatgattagttgctagtgctaacaaagttaagcaaaaaattgagcacattcctaaattcaggtaatatgcattctaaaattgagcacattcttgaaggtgctgtgatttgaaattacagtgttacgataaccttataatatgcattttggccttgtaatatttttacaaaaacacaaattaaacaaaataatatgggatactttagaatcttaccaatcatggtacgctccaataaggcctctatcataaatgaccgacagagtcgagggcttgcgagcaggaacaacattcattacccacacagggtcagatttaagagctgctgcaaaacctccaaaaaatgcattcatatccatgacattgcgtactgctgaacttcccagcttcaagtttaaggaattcttatagtaagagactctcctttcccaccgctttgtgtcagcctcaaacacatcaataccatttttcatgaccatggcccttgaaggagcttttttcactctatctggccactttggaatctgtccaacagcaagttctcccttgacagaagacatcctactgacacatttctttaacttatagtacctgtagaacagttataattaaataatagtttcagccaggcaaatttcatattcgtaactgcttttccacaaactctaacaataatgtttactcgacattattgtttaagcaaacattatcaaatgtagcactatataatcaaagaaaagggagaaagtaaagaaatctgtaatccacgatcaatgatagttaccatgcatcacttggatcatctgtttccttgcacaactcaagaccaaattcattctgatttggaagacatggtcctgaagcaggttttttccaaacagcggtgtttccatccacagcaatcagttcataacacaatgctctagccacagcctggaggtctgcccattccttgtcttgattagcccactctacaggggggccagagattaccaagtatcctcccggacgaagtaatcggtctacttcaatgaaatatgttgcatctgaaaaatgcagtgtaaattttaagtactataaacaagaggtgaaaaaagtatgatttgtacttgatgaatcaaagactacaggggtgacaaagaactcactataggcagtgaaaggaataagacatcgagagcaatgaaccaaatcaaacgagaaagcaggaaatggtagccggcgagtgccaagcatggcaacaaatgcaggaactcctctttcaagggcaaattgtatctgtgatttgtgtgagtctcttggagcaaatgacatagttacaattccttcattcaaaagatacccaccaaagctggcaacctacaagaaaatttaatcttattactattcaaaagcaaaagcttaattagagtctgagataaaagaaagaggaggaaagcacctaccccacaacccatatcaagagcagtcctcagattgcctccacttatagggatgtactgtccaagcttttcaatgtattgcacagcaccatcaggaaacatagtgccaccaccagggaaaatgaagtatggaccttccagcttcatccatccttgatgacctttcctctccgcaattttattgtgtggcatgttgtcgtgccatatctgttaccatttaagataaacgattaatggaccaaaacttccctgtttctgaagtctcgcattaaaacgaatgattcctaaaatcccatggctttagattgtatgtagactgtagttatattaaatttcaaagtttcactcaaaggtgttaagagtaaattctatataaggactcattgagtagtattaagtacaaattacatattcaaatgtttacacggttataattagctcgatattaaactaaacatactcatcttggatctctggaaaaactaattacgtacccacaacataaatgctatagattacaaagaaccccaatcatgaacaaacactataccttgttgaatttattggaacaataataaaataaggaaatgaaacaaacagccaaaagtaacagagtgatggttccaaatcactgaccttgtgcaagctctcaggccactggacgggaatcttgtagccaccagggggtgggatcaagcagagtggagtgtcctcaggcaaagggcaatggcgctccctatagaagttcatctcccgactgagctggctgttgcgtctggggtcctcgcaaggcatgtggtcgacagcgtcagccgggcatgcatcgataggctgtggatgttggcccagctccaccaccgtcaccagacgctgtctctgcatcggatcggcgcccgacattagcagtgattgccgaccggaagcggcgagagaatccccaagaggagtgaagaccaggaggaagaagagaatgactatgccaaagaacgctgcggatatgaggtccaaaagcctccattgcctgaagctccgcttcgaaggtggcaaattaacatgacccatttcgataaaaacctccggatctaatcaaatgagcatttgggtctccgatacacaaggttatagcctataggaggaaattgatgatggaatcctaaatccttaattgggtgagtgggtgtgtgtgtggctatagcttagctctacttggatcttgatataattattgggtgttctctgttatcgttttcagtgaaatggttgggtgattaagagtaaagagagaaagagaccaaagtaaccacagattcggtgggttcttaatcactctatttgactaatgaagctgattatatcttaagtattttactaattatatttcagtgtatttaatattgcttccattccaaaaaaaaaatataaataaaaaataaagacagagatttcggagaatatttaactttacagagctgtgactgaggcttacaagttaaactgtgaatgctcggctatttcgacatgataaacaggtgtcgaaattacgttatttccttataaaacaatcaagagagagtcatattacagagacagtccagggttgaccgtgactgcttcgatgcccaaacgtccatctaaaaaaaattacttaatttggtttaccaagatacaataaaaaacacattagttggtttccaacaccaccgtcagagatataaatcaattaaattttgagtaacaagaaaacagacaagaaaatgggcccctcttttgcctccaccgtcttttttttttttttgaaatcctccaccgtcttttttatacacggtctgagtaaaatatatatactatataataatcagaggaataagaaatttttttgatgaataaaaaaatcagaggaataacatttgtgaaggaaaaacgcgacagaataatgggtatgaaaatttgcttccttgcgagtctcttgagtctttgagaataattttggtcttgctgcactgcagcataatatgaaatggtttcatatgccctcatgtccat

SEQ ID NO: 188361 - DNA, 1536 bp, Cannabis indica
ttgaaaccttcgttttatgcaacattcggccaaccagccagcaactaccttgcaactatcgtctgatgcaactacgcagcaaccacgcaacaaccacgcagcaactatcgtctgattgtgtaagtgatatcatagtgtatgtggtatttttgtaattaaaattactaaaaatgtataaatgttgtccttaccttatagaggtatttttataaaaaaaatgtcaatttatattttttatgtaataattccaaaatattatccttttcttatcaacaaaaatattatcttatgtatgttagtccattctaattatttttatatcaacagaaaacactgcatatctacaacatgtcatcatcttttgttttgaaatttgtttttgttattattattttttataggtaataattaattttaaaatagaaaaaaaatattaattaattatccatacaaacaaggtgccaaccaattatatttttataattgtgcaattaataagaattaataatattcataagagtatttttttatataactaaataacaattattttaagtcattattaaatgaggatcatccaacaattttaagaaataaaaggttatattttttaaaaaaagaaataaagaaagaaaccgctactatatttatgtaagtatatatagaatattcagagtttcatgatggaaattcatcatgcatgcatttttattttgaaattgctttctacagtttaacaacaaggcataaccatataattatgctaacaaacaattaatgatcaatatggggaattttcttttacgaatccgtacatgatcgagtaataaataattacctaaagtaaataatatagtaactatgcattatttaaataatgcatatataattacctaaagtgaaatgcattattggggagaggtttcatattttaaacttttcaagtgaaaaaaaaatacccttttcaccctctccattatttgtaattaccgcataacaaaactaaagcatgcaacggatcgatataaagtttgaaaagaaaatccttgtcccacctatttataatataatatagtccattaattgatgcccaaacaacactatcatcataattttatttatttatttatttatttgaaaagaaacattaataaaaaaaaatacatacaccacgtgatcaaagtcaaaatctttctactatttaggatcattatccatgtgcagctcatttatgaaacagtgtggttttagcgtatatttgaaggcgccactgcaaacgatagtgccatactatatcacactgtattaaataacttatgtagtatggttagatctagcataagggagatcgctgtaactaggggtggacctacatagaagcgaagggacggattcagagccagacacttaaaaaattatcgtatacattaagaccacaattctattatgcttctttttttgtttaagatttgtttttaaactttcaattataaagtttttatttatgtatgcgtaataagaaaaaaaaaatcttac

SEQ ID NO: 188362 - DNA, 3960 bp, Cannabis indica
ttgagtttcatgtgatgatggacccccttttcttcagttgaaaaaaaataaaaaagaaaaataaattgtagtgaaagaaaaaaagaaagagagtgaaaatgaatggatgagaggtggcaccaatgagaggctatagaagcttatccactatcaaaaatctaatctctccatgatccaaactatatccaaaaagccatttcccttcacatattcacaaaagccaaaaacactcaaaaaccttttgcattgaaacattaattggatttacacaacacaacaccacaacaccacacacacaacaacaacaacaacaatggcttccacttcttgctttctccaccaccatgctctgaccacagcagcagcctcagctcgttcctcctcatcctcatcacaacgccaatgcaatatcagagccccagctcaactagtgtgtcgtgcccaaaagcaggggacctcaaacgacgatgattcctctgtcgtttctcgtcgtttggctctcactgtcctaattggtgctgctgctcttggctctaaggtttcccctgctgacgctgcttatggagaaactggtatgtataacatgtatatatttatagtaacactttgtgaaaagtgttatgtataatagattataattaatttaagaaatggggtgatatttggtttggtttggtttgttttgtagctaacatttttggaaagccaaagacaaacacagactttttgccgtacagtggagatggattcaaggttcagattccatcgaaatggaacccaagcaaagagagggaattcccaggtcaagttcttagatatgaagacaacttcgatgccactagtaatctttctgttatgatcatcccaactgagaagaaatccatcactgactacggttctcctgaacaatttctctcccaggttaattaattaattaacttatgtaacaacaacaccaacaagtatagtttctaaaattcatcaaactaaaactaaactgattctgaggtttgtttgtttatttgtttgtaggtggactttttgcttggaaaacaagcctacttcggcaaaactgactctgaggtactcaattttattttccattaatacaaaataggatcctgaaataattttttgtcaaaataaaagttaataacaatctgatcaagaattgttatgacaaaaccggatacatttttttacatttgctcgtactaaaaattatttttaagtttatattaaaaaaaaaattatcgaaaatcaaactcaaagtactgttttgtactattttaaaaaatataggatcaaatttatcattttacaaaacaaaaaatcttataaataattttttttaaaacacaatatccaaaataatattaatcctatatatttttatatataatgtatttatattaattaaattgatttataatagttaaaaggaaaacttgtataaaaccaatatcaatataacaatttatactcataattgatttgtaggatttatgttacttaatagttactaagccttaaccttaagattgagttttaataatttggataaattattaaacctataatatataaatatagcttgaaccaaattcaccacaacaagggaaagaacactccctctatactcaaattacgtggctttttcaaggaagattatataataagttggtaactaatgaggttgttcaatactatttatcaaaatataattagcaaaatttaatttaaaatatttttaaagaaatgatccaacatcaattattaaattataatatgcgagagatctgattagaaattacaaaattggggtgtgtgcaatgcagggtggtttcgactctgatgcagtggcgacagcaaacatattggagagctcggccccagtgatcggcgggaagcagtactacaatttgtcagtgttgacaagaacagctgatggagatgaaggagggaagcaccaactgatcacggccaccatcaaggatgggaagctttacatttgcaaggcacaagctggtgacaagaggtggtttaagggtgctaggaagtttgttgaggatgctgctggctcattcagtgttgcttaattttattttcacctttttttttcttttctttctttttaatgggattaatgaatatcatcatgatgagtttgtatatgtaaaaaagaaaaagtaccaattcaagattgtgatggtgatgatatgatgatgatgatgatgatcatgcatgagcaatttttagttttcttatccaagttaaaaagatcataatatgatcatatatatcgtttagtacttgatttatctttttgtactattttccttttattttttctttccaagtctttcttaggaagaaacgatattggtttaaaaatgttttgaggatggttattattttggaggtgtattaatgatcttgtgcataaatatttgttattgttgtgttgatgaaaactttctatcttcatacattcaagattaacacttccaaggataacagagtttacttgttaatgttcttagttaatgtatttcaagagagcttgtaatattattaagcttttgattatgactgtgtctttaattagttcttttaatttgctttgaatagaattttgtgtgtaatttgaaatggatttgagggaagtttcatatagaatgaaaacatgatacttactcagaaattcagaatttgtatcttagaagtatacagagaaatactaaaaaggcacactagcactactataaggtgttatatcactaatgttgtaatataatatagatcccacttatttcattttaataataattatagatatcaccgctaactatttatacaacactatctcgtctatttatatagaattaactactcaaaagtcactaaatttgatccattggattgacccaaagtcccatttcccataacaatggtgttgcttattgtttgttagctcaaaaggttaaaacaaactagattcaaaatggtgatgacaacacaaatctttttcatgctttcttgaaatttcgtagaatgcaaaatcgaatttattcgatcaggtttatgtctggtgtttgggttgataatcctgaagaagttagtgcagctttttctagagttttattaacaattattggggactaaaatgaacagtagaagatgagtgttagctctattgttttgggcctattctttctcctaccttgatggagaagcttcaagtagatttcacttttacaaaggtgaaggaagctatcttctcaattcgaatgaaagctcctagagctattggatacaacttcttctttcaagaaaattgggatttggtgggccatgatgtagtggcagttgttctctcctttcttcgaaatgggaaattactccgaattaaatatcactacaatcactctcattctgaaagttaagtatcctgatgttgtaagtgattttagacctattgcttgttgcaatgttgtttataaaactttcacaaaattgatttgcaatagacttagaagagttcttctaaaattaattgctgaaaattagagaggtcttgtgcatggtagatatattgcttataacatcctggtttgccaagatttagtgcgccattatagatggacgaattgtcctgctagttgtatgatggaacttgatttgaggaaagtttgagtgagatttcattaagtgtcctccagattttattcaattaattatgatttgtgttcaaactctaaaattctctttgataattaatagctatgcatggaatttttgaattcaagagaggtttgcgtcaagatgacccatgtcccctttattgtttgtggttggaatgaaatatatgtctcgtattttgctaaaagtgggtattctacatgagtttaaatattatgagcgatgcaagcttttgcgattgagtcatttatgttttgc

SEQ ID NO: 188363 - DNA, 7898 bp, Cannabis indica
ccaaaaataaatcagtgagggctattgctagagccatcggagatttggtttgatctaaattttgattatttttttcatcttcatcaaaattaggaaaataggtactttcggggaagaaactgcactttctaggtgccagaagcaaggcacaaagcttaggttgacacttggggctagcccagcgcccaggttgatattttgtcaacctgtgctgatttcgataatattttccaagaactcttcggagcatcttctctgtttttagaaaagattcagattcaactatttttggagaccaaacggaactttcgaagggtcaaagttgggacccaacacccaagttgatacttggcactaggctcaaagcccaaattgacatattgtcaacttaggccatttccaaccaagttatcaaaaaagtattttgggcattttttttcgtcatcaaaagtaaataaaattcaagcaaatttgagaagaaaaccacaaacctaagcccctagaaacatggccaatgctcaggttgacttggtgctaggcccagcgccaagttgataattaacatggtaggagacctcgtcctcaagtttgagaaccttgaaagtatcaaaacgacatctaggttgacaaatggcttggtgcgctaggttttgctaatccaattctaattttgtttctcccgtttgtctagtttttcacagtaactaagatccatgaaattagagaagtcaaatttacaactttacatttctcatttctaacatggaaaactcactcggaaatgaaaagtttcgagtctctcattttcgcaaaacaacatctccaagaactagtgaccatctttaacagaacacaaaaattgactaagtgatgtcaaaatatcacttaggcatcttaaagtacatcccttgtttgtttttatatttacccaccgtctagattgacgtcatatgtcaacctgggcgttgggttatgaactgtcttcagtaaaataatcataactcaatcaatattgatatgatttacgcaattcaacttgcgtttcaaagctaattcaatgctctatcaagtcatgtatcacacttaaatcacaattctgaagctattaacctcaaatttcacccaaaggagttaagaaaataagctccatgttacctgtagagggtgctgctgggctcccaaaaatgactatcaccatcatctatggtcaaaaacatctaatttttatttttctcatattttgtgggtctccttcacctataaatgaagagctcccttagctcatttttcatatttagaaaactacccacaaggttaaagcttctctctttagaaattggagcttctgacacttagtctttttctgtaataccatctcgtgagaaataaaaatttaaagtaaacgtagctctattgctgttgcgatacagagagtgaattattataaatttattgtgtctcaacgactattttattctcgccaatctagcgagcgagtgtgacttagaagcctagtctaaatttctaagtcaacggatttctaagcctagtcctgtttcttccatctcgcttgaactcttttgtaatgactaggtaatctaatttctttttataaatgcatgcttattttttaaaaaaattggagacattaccattgagttcatagcaccataccaagaggatggcaaaaatcgaaattaagagaggaaagagagggtgatttagaaaggtggatgacatcacttgtcttcgtataaaaaacgctgagttatattattattagggcaaataaaaagagaggagaaaaagacggaatctcacacatttcactaacaagcatttggcagcgagagattgggagagagaatcaaacctcacaaccctctctctctctctaactttgctttcttctccccaaaaaccaaaaccaaaaccaaaatctcttcttctccaaaccttcgatctctctccctttctctccaatggcgttctccgataaatcatcgcgtcaatctctaatccctagctacctatactcttccacctccactaaggccatggccgtcgagagaatcctccaggctcgccctaccaccaccgtttcaccatcggtttccgacgtcgaagctgttgctgttgctccaaggaaagctttcgttgttccttctccagctgagtctggtaggaagatcgagatgtactctcccgctttctacgccgcttgtaccgccggtggaatccttagctgtggacttactcacatggctgttactcctcttgaccttgtcaagtgtaatatgcaggtatgattccctcagatctgttgtcttaatttcatttgatatgttgttgatgttaaattattgctggattagatttgcggtgattagttttttggtttttgttccgtatgagatcctgaatgtgtggaattatgtagatcggtgaggtttggtttgggtgtcaatttatcgtttgatgagatctgcgatgtcgttttcttgctatactagttcaatgtattaatattttgtgcatttctgtcgatctttgtctattacgaaaatattttcatcgcaatttaatattttcagagcattatgatcgcggagtctttcttcatgtttgtgttttgtcattctcaatatttgaataatatgaactgattctaggtgttcactgttgaatttataacacaaactttggttcatttttttcagaaaagtttaaattctagctaattaaacagtaaacgtaccagaagtgctagatctatggttttgcttcctcaatctttttataacaaaaaactaaagcaaagatgatctatactgtgttagtaatcttttacgtggttcgtgtatatgaaattctatctctacatttgctcgcagtgctattttttcttttcccaattgtctaaaaatatgtgtttccaaatggctatgattcaatgcaatattttcagtcgagaattgctaggttttatatctaaattataagcgtacattacaagtagttatatacacaacaatgactactgcataattttcaatgtttcgatttactaggagctttgaatttatccctctttatgatatttcttcgctggctcaaacatttgtttctctttttttatgttaaatgatttcatcttatgtttagtaatcgttcacgtggttcttgttacaagttttacatgaaattctagctctgcttgctcagagtgttatttttcttttcaattgtccaacagtatctttgcaaatggctatgtttcaatgcaatatttggaacgtgcagaggttctatatctagattatgattatatacttatagatggtggttttgaatatacacaatacacaatgactaatttattattttcaatgtctagttttattcatagctttgaatgtatctcgctctatgttatttcttcacctgcttaaacatttgtttcctttttcttgtgtgaaatttatttcgtttgatttttttcatcttcctaagacaattattgttgtagactaattcttgtttgctttccttttgcagattgaccctaccaagtacaaaagtattacatctggtttcgggatcctcctcaaggagcaaggtgtcaggggattcttcaggggttgggtgcctactctacttggttacagtgctcagggtgcttgcaagtttggattctatgagtttttcaagaagtactactctgacattgctggaccagagtatgctgccaaatacaagactttgatctaccttgctggttctgcatctgctgaggtgatagcagatattgctctctgcccatttgaggctgtgaaggtccgggttcaaactcaacctggatttgctcgtggtttgtcagatggacttcccaagttcgtgagatctgaaggcgcactggggtatgttgggttgttttgattctttttaattttagttagaaaactcgatattgtttattgcattgcatcttcgggatgtctatctgaacaaccggtttgtgcagattgtacaagggaattgttccactctggggtcgtcaaataccatgtaagtgatatttgtgtatatttctgttttgatttttgctttaagtattctattgctcatcattgttcgttcttatctttatgttttgggattgttggctacaatagtaattttctgtgtcttgcagacactatgatgaagtttgcatccttcgaaaccatcgttgagatgatctacaagtatggtattcctagaccaaaggaccaatgcagcaaagaacttcagctcggtgtgagtttcgccggtggatacgttgctggtgttttctgtgctattgtgtctcatcccgctgacaatctcgtctctttccttaacaacgccaagggagcaactgttggtgatgtgagtgccattaatcgccaatagcttctattttttcttccttgtatcctactcttcctcattaggtttaactctttttgttgttggacaggctgtaaagaagatcggtatgttgggtctctttacccgtggacttcctctccgtattgtcatgatcggaactctcaccggagcccaatggggtatctatgacgcattcaaagtttccgtgggactgtaagtattccttcaacctcatttctttgtttgtttccatcgagttccctaattgaattctcttattttggtgtataatgatctaacaggccaacaaccggtggtgtcgctcctgctgccccagctgcaaccgagcttgcaaaggcttaaaaatatgattaaatggtgacgaaatcatataatagtggtttttattgtttcatgtaactgagataagaaaacatcgtttcaaggaattaaaaataaacataggggggaggggtttggtggtggtgggttgctgaagcctgctgatctgcttgaatggtggttctcaagggagtaatcttttgaaatgggaggttctctccaatttttcgacttttttgtttttctattttttaaattttatctctttttctttttttttcagaaggtagttttgtttctcatccttctgagaaaaaaaaaactctagttttaggtcaaaatatgaaatttggagttttcatgtcaggattattattttggccccctcttagattgtaggcaaacaagaaaataaggggaaatatgggggtgatttgttttctgttaaattaagcttggtttggcatggtatctatgcctttttctttatgtttctctctgaaattcattttgaaaatgttattaattttgactcttatttgtgttgtctcaaaactaaaattgtctcattactttacgtacaaatttattctatcttatcgtgtaatataaaagtgcattttatactatttgaaccataatgataaaaaccgttattaaaaaattacagttaggatttctattatatattattttttttgggaaatgatttttgattttaaaaaggtaactttatatatatttttttggtaaattagtttgatgcaaccacttggaggtatggggggcgagttatgggatcgtattaaaaaaaaattactattactgcaaatttattgcctgcaaaattaaaatcaaatttaaatctcagttcaactaaaaatttaaatttaatttttaacaataataatgcttaaattatatttataaatttctgtaggtaaatgacatgttatcaattatttttaattatattaattttcaaaaaaaaaaatatatatttttaattatatttaaattaacttttaaataaaaaataaaaatttaataatttgagccaatgtcaaattttatactaaaaatataatttatatattattactgtgcaacaataaaaatatttataccacaaattatttttaaacttaataattgaaaaaattgaaaatagtacctgaaaaataaaattgttataaagtaccaagtagcatgacaccacttaaaaataatgccttataattaatgaacaatattttataaaaattaatatatattaaattatttaaaatctaatatttaattaccatagcttaaacacaattatatgaaatagttttattttttacacggaacacgatagcgaaacctcaagtcttaaaaaatagcaaaaacaaaagaataaatacaaatacattacaaataaataggtaaagcaaagcgataacattttgctttttaaacccttttaaagagagtcgagtctgttcgttccttcttagcaacgagttcaagatatatagctaagacaatttatacttctcattaaaaatgaaaaaccctcacgaatcccaattaaacaaacccaaagaattatggccataaattataataataataataatgcacctcctcctctctaatatacaatatttgttttgtttatcccacccacatttattttattggagagaaaaatccgcaggttcaggcttcaaaataatggacaagaaactgtaatactgtaactgaatgactccacatctcactcaaacaatctcagatcaaataagattaattgtaaaggagacgtacggatgagtatcagcttcgcctcctaaaccagccattgctccgacctcatcttcagctttccaatatgtgctgcaccatataataacaacattgtcagctataaacactagaaagactcgattttatgttcttggtttttatcagaagcttgcgataataaaggctaaattgtattacatgaggttcacttttaacaattttagtacacaaaatagtattatactgcaaaatcgagatacactgaagatgtatttaaagacaagttaaaaacatactgtgtattatctttacgtatgacttttcttagaattaacgtgagttattgttaaagaccacttgcctgtttgtactgtcgcacaacccttcaaggatatgacgtactttcttctcgcccttcagagatggagctaaaacgaatgactggaatcataattaaagcagttagttaggcaaaacacaagagtttaatgagaaattgtggtcgaaaaaagaaaaataagaggttacttaccaagaaagatggtggcagcccatatctaagaatgctctccgaaaagatccgtacagcacagaagtgcatccaggagctgaaaacctacagggatgaaactcaacaaattatttaaaaattaaacagcacagcctacgtaggaatacttggggaaatcctataaatatctatatcatgcatcaaaaagatcattattttcacaaattttacttctaacactgccatgaaattttatagcttaaaacaatgtaagtaaaaaaaatatacatacctcgccataactggtgtagcaccactgtaaaagagagcttctcagaccttcttggtcttgcaccaatttttctagctcctgctttcgaccttcttgagcttctggactatattcaaattcacgaatctaaaccatgatgaacatacacaaatcttagtaccagcaaaatctcagaaatattaggatcgacctaccttttggaatattaaaaagtattgaaaaacatatgaagatatgttaacaaacagaggcattgagatttatgcacagagattttaagaatccataagttaactacaaggccatgctcaaattattttccggaaagaaaaaaatcgtatgtaatagtaaatcaacaaactcacttgaaagcctttttcacgtgcacttgttttgaaattgtctgcaacacgattgaatagtgttacagtgtaaagagcatattcattatcttcatacaggttctttgaggacctgggaacctggaaaaagcctataatgattaaaaagatattaagattgatgagacaacaaaacagtaagtgctca

SEQ ID NO: 188364 - DNA, 2342 bp, Cannabis indica
aaagtgtatatttatgtacgagtcattttttatgtacatgtatttcgtccagcttatggatttgttgtattaattgcaatttatatgaattctgtaatttatcaaacattcattgaatatcaatgccaattaataataataataataataataataataataataataataaacaaaaggtttatgtagttcaacaagctgtaagcaattttcttagagaaataatcattcaaaaaagaaaaaaaaggtgagcaatatgtttcagtcttcagcgaaacatacaagactccttgcagaagcaaaagagcatacctaaactcaaaagaaaaagctctatgatatgaccatctctgaagaaaatctcaatgagatgcttatagcattcacttatcttgtggaatattcagctacttacgactaagaaaagaggggaccctcttaagtcaaaacatgaacttttaagtcagagataaacagcagtacaatattacaagaatgcctcataacagaacccaattagaaaagaaaaaaagaaaaaaatactccacaaaactattcagctgtctttttcattttgatgtctccttatctgtgtaatactacatttgcttcagatcttttggttgagataatggccatatcctcattaacaatttactgggagaaaaggatccaatatgaaacctatttgacatttttagaatcatcgttcggatcatcagaatctgaatcacttgcattgtagcctaatgaacaataaagcaccaagattataatatgcaaaaccataacagtgattcaaccaaagaaacaaagacttgggtgctgagatagagaatacctgggtgtttatcacctactttccaaacagaagatcgagtttttgatgctctaccgatccaagaacgtccctgcaaagtcattgatagtagaatgaacatagttggcaattggtattaacaaaatcacaaccccagtgacaaaataacgaacacattaataaccaattatatacccagagttctagttgaagtgaccaaatcataaagatgaagaacccaaaataaacatgagctccacaatagcatatccaagattcaataaccgtattggtatgcatatttcaagtaattatattgaacaaaacaaagcaagaatatcactcaattgaaaaagagttggtacacaacatgattaatatccttgtatccaaatttagctggtgtctaatgcagcttctatttgaacccccaattatatgataatgtgaaacataaaaattcaatttcagataaagaacatcaaagtatggaactaaaatcgaaacccaaaacaataaaaagaagaataaaccttctgaggatctttagcaacaccatagccgttgaaatacatttggcccaccaagacctgcatagcggtatcaccagtcttggcttccttgagcgtgtcctgaaaccatcgcttaacacagtcggccaccaccagagacagcggctgagtctgagtctggccactacggctctgaccctcggagctctccatcctccttgacttttgctgatccgagtcaactcggaaactgtccgatttgactgttccgggcgaagaaactcggatttgagatatgggttttgcacgctttgacttttggagcttgtctgatgagattactcgtcgtgaattcttggagtctggtcgtagatggaagtgactttcccataaaaacagagcacgtcaacagggaaatgagataacgatgaaactagattatattaataataataaaataaaaaagattttaaaaagtatagtaaaaaaatatatgttaataataacaataataatttaataatgaagaaggtgggcgaggatgtgatttaggttacttttcttatctggatttcatgttggaggtttaatattgttgttttgacatgaactcaattcaatactaaaagctaaatgaatgtattttccatggaagagagtatggtacttttcttttgtcgggatatctagcccaaatgtaaacgcattcggcccaaaacgaaatgtttcacaagctctacaaagagaattggacaaatcctgaaacagatttgaaaaataccatattcatatacagatttgctaaaatgcagatacaatgatttacctcttctaacgcgaatctagaacaactaactaggcaatgtaggccattttgatcatcggtggagcatggttacttgtcattcggcttacatggtgcggcagttccacccgataatttcaatcaatggtggacacaaagtggtgtaggttcgttgcttggagcggtgcgaggtttggtttcagac

SEQ ID NO: 188365 - DNA, 2767 bp, Cannabis indica
gacaatatgtatttatagagttagggaggggacttagctacaaaaccctagttgggctgggcctgctcatcaaaggcttcagtcaactagaaaagcccacacttctgcttcacctagactttacacacagatgctaagcccattaacaattgatcaccaacaacatgggctaacacagcaaagaactatccaatcaacccaagttttaataaaaccaataaaatttaatgtaagccaaaataaaagtctaacatatatggcatggcgtcatgtgaaagacctcgtaaaaataacaaagaatatatatatatccaggttataatattgtttatttgttttgtaattggctgatgataaatattaattaataatttaactatagtatcagttttcttcctagtactgcaaacaataatatatattctctgaaacatggcagctagcgtacgttattgcttagaatcaatgccggaaccaaccaagtatattatatatatacgtcaccttaatcttaattaattagcaataccattaattctttcctttgatcaaaatttattacctcatgcccatggtatattgtttggtcactttttctgaacaaaatcaaaccatgacaattgaaaatatataataagacaaaatccccacgctcacaaattcttcaattaatatacatcccagatcagcttattatattaatttgtttaattttgtaaaaacaatactatatagtggtcttgccacttccatatatatatatataaatatattaaatttttattcatataaaaattctgttattgtgttgtcaaggtcaatattattaagaagccccccatcaacacgttgatatgattcttagtttgtccattaagctaagctatggtttttcttctttagtttcaaagagaatatttcctctttccttttcttttctttctttatttatttattttctcacggcatgcataatgttggtcgacgattcattttttggttgatgaggctccacgttgtacccattatagtgagaataagacaacaacaatataaataaatttaattaaaaaaaatgtattgtatattgcattgcatatgcatatcataaaataaaatgtatatatatatatatatgacagaaaaggttaaaaaaggggtccattatatattatgtgttttgtaatgcttgtttttgtagaggtcagcatgggatttgcatatataaatatatatagtctcacttcatatgttttgttcgatctgtcccttcgcttgttttatcttccatatagctagacttctttatttgccttatttatatatatcagcagaaaataattaaaggaataaagaaactcaaaaagaaaaaattgattaagaaggaaaaaagaaatacatgaatatatttgccattaattaccactagccatgctattaaaatgttcattattaacttccaaaatagacacctttattaagcctctaatttttcccactcttttaatgatacattattaattaatgcatgggatatttgtgtccactgccactaactttaatataattacatattaaacgttgattagtttattgtcttattcacgatattattcgtttacgtaagataaaattcatcggacaaaaactagcgatttataaaagatcattttggtatatatttcgtatattttctcatgcgtgctcttttgttttattctatttcttttggatggattccctacacatatgtataaatatacattgagagaataacaagtaaaaaataagtttattataagtgattatttcctggggcaactcacctaagccactatatatatagcaaatatatacgtaaataaataagaaaattacacacaaaacatatatatatttcaaaaaataacaagctagctatacgtagtacgtacaaagattgcgactactcacaagtcacaaccatacttttcttgactataaaacatgatttggcatgcaatagagagatcagtggtggaaaatagaaatatatttaaggggaattttgcaaattattacaagtttgagggaggaaaattagagagatcagtggtggaatttcaactaggtgaggaaagtcccataatgcccctgccctaacctactaaaggaacacgaggcccaccactttctcttctctggggttcaatggccattattcgaaactcatggtataagtaaaagatttccattcccatccaaaccaataaaataacaagtataaaattgtcatatagttaatattatatttgggacagtattatattgaattgttttggacaatctattttgtaccattattatattattttttaattcaaaattttatattaataattcacacgtctaattaaaacataattatgttaccagagaatgatagtaaattaataaaacataattatcttataaaatccacataaaatgtaggagtatatcaagaaactagacagacaaccagttaaccaagttgaagtatatgtatataaccacttgatgttagctcaagtggtcagggtgtgtgagtgttggagatcttgggttcgagtcccaaataaaacatgttgtaatatataaatacttaaattaaaaaaaaaaaaattgaagtatatgtatatataccttcttcccaagacaaagaaaaaagtaggtaaattggaaagtgaagaaattatacaattggagaaaattaagaagcaaaaagtcagaaataggagtggtgagt

SEQ ID NO: 188366 - DNA, 1007 bp, Cannabis indica
aaaaaaaaattaataaaaaaatgtgtacttttaaaaataaattttatttctgggctactaaactaggtagactttaagtacagacctaatttagtcttagctcgcctatgtatagagtcaggtatgttcatggataccctatttattagtaaaaaaaattattttggaatatgagtaatttttttatagggtaaagttgtagaataagcattaagcatagtctatctataccctatttgttgctattcttaattactaaaattaaatatctcattctataaataaattccatatgaagatatggtagtatactatactttacaactatataaattttgaacaatacctcaatatataagtaaactctaaatttttagtaaattggtttccctatctaatttttttggtatcactatatatatactcctgcaccattagtttagtacggtgaaggagtaatgatatcaaaaaattaaagttgcgggactaatttgcaaaaaagaaattttttaaggatcaacttaccaaactatgtataatttaaggacttgctatccatagtatttatttatttatttttttaaatgattgatttagtggtattaattgcagagagaatatgaggagttcaaagttagaattaatgctttggtggccaaagctatgaataaacaagaaaatggatgggttatggaagatgattgtccatggcctgggaacaatactcacgatcatcccggaatgattcaggttttatatatgctcattcatagaattgcttcatattgttatgtggaaagatcacatgaaagagttcatcacttggtgtgtaggttatgttgggtagtggtggtggtgttgatgttgaaggtaatgaactaccgcgtcttgtgtatatctcgccggagaaacgtccccgttatcaccatcataacaaagctggtgccatgaatgctctggtcagtacctaattatattttgaagcaaagcaagtatataataaattt

SEQ ID NO: 188367 - DNA, 3658 bp, Cannabis indica
gctatctgcccttgatggcaatcttcagagaaactcaaagcgcgagaaggcagcttgctcctgaacctcggcggccaagcacatacaaaccccacaaagcaaccacaactctgattggcacagcatacagaccaacagctgcaatcaagcaaaagatcacaaacaagaagctcgccctcgggtctctccagctgatcagcgcttggaaccgttcgccttgtgaagccatgtctccaacgacggtttgaatccttcccgccacactcctcaacctatcatacctcatcctaacaagatcagcacttcggctagttgggaaagaatcaaactcttcatcgagttcatcggggtaaacactctcagcatgagacaaacgaatgtccatatgaggagggtggcgtggccttgaccgatacctccacaggccaataaaggccatgtagaataacacagttgggataataagctcaggaaatgtcaccaacatgagaaacacagcaacaaagagagctgaatacaccggcttttgccaattcctcattgcctcggccccacgagccatgtctacgagtccagacacgacattcattaggcgaaagaagttggctttgcttctcctcatgctccacatgtgagaatcatgatcaagcatgtattcaaccacttcccggccaagtggtggctcggccctgctcaaccgcgacgccactacattcaaagcttggtaccttaaactctccaactgattcacactcaaaggattcacataatgcattttaggcaacaaaggcaatgtgtacaaattcaacatattagtcatattagtacaagagaatctcacagccaaatgaacttctcccattttcttaaccccattagtgtggagcatcaaaagagggtaagaatgagtgtaaactctatcagtctcaagtgttgacaatcgaatcctaactttcccaattcgtgaatcccgaacactagggttgttagacatgttcttgtcaattttggcattgtcaaaaaccccaattgtgatcacagtgcaaggatcaaaaacctcccaagtatactgctcattccacttgggtgataaactatcaaccacagttctagtcctaacccatttctgaccatacttagcaacacaataagcatcagtagagccacctttcccttctttgagcttaaccggcataagccccgtggcgcccaaaatccccatttcgagtactccaatgtgaggcttccatagattcttctcagttggtctaacatcactgcagtaaatagtagcttcatcaagaacatggtaacctccatcaagcgaaacccgaagatggattctagacccgaatctagacaccattttcgcctcagaagagctgttgaaatgcccattgtcgaggttaaaccaccttgacacaacaggcttctcattgtttcgtttttcgattgccatcaaaggaagaatggctcttccaacaacctcttctctcccggaaccaacccgatcctcaacagaaatgaaaatgtagtcttcaaaaggctcagcaacaacaaacatcatctcttcacaccaataaggattagaaaggcttcgagttggactaggctgagcaacccttgtcctcaaaacttgatttcccacttgtattttcacataaagctcaggaaacctcatcaagctcgaacctttatcaccaggaagaatgtcttgagcttcaagaatagaaacccttaaataccaaagctttggagacaagtaaacctttgacttaatcgaacaaagcccatcaaaattaacatttgcagactttgaatgccaagcttctgcaaaagcctcatcagcttgagtaccaaaccaaatggaaaccataacttcaccagctttgctcttatcacctttcttatcctccattctataccactgtggagctaactgactatcaggaggaacccttttaggaacctcgtttaaatcgaaccaaacacgacccaagaactcatctttattactctccttaacaaaaatctcagccattgatgactgaacacaatctttcgaaaaggcaaagacttgattccattcaacattgttagaagagcttattctcttagcaattcctctgtaatttccaagcttaacttcagccaccaaatcagctccaccaaacatggaaatctccctagctttcacaactctaacataaagatactgaacttgttcgaccaagtcataggttgagctagttttgtctttctgaagcgattcaccaccgagttgaggccgagtctctttcaaagaaaactcattcgacccatttgagtacaaactcatcccacccgttccagcaccggcgccggcgccggccatgacaggaggtggagaaggaccagttgttataacaacaggcttcatctcacccatattgggatccaaatgcttctgacccagttgttgagttggcttagtttcttgtacaagatttctctgctgagtcgccattaacgagttctgattctgtcccagctgcattttcttgttcttcttagaaaacccattggagacaactttattaacaacaacatcttcttcttcttcactactcgaaacgtaaagctttaagctaatttcacctctaacatgagaaaagagacttcttttatcaagtgtatgaagctgaacaacctcttcaccttctttacaaccaatactcgaaccagaaactcgaactttacccagaaaatttctactgttactcgatcttctctcgttaaagacattaacttctatagttctgtacggaagatcattaacatcattaacatgaaaaaccagcttctcattccaaatggggtttaagtctttgtatttcacttgtgttcttaacctttgattctcgaactcaacttccacaaacgaagaagatgacccttcgccgtcttttggcatgaggttgtgagctccgaccacttccactacaagcttttgtttgccgtaggtgttgttcatggcttaaagttcggttcttttttttggtttcagttttaaaaaaagagaatggagatgaaaacagagagagagagggaatgagaatgagagggaacaaaggagatgaagagactggttatgggtgatggtttgcagagtgatgagaatgaaaagacactgtggacagggcagcaatggcgggaggctcaagaagtagtagctgaaaatcactgtgtgtaatccagcacagcatgcttctgttatttctttttttcaaaaacattttggtaaatctttctctagtatattccttttggggaattttattttcacactaataaaatataatagaatataagaatatttacgacgaaatttatttaatatttataattattacacatatatttttaattaaaaaaattagggattttatattataattttgttactttaatcattaaatatcaactcaaaaatagcatgacaacaaattattgaaccacgtactaaataagctgaagaaataggtcgtcacactaattttttatttaagattatatgtgtaacaattgtaaatgttaagcgagtttcgttccaatacttaagttaactctcggttgcaaataaatacataagtttgatttttttactagtaataataca

SEQ ID NO: 188368 - DNA, 2191 bp, Cannabis indica
aagtagttacagaacgtatttttgttttttaaaaataatttttttaaaaacaaaaattttactttcattttgtgattaaaaaataaaaaaacaaaagtgttaccaaacgacacctaaatttatggaaatgctcattgtcattgctgactcacaacaggaattcaccaaaacatatgaaagactaaatgaaggatacacagcttctctaagaacttcaagagaaagaacatgcagctggaaaatgtttgacaacgtattttcacctctgaaaccaaaaaaaaaaaaagttaagccttgctgagaaatgatatgaaaatgcataataataattaaaaaataaataaattaaataaaaaataataaaaatctcctcaaacatcttctaatttaaaataaagttgacaagataaatccattttgagcagtcactttgaaaagaaaaattctcaaaaaattgactagtttcttttgtatacaaaattttcagaatgtcatataataggtattatttgtcataaaggtaacaaatgtccaattcttttggttgtaaactcaatcatttacaatctctgataggtgggttttagtgtggatgatttgttcttctttacaaactattttggttggaatctcaatcatagtttgcagcaatacattaacctcatcattaagaatatacatgcacattattatattaactcctcaatttgaacatcatgatacaaacaactaaaactttgtataaggattaccttttctcaacagcacaagtggaattcatcaacatctgattgttgtttggtggtaaaccaagaccatccaacagaacttcaagtcccccaatgcttttaaaatgattttgaccacgaggattgtcaaataacgctgagcgcaaaattcttagagccaaatgatgaagtgaaaaatctatctcctgttctctcatgcttaaccttctgacaacacgcagcagttctgaaacaaaaccagtatctataaattggaaaatcaccaccaaaaaatacattgtttaacaaactaataccctagtgagaacacaactacacgcatatgttattgtcatgcaatgagggttctaaaacagaaaatgccttctccctgtgttgtagaaaaaggaaaaatgggataaagagtatgattcaaattattttattttattttttttgaaaaagagacagaggccattgtcttagactggcccctacccgttatatattgaaaaccctcacttgtggtggaggaaaaccgtgggtacatgagttttagaatgattcaaattattgacagcatagagaatgcacactggctcaaacatgaaacaacatgtagaaatcgccttgggcggataggaattgagactttcaatggtccgctcttctctcctcgtgatcgaagctgacccgggtattccttcttaagaggacactaaacctcccgatcttgctagccgggggctccgtcgattaaatttaaataagtgagctttctctctctaagatgttctctaaaatttaaaatttgaatatcacttcccctgaccattaaaagagtccatgcattcaagatatcatttacaagcaattgccttcatagctaagaatgaactgttccagaattcaaaacagacaaaggaaaagaaataccgtctagttcaaatgtaattaataatgggataaacaagtagatggagcacaagcacgcagttttactttttttcttcttctttttacaagaaaaggttaattatttattattgttttgcaagttgatatgtcttatgcaagtttcgcttctaacataccatgttatagtgcaattatttttaaatagaaactgcctaccttacctactaaccaattaaggccaccagcttccatcacggacacaacagccttctgatgccagcttatcattgtttcagaaggaacattcaagctactagaagagtcaactgatgattcaccaacccccaaaataaagcctatactattgttgtacaactgagagttctcgtacacatttgaatttagttcaatgaaactgaatattattgacaccatatacacaagtatttgttgcaagagtgaagccttctccacggtgatgctagataaattttcatcagcacagagtgcaccacttattgattttagttggacaacagatcctg

SEQ ID NO: 188369 - DNA, 2107 bp, Cannabis indica
gatttaacatgcagttggtttaaataaaagagtttagcgcctttccaactgagtatttgggatttcaagtaggagagtaatctttttgtatacccaatttaggcgatgtaaaatatgttatttggtttcaacataaaaatgtcagtcagatcatcttaaacctttctggacttggtaaaacacaagagaaaagaggactcatcctaccagatgtcaaaatacttgttgaacacttcttccaagtccaacaatgagctctttgaagcatctatctgcattgcaaacaagaacatggacatcttgactttaggatccataatgggaaaacctatactaagcactacaaagaattctacatgattcagaaaacattaaaaaacaaaaaacaaaaaatgaggaaagtaactcttatcaaggtgtgtgtatatttatacaaggaacatttcctctaaatctcaccaagatacatcttaacttcataatgtgcttgcaaattcccacttactcaatacagaaaaacttcacaataattttttttctgtgaaaaaacttcacaataattaatataggtccatccttcgtctcaattaacagttctcctattacagaatcaagccaatatctaccaataccagagctaagtaaattctatcaaactaaaaaaaagaaaagttgagaattaatttttcgtttaaggaattaaagattacactgattaaactttggattacactaaccaactcaaacttcatacgtagtgggagcaaactacagcataaattctcaattttataatcttaaaatgaatattatagaccaggtgtaaacatttgattcttcataaaggactcacgggtataaattataataaatcaatgaacactgttttaaaatgcaacgaggctctaccatatgcctccaagctaaatgtgaaagtacccacctggattttggcctcagagcaaaacttcttgagggttttggagaagccgttgtggtcgagaaagcatgcgactgattgaaggagcagagtctttttatcgagagaggcattaggcttatcttgcttcatgtctaacgcagtgagagcaacctggcgaggccttaaagcgagaagagcggggctcagcgtattggcaccacttagggttttgggcataacagcccctctctcactatcaccttctcactgtaaagctatgaaaccactccactccgcctgcaactgtaagggttttagcttttagaaaccttaaattagggtttcattgggatttttttacactagcggccaaaactggcatttttttactttcttatttatttttggtatttttaaattttttattaactttaatagcattggtaactatttttattttttaatttttaatcacaaaataaaataaaacatgtttataactatttttatttttaatttaaaattaaaaacaaaagtgtattctataactttcattttcattgtaagttttcaactaagttgtgcccgagtggggttttgctctgtagcagttagactatttcttaaccgttctgctcccctgttcttcatcttcttcgcctgtcctgccatgatctcctataaccaccatcctcttccaccaaatgctcttcacgtcttccattccctccaactcaactgttactatgtatcttctatttattcccctgaccaaagcatcttctccttattcctccgttttttataccctcttactgattgttttttgtttatggaatctcttattggtgaaatgtcttcaaaaattattttatttgaaaaagaaagggctactcatgtcctcactgagtctgatcttcaagttgcacacactaaccctcagtttttccttgtagcccgatgtctctctaatgcttttaataccaaaaacttttatgactcgaatgggggagttttggtctaagaaatgtcgatttgaggttactgtttctgagatgcactctgaactttacttacttactcttgtctgtgcaagtgataaatttcgacttttggaaggggagccttggcattacaacaactttctcatcattctacactcaccaactgttctacacaatgtct

SEQ ID NO: 188370 - DNA, 5249 bp, Cannabis indica
acgactgactcctactccttgaccaggcttcggagccacccgactcgaaggtcgttccctcttagctgaaagatcattaatcataggctgcccagctagtacagttgctagtggagaaagaggcaaatatgatccagcatcatctccaccatgtgtgatcccggccaccttgtcccttaatcgacctgaaggctcatcaaaaggtctcccaacgagacctctcaacctggaagacatatctgtaaaaagaaagtagcgaagtcagaaagcaagtcattaatatacaggacaagaatgtaaaagatggtgctatcaactatcaaataccatcatccttagaagaggaatcgtcagactcctcaacaaccgccttgccctaacctctagttgtaggcaaggggcaagcaggtcccccaaagcactggcctccatgcctaataagagaagcatcaccaactgagcccccacgaaccaagcgtcggtggagggccctctctctcttctccgcattctaagctatacgagacagaggcacgtcatcatccaagttaggaacttatccatctctaggacaagctccctttacagctagggcttccacaactctaggagcagggaggtacaaacaatacttctagaagttggccacattggccaacctgagtatgtttctcatctccactgaaggagacaggatgtggtttgcccaatccctcatctgtaatgtggggatagagcgtttgaaaaatgacattagctagaactcataatgtccaatcctttaaatgccccaagcaacaaagtattacttggcatacccactaactttcaacatggatgggttattagtgtcacctaattactgatggccaacctagctaaagtagatgtacccaatcctattctgctttggagcaaacttcagatcaaaataatatctaatctgataaggagtgggctgaggccagcctagctccttgtacaaaactaacatcacagaaaggtactttatactttttggggagacttgtgttgggcacattttaaaataagcgacaatgtctttgaattaagagtcaagcggcaacactgcccctgctcaacatgacactccgatcaagacacccaacctaggggaaatcgatgcaccctttgatctctgggatgtatctcacaatggacacccctcacaaaatcactagtaagtaccttgctaaaagcatcaatagagagagtagaagtaggagaaacccagttgtctccttgttgtctagcatctaaaatctcaggctcaaaagattgaatcaagacatgatacacgcttaacactgaaggctcaccaaacctgttcaataggctattatcattatcataagtgcccgaagggcagttggagaggacaatgcaagttctataactccttttcttgataggtatgacctcctcaacttcagactcagtatcaagactcttagcccatttattgacctcatgcacctttgtctggtcaacctgtggatttacatcaacatgagattgagtagcctcctctacaactctgactcggcctcttgaggctaccctgacaacatggggatcacatggtggtactctacggcatgtttgtttcatcctagccataatcacaagatgactaggagacctacacagctgtcacctcccctatccaacactcttaaccacctgcatagaagaaataagaagagttgagaaacttggaaaagctacaaacatattctagtaaccagtactcaagggtaccttccaggtaaatcacagtgtgcaaggtcgaatatcgaccaagtaccgccttaagtacactcacttagaaatataaggagtcctatgttatacacttgactataatggactcactaccaagtctcatatagagtatccaaggggaagcacgcataagaatccaatggtacatgcctccaaggctgtcacaagaccctagtcaaggtcaactgatcgtaaaaaactggttgcttgctaggaaacttggccttggccggccagggttcccatgccttagaggtcggccagaccccataaccaagcctagggctaaccaggaacccaatttctaggcataggctgacaaatctattgggtatgtccccttggccggccagaccccatggtgccatccttggctgacaaggtcttaaacaagtcctccttagccgacaaggatttgtacggatccggatatgtcttttttcaagaactctaatacgttctttgtgttcttcgtgactcaaagagccaagaatcacaatgaaggtcacatttagatcttttttgttttaaaataacacattacgtattgtaaggctgtcatgaaaatcaaaataccaaaaagataataatctaacgtgggaatcaaaagacattcaaagcaaagaaaaatgttcatgcattcatagaaaaatcaactaaatcaagtgaaatattaggaatagaaagcttacccacaataagaaatcgttgatgacgaagatgggaagcttggattgtcgaaatggtgcaaaaatcctaagagaatgatccttatgtgggtcaaccctatagagagaaggaggatcttcttcaaaagttaatttctagtgagagagtgaaaagtaaaagagtgaagacggtttcccaccaaaagcacttaaatagtatatgtgggaccactccttcacttgtttcacatacacagcaaagagacatataaaagcagttagtgtactctaatagatgagatcagatagtcaaggaaaagtatgtcaaaaggctaaaaatgcagcaacttcaatttagcaaaggctacatcaattctaacaacctaactggtaagtccctatccgtatagacgtctgcacagggacttgggaggaaatgttatcccaatttttgcccacctagcgtggcattgcttacgtggacaaaattagtaccatgtggtaatacagctcaccaatgaggaggtcaagtcagtaactcagccaataaggaccccgacactcaaacgagacataaagtgatagactagcttcattagaggagcaagccggcaatccttgatcggtcttatgactagccaacctccggatagcaaaatgctagctagcttgcttcctacaagtgcctcgctggcgaggaacagacttggtaggatcctctacacagttttacacatggagtacaagttggtctgtgaatttaggccctaacaatccaataaactagctagaaaatatctatctttaagggcattttaatcttttgtatttaataaatttaaaatacaaatatataaggatttcaattgtaaattagggtttaagctctcctatataagggcattaactctaatctaaaaaacctaagactaatttaagcctccaagtcattaagtgttagagcctcattctaagcctaaatctctaagtctgatatctcttcctcactcttagtctctcacacacccatatagcatcctcaacacttgagattttccatcttgattcctactttgtatccttaaaggagttatctcagatgccacctatagtggtctgaatagtattatccttcggtatcaatataactaaaaggggagtaggtcattacccgctaactaaggggatccaacctctataaaattctgtgtgttctttaattttagattctaattgtgtaacacatggaaaatattagattcatacgaccatgctgttagttgatcacttttttaggtcaacaaaaaccaaacaaatagacatctaccatccaaatgataatatgggcatcaaatcgggaaagcctcccctaaaattgattggaaaggtccccactgaactcatcactccctaaagcttgtccttgcgtggtgactcgaagtgacagattgggaactcaagagaacattgcaagaacaagattaaaagaaaattctagaaatcaagtccattcgcagtcctaacaactccaaattaatatatagaagatagatggaaccaacgctcactaaaaattccatcctgcctagttcaaaccctaagtacatgaaaaagtatataaaactcagatgaccataccctaactatccagacaatagcagcactaccttgataaaaattgcaacacgaccctatcctggaaatgtaaattctatggacaccattttactatttacacatattagatatcttagacctagcttgaactaagcatttgtatccaagatatgaaatagaaagattcaacaaaacatcgggatacttacatggtatgtgagtgaaaaatgaaagattgttgtggaaatctacccagcagttgtgtacccagtcaatcacacgatcgaagcaggcctgcacatcaaaatccttgtcgggctgcaggtggaatagttcggggtttaatggctctgcattaagaaattggcctaaatgaaggttcaagaaatactagatcaggtaatcaaaaacttctttcattcactactggaaaaaattgcaagattaaggttttttctagaataaggggctctaatttgaagtttgaacgcaaaggtcttcaaaagtcaaaagtagtgaaaagaaaaaatgagtttgatgaatctatctatacttcggtcaaatccttaaaatttgaaatgaatggtccaaatcatctccccaaaaagcacgatttgatccgacagatgggaagttgaaaagatggcatttaaaacttgttcagggcatttatttttcatcattgcccacctcgagtactgcatacattaaagatgggtcatttcaattgacctgccatcattataactttttctaaaagacatgccccttgcatgcgcgtgttatcaacaaatgcattaaatgtgcaacatgtgtgccacgcagggcaccattggttcttgttcctttgattaatgacagctcaagatacacttctataatcccagcaatcaccatatgttgtaaacttatctttgaggtttaaaaaaagactgcacgctccctcaactcaaagagactcgaaagcttaggggtaaatattatctgtatttttgaacaggttccacgtggcgtaaaaggggtgagatagtcttataatctcattaattaaaatctctcaataagagcaagaaaatatgtaattgaaacaatacaaatactaatttatttttgttcaaatggttttaatatttagatttatgccttaaaaattaaaaa

SEQ ID NO: 188371 - DNA, 1778 bp, Cannabis indica
aaataataaaaatgtggcatattaattggtgatatctatttaataatgttttgttaaaaaccgcatcaaaaacagagtaagagtaggctgcaaatttattagagtgcttatcacatagacttaattagttatgtatttttatagatgttgtatccacttatataatttctatatattatatagtcttaattaaaagaaaaatacacgtcacgtactaattaatgtccactgtccacaaccaattcagagattcgccaattgttgatttgttgacgtattaaaaaaaattaattaaaaaaaattattacacatacttatgtgaggggtattatggtcaggtcaaacaaaacagcagaggaaagctcgtcggaacccaagtttgaatacagttgaactataaagacaaacgaggatagaactggaatttcatattttaacattaaagtatttactgtttctgttgcctcccaaatttttagcttataaaaaagcagagcaaatccatattaagcctcactcaactcaagagaggaaaggaaaagaaaaacagagtttcagtttcagaaatttctataactgaagaaaaagaatactcagctcaatctaatatcttatcctaactagagattgttggtatgtttttccactgattatattgcgtaatatctaattttcattagtttttttaatctttataattttttcttcttcccttgtggttatggttcaatgatttttgtctataaattaaaactttgagctgttgatatatttatatgtatatatattgatgaccgtttcttctttatctagcgtacctttctccagtttttctccactctgaaaaaactgattatatacaaagagtaacagagatgatatgataataaaaatttgattcttagtgattgagtcgtgcactccagtgttatggcgaaaaattttccccacttgttgacttgctaagtgaaaaataaaataaaataattgaattgatttatttctggttggaacaatgtgttgacaacttctatctggtttttatacatattcaaataaaattacacagtttctgttcttggcttcacttatttattaaataattttttatcttaattctcaaacattttatacaatccgggtattgcctttttcggtagtttttttttcatgtatttttgtatacgatatctacttttgagttttctacccagatgaggaaaaactgaaatatttgatcctaaaatatattatgtaataatatgatttttttttttaagaaatatatcaacaaaatgatagtacccaaagatgcatttaatctgataataaatttatattttcctttcttgcagtttgaatttggtgaataatagaaagcaaaagctaataatactcaacatgggttcattgggtgagattgcaccagaggaaacatccaacaagcccccagggataaagtttgtggagcacataaaaaagtccccaatttcctttaaaacccaccaagtaattgttctgattgtgacatttttggcatacgcaagctaccatgctgccaggaaaacaacaagtgttgtgaaaagttctcttgatccccaatcacaagatttgggcttgaagtttgcaccatggaggataacataccttcaatctccaccagagaccagaaagctttcctgggctcctgaagatggttgggcaccttttagtggatcagatggaacagctcttcttggtgaactggacgtggcgttcctcgcagtttatgccatggg

SEQ ID NO: 188372 - DNA, 1637 bp, Cannabis indica
aaaagtggagtgagttcaagggtgtggcgtgggatcttagcaagccgtgctcttgtgccgatgaagctgggtttctaatagggactggagaaatagatatctggtctaaaccgtcggtgccaggattctcgcctcttgaggttcgaaattccttttcctataatgttactcaggcttttacttcggtttcagatctctttctcccgggtacgcaactttggaatgaagacttaatctctcaatgcttcactcaagaagttagggaggccattatgagaatcaagcctctaagtcgaagtaaggatggcatgttctggaagggcagcaataaaggaaagttctctgtcaaaagtgcatattggagttcccaacaccatcggtttaaagaggcaaaagaagtctggaagtacctctggaaggctcggattcattctcgcctcaaaactcagtgttggcgcatcttgagtggctgcctgcccactaaaacgagacttgctttctcggatgacagggaaaagttgtgtagcctttgtggtgtggagtttgaaactgagattcatctctttcgtgattgtcatttcgctagatgcctttggttcacaagtccggggggcattcggagtagcttcctatgcaccctttcccttgaagatctatttgtttggctggccaaggataacaacgagaggatggtcctctacggagcttgcatttttgaaagaatatggcaatgtaggaatgaggttattttcagaggtgcctctctgaatgtggacacttcgattcgcataattaagtagagggtaatggagttcagtgatggagatttgggggaatgtgtgtcagaggtagtggagctgggaaccgatcgatctttgggaactaggtgggatataaggtttaaggttgatgcctctgtggtgcaaggtgcggctgggacttgtgcagttcaggttgatgttgcagaggaggaggtcgtgatcctgctgcaacacttcagagtcgaaagtgttctggaggctgagttccatgccatcttttctgctctctcctgggcaatggagaagaactatgaccatgttttgcccgaatgtcgagtgcttctgtgtgtggtgtgcttagggaggttgccctctttgtggcagccatgtgatttttgcttgttttcctttcaataaagtttcttatttaccaaaaaaaaaaaaaaaaaagtagtagtcattggtgatatattgtgtataattgagaagctaattcttcttgggtaaatttctcttgtaccgatttcaatcatcaataaaggtttcatatatagttgttcaatgccatttttatatatacattttgctttcatctcagtttaatttacaaaatatttaattaaatctttgtttgttaatggctattatattctcttgattttgttctagagtgaaattgaatcactacatgatatatataattaatgggagagttaatttgttcaaagtcgaaaagagatatatattatataatatgggataaatcatattatacgataaattatcaatcaaactacatttaaatatatcccaaccagctataaaataccatattttaacataaaatttattttttttcaattttttttagtaaat

SEQ ID NO: 188373 - DNA, 3372 bp, Cannabis indica
cggcctaaattcttctattttttgaggtttatcaactttgggtatcaaggcgaccaccgtatcatttaaacaactcaaatcagccccatgattaagaacattcaagcacaccgcaatgacctcatccttgagtttagaccagaacttttgatagaaaagcgcaggcaacccatccgcccccggtgctttagtaggattcatcccctttactgcttgcacaacctcttccacagaaaaatcaaccattaattcctcattcatagacatagaaactttcggctgcaccacttctaaaacctcctgcattacgccctgatcaatgtccgaacccataaacaaacctttgtaatagtcctccacaatttggcaaaccaacagtttatcatcttgccaaactcccatttgatcttgcaaccccttaatttcattcttcttcctgcgcgaagacgctttgtgatgaaaatacttcgtgtttctatccccccattgcaaccataaggctctacttctttgtcgccaatactgctcatccttctcaagcaacccatttaacttatcttccatgtgttgtatcgcctcccaaacacccggttgttgctgcattgtcaactcgtgcaacatctttttagtcttagctatctcgttattcaaccgagccttcttcttcttgttccaatcttgtagtgctttcccacatttattaattttgcacctaaaggacactggccgacccctcccctgcctttccttccacatattatcaataatctcagtacactcctcttcttgacaccaggcttcttcaaaatgaaagcgatttttacgtttagtcttgccacacttgtccccatccactctcaccggaatatcaattactagcgccctatgatcagattcccaccaatcaagcaactgaacatccgcaccctcaaattgtctcaaccactcctcagtacacaatcctctatcaagcctctccataatctgagatgaattatgttcattacaccaagtcaattcatgctttgaagacccaaaatcaataaaccgacaatcatcaattacctccttaaatccatccatagctcccggaggtcgatccctaccaccaatcttctccgctaagctcacaatttcattaaaatcccccacacatagccacggtccctgaacttctcttttcaaatttctcaacaattgccatgaaaatttcctcaagctagcttcaggattaccatagaagcctgtcaaataccatggcgagaacccattccctgctaccgtagccaaaatatgccctatagaactatccaaaacttgcaattttacctcttttttccacattaacaacagccccccactcaatcccactctatctactgtccataacaaatcaaacttaagaacactacaaacccgctccgcctgaacccgagtcaacttactttccatcaagaaaatgatggccggatcaaattcacgcacatgggtttgcaacgctctcaatgtccagggattcccaattccctggacattccaacttaggagtttcattgcattcggcggccttgaacatcaaggctcgccgcttcattttcagataacaaagaaggtaaatccacatcattagaaatacctacctcagcagaattgctcacatctctgtcccttacagtcgcactaacttctccagctgtgaacataaccatctcactcgtcccttgctccctggcactatcgaaaacacctcccgactgaattcctcccatcttagcctttgcccgagctttgttcttcagtgaaattcgttttctgtactctcctcctttcgttcccagacccttccctcccatcgtcttccccttttcaacgtcttctgcacttcccatctccacggccacatcaaacccattctcacaagaactctctccaacctcacctccttctcctcggcttgaaatcccaccactacgcccacatttacgtttccttccttcccttccatcctcatcctcaaaatcatgagcaccagtatccttttcccagctacgaattcccttttccttgtgacccctgctgcttccatgttgttgagtttgatcaaacaaggaagacccttctctcaattgagatttaaaatgagtaggcccattgactgtcggcccaacattaattttatcaatttttgggcttgttgtttgttttagaaaaacaccactttggtccattgctgatatattgtcaattttgcccttgagcttattaacttctaccacaccatgtacatcattcccacgatctaccccagcatccgccttttcctcaccctgcgtcgatcgagcaaacggctccttcccactacctcccacctggcgagatcccctgaccaccggtgtatcaatctccgaccgcctaatctcttctaccagcccactaccaccattaccaataaccttccctcctccttgtcgagccaccaactggtcatacgccaaaaaacaattgggaatcggatcttcctcctttaaccactgcccatatttctgaaccggagttccttgtaaattcatttccatcaccacctccttagtacagttcaattgatcatggccccaaaacccacatttaaagcagattaaaggtaatttatcaaatttaaactggacccatcttttctcaccatcaactggaatatatctgccaacaaacacctctcgctgaatcggaaaaccgatcttcacacgcacataaccattcaagaatatttgttgcggattgttccacacaatgtcttcaaccttccccgccaaattgcctagccgttgaatattattcaaagtaatagctttcaaaggcaaccctttcattcgaacccaacacaaaattgtatccaacctcgcatctctccattggccactagtcggccattcctccaataccagcattcctccattaaagagccagggctgcttctccaatgtcctctttgcttcagctctgctattaaaagataacccgaaatattgagcttctttattttcatccagacttttgactttccaatccccaattgatttccacattctagagaacatagtcctgaacaatcccacactcacattctgtttagagacaattctccctactaacgatttttcaccaaactcagcaacttgctcctcattaacctcccagtcctcttcctgattcattcccaactgatcagttaactgcacaatctcatctacagtactttcttccattgttaaaaccataaatccaaagatcaaaaagcattcaaaattaagaagagtcataaagactattagataacactcagggccctctcgaccattacttggagattactta

SEQ ID NO: 188374 - DNA, 1975 bp, Cannabis indica
aaaaacctcataaaaaataactgacaaaaacaaatagttgtaagtagctaacacctcataaaaatatgccacagagactctgtatctatccgagttgttgatgactcgatgcagagtcgactcgtacaagccattcgagtaaatctgcagtttttgtcaaacgatagaattcgaaaccctttaagtttaggttcaaagtagtatcggtttctcgagtaactcacgactaggtctaagattttctctacctttaacatgtccccgatattgcaaacaaatgttccgggaacaggcggtgctgatatccatttcccagataagtttctcaccttcaaaaactcgttaatttagttacacatatacaattgtttttgtatgtttgaacaaaataaaatatttgtacctcaagtgcacttataccatcttcttgattaagcagtgtcaataaacctgtcattttatgaaattaactgagatttttactaatattattctaatttcaaacatggtaaataaagccttgttattaccatagtcagtgtgtgctccactggattatatgaccatgaaaaaaaaaagtaacattattagatgaaattcacatagggaagattataaaaagagcacctaatgtatcttctttaattaccatccaatgtcgtttacaccattttcgaatggttttttcgggtaaccaaggattcgaactacccagaatggatctccagctctatcgccttcgaattcgtacggcgatccacccaaagccaaagcgatcccacgcattatgtttcttgaaagatctgaaaataagaagaaagaaatctgtgattgattagaacaattttggttagaaataatgtaagttggttttatgagtagatctatgcctgtgcacatgttgatatatttttccatcatttccttgtaatttgggggatttaatggcctgcataataagatcattttaattagatacaaaaaatgatatgatatgatgataatttgttgaattgggattttgattgtgtaaataatatatgtaccattgattatgtccttccaaaatttttccaacctcaccataagctccaggtttaagttctctatagcactgttataaagcagaagcaactataataagattaagatgattatgtaatcactggataattaagatatattattattatcattattgtatagaccttctatgagtttttgaaaagtttagagtaatttacacactcaaaaataaagtttgaataattttatttgctcatgtaaaattaggtcctttaaattttattttaaatattgtaaattatttaaatattttaaaaaattaactacatataaatatataaaatagttgatggttattaaataaatttaattataaatattaattttaatcaaactaatgattatatataatatagagcaagtctataggggtgtttcagtaaatttttatctctttcgatatatgaaagagttttttagttattttttttatgattacatatgttacagttatttaagaccacttttaaaatttttaaaaatttccagtagtttacaatactaaaattaagatttataataccgaaaatttcgattccacgcattatgtttcttgaaagatctgaaaattataatttaagtattattactgtcaaaaattaaatttaagcatttatttataattaaagttaaattcgctatttacgttgcaaattactcttaatttaattttggacaccgtaaactattcaaaatattttgagaatctacaagtaatcttaaataactacaacatatatgattatacaaaaatataattaatttttttttttctaaatactagataaagaatcatcaaaacaaccaattaagtatctactacataaatttcttataatatatattttatatgacatacatcaatagcttcatgcatgtctggtacacc

SEQ ID NO: 188375 - DNA, 2032 bp, Cannabis indica
tttgacctcatttctaaaagtattgataaagcaaagaagtaagtggatacgtgaattcacacaatactatgtttatttttcagtgactctttgttaatttaacatttgctgcatgatgacagcttgtttgaagagggaggtgattgggagaggaagaatcgattgaaggtgtatgaaggcctgttttatatgtccactcggaattttaagaaggcagctactctgttcttggattccatttcaacattcactacatatgaaattttcccatacgacactttcatattttacaccgtccttacaagtatcatatcattggatagagtttctctaaaacaaaaggtattcacaatcgttttgacctttatttatttttattaagtaattggcacatgctagctactgttactaactctatttgaaaatatgataggtagtagatgcaccagagatactgacagtgattgggaagatcccatatctttctgatttcttgaactctctatacgattgtcaatacaaatcgtttttcacagcattcggtaagtgtgtatgaatctacattacttattttttagtaatctgaaaaaaggctagaaatattgattttgtcagtaaacttcatctattttgtagtcttactcagctgagcttttgtttgtgatttttatcccattttattggtctatggatgatgttgcgacataagttatatactaaattattccttgttacttcagccggtctgacagaacaaattaaattggaccgctaccttcatccccacttccggtattacatgcgggaagtcagaaccgtcgtttattctcagtttttggaatcgtacaagagtgtcaccattgaagcaatggcaaaggcttttggtgttacagtagaattcattgatgtgtaagttttctttacattactttttgtttataaggctgttgtagtgcaaatgttttcgggttgaaccatgaattaatatataaactttcgacggttacagggagctgtctcgattcatcgcagcaggaaagctacactgcaagatcgacaaagttgccggtgttcttgaaactaaccggcctgatgcaaagaacgctttgtaccaagcaaccatcaagcagggagacttcttgttgaaccggatccagaaactatcacgagtgatagatttgtaggtagagagagtcatcatcacatgagttcttattcaatgataatggaatgttggagtgtcatttccttttcatgcttctcatcaattaaaaatatccgtttatattgttttacaaggatattgttttctcagaatttttttggggtagtgagggtggggtttggttggaaaaggcccaaaatgttcaccatttatggccaccttctttaaatgccaaatttctttccaagtttgtcctacttctcactaccctctcttacatctatctaaagatttgatgcgtatctagtagatcatttccatttcaggctttatttatttgcttttctttttcttttcatgataaaagaaagaacaatccaagcttagttaaggacaatgctatagtattggtgaccccactttcaacaagaatggaaactttgctttgtttactttcaatttgtatgtttgggcaatttcggcttacttgcatgagacatcctatctaggaaattagatggtatacctcttttaagttgtgtttaatatttacctcctctttttatagttttcatttttaccttttttttcaacaactctaccaattatgctcctatcatctaacgatactctaactcttcattcaactctaacttgtgtagctgtgagggtataatcagtaatagagttataaaagtgaacacatttcaattgaatttaaaataaaattatttttggttaactaataaaaaaaataggtatatttcaacttactcccactctattcctatagctttggcccttactatgagaattgagttttcttgtagtgaaggcgtattataaaaagaggaacctaagcacatt

SEQ ID NO: 188376 - DNA, 4421 bp, Cannabis indica
gcatagaccccgtaatccttcacgctgtcaaatctccaagtaggaattatatcactagcctaatcaacctaaaatgtatagatacaatagtaacaatggaataccaaaaacaacacttatgtgcatgctttaaattacaaataataaaatgctttgtactgaaaattccttgacacaatttctgtattactagttttacgtaaagctttgtctatcggatccagtgcatcaaaaagtgttacattctaatttatgtattcgtcgtgcaaagcatcaaaaagttaatgattaaaacaaaaatttgttgcattagtttttcttttcttttttcttttgctggggcatttgttgcattaattgatgatagttaagagttgacaacatagtgaagtaataagggaagacttggagcagattatcaatttaatgaaagcacaagcctgcccaatcaacaatagattttactcacaagtagacgtcatttggatcaaattcgtagaagaggtttatataaaatcggaagccatcagggctcacatctctgcacaggatacctgaaaatgaatccaatattaactcattttcccatcacaactacgtagaatgacaaatcgaacagcacaaaagcatacctctactttcagcagtaagaagatgctccttagccatggctggtgcaatacctaaggtcattgcagcatcactggcacttatcccaattcgtagagcatcaggttttgtcacaagggtcttgattctagcaaaaacctacatgtgacaaacaagctagctataacgatgctactgtaaatgattatttcagacaagagaattatatagtttacattgcaaaagtcaaaatgaaaacatataagatgtcaaagatgtatgtcttgcgcagattatgtttgcttgaccacctcatatttctttcaatgatgaaaatatcaaaacaactgaattcataaaaagaatgaattcaatttaaggcccactgacttcaatttaaaacacagcaactagttgttaattataaagccaaaggagaagaaatacttaaagaaacccaaaaaaaaaaaagagagagagaacacaggatagaactttcttgaaaataattggagtctttagaattaaaaataagagcaatcacctcctcatcactatgggacttattctggatgaccctgactccactatcaaacttgcgaagcattactggtctacaataggaaacaagatgatatcaggattaaactatattgtcttgatacatatggccgtgattttacataaatacattcaatattccacttacacgtcaaacttctcccatagagaacatgcttgcagcaaatcctctggtgagatcaattctgttttaaatgggaaaaaaagaagagaaaaacagtttcacctttgaacatatgcttatgagccatcaatattcttaaagtaaatatcaagactcctaacttttacaaagaagtaagaagatatatagataggtacaaaacctgttcctctggcacgattgaaaagacagtagatatcgataagattaatcattcctccacttttctcaagaggaattttgacaaaatctgccaactgaatgacacaaagaaaaagaaaaaaatcctttctaagagatatgtgaatgaataatcagtagaaattaacatcagactttccaagatcacaacattacaacaacatgaagtgtttacctaatatttttctatttaccaatagtaccatattagaaactatttatatcacaggtatgtgtaaatttttcagtgacacctgtcagtaggagagattgaaagctctaaaaaccattaaagctaatgttgaattgttttcacattgaactatctatatgtacaacaaattatgaatttagataattttgagatatgcatcttatattggcttgcttatctttagggctatttggtaaaagaaacattcccaaaaatgatgatttataagctcaataattcatatataatgagatataaaaatacaagtaaccaaaatctgttatgtggtaagtcatcaatatacaaatctgtaggacattataataataaaaaaaaatacatatcagtatgagcaatataaacataaacatatcacagttttcattcttctaaataaagagaaggtgctatgaacttcttagttccataaatattacattatggtttttccttggggatgcagttctacttgcttagaaagtatgagttttcgaacaaggacaaaagcacagtatggtatgatgattgttacttgtataagttatggagctgtgttatgatgattgttttgtttgggatgaatgtatgatattaatggaaaatttatacaaatagaaggaacttagtttcgggaatacgttaaatttcacttgaaatttggctttctcctgaagaattcaaggatgctccagttttctttgtagatttgtctaggaacaaaattcagggatcccttatgtactttttatcacctagacatcctagtcacactctactcttaaataatattttctgtttctattaacaatgaggataaacaaaagctaccaccataaattgtgaaaaatttcaggaaagaagaacaaaagaagagtaagagcaacctgacgagctaattgttggtggtacaaagcaccggcagactctttagtaacaggagaaataataccaatactcaacatccaatcttgcatctcttgtttggagcccatttcctcatcattcgatgcaccagtttgagagtttgagccagataagagtttctgtctcatcttctctgctagcatcaccatctctttggccttactctgttatagaacatgatcataaaatattagctactgatgaacttaagaaactttcacattgaacaattatcttatacgtggtgctattgcaatatatgaaacagggtaattgcaacccagtctcctcctaatataacacaaaagtgtacattataacctaatttatccagacgtttgctttttctctcttccaagttttgggacaaaaacctatgaatacaatcaattgtcattttccaccattctcaacaagtcatatcaaacttctctatcagtctatgaagattcaataccatgtaaacgaaacagacctcaggaactgtcaaattatggttattttggcaagttttcacaaaatcaaatcaaaagagaacaataataattaccataagggcattcaaatcctgaaaagcatcctgcaagctcttatcagtactctcccacatctcctgctctttcctcagtattcccgacacacccaccattctcaccgtcccttcactagaatacaacccgctagaactcggaccaggctgagaattggagactggaccagaaccagagctcgaaacggcactctgactctcccacgccctacctctccagctctcccagaacttagccagaaacgcgtcgatatctcccttcccacgcactactaaggtaaccaccaccgatctcgaacccgcaccagaacttgaacccaaaccgatgacccggccatcggatgagaccgagacctggaagcggactctcggtgaggaccacatggcgcggagtgatttcttgggagagaatatgtgcgtgatggcggcaagagggatggctgagggcgaagcggcagcggcaatggattccgggagccatagaagacggtgagttgtgagagagaggagacctgacttgaggattgggaaattggggagttcttcgcattcaaggtcgactgaggagagaaggtaggactcgatttcgtccggaaggagaacaggtcgaccgctttccgttacctgggccggcgggaggcagttgccggccattgaatcaatgttagggtaatcaaaatcaaaaaatgtgggtgaattaattcaggtacgtgatcgtcttcgtgttcatattgtggttaggcaaattttactgagcccagaccagaccagaccagcttcagccttgaagtgaaacatcattgtttttcacagacatattaaggtgtaattgactctattgtcaccggaaaataacagattgtttttctttttttttcaatagtgatggaaatattattatgatattattgataaaagtaaaagtatctttgtatttattttgtatttggcaaagtggtaaacctcctccaatcaagataattgattgtctaatcatacatcatattttactgttggctgcaaaattcttattgcaagtaagattaaataaaaatgaatttgaaaatttagacaataaaattataacgtcttcaaaaaatatcacgtgacattaaaaaagttttcaaggtcacttttggaattacatgagataagtttttttttatttttctttgctt

SEQ ID NO: 188377 - DNA, 5823 bp, Cannabis indica
aaagtaaaaatgtaattttttttctcaaaaaatggtaatttatgtaattatccttattccttttttacttttatatttaacaatcaatatatattttatataggttgatgtaggagatgcccttaactttgctctgtggcagttagtctgttattttctttttaactgttcttttttgtatttcctccatccatgtttgattataattgttcccccctacatcatttttaaatttcctctctgatttcttggttccaattatggaaaatttcatccctaatatgtctgatgctctgtcaattcgagaaagggaagtcattaatctctcgaatctaaatatccctccaccacggcctgctgtcaatcgtttaatatgcaggatcttctccaaaaaaggatacaaccccaagacattcaaaaacttcataactaaacaatgggtgggtcggtttgctgtgtccatttccgattatgatgttgcatcagattcctacacaatttcatttggttgtgaaggtgatctcaaaagaattctagctaaagaaccttggcacttccataaccaacatatgatcttatgcctcccaactgctctgcaaaatgcttctatggaaacttacactatcattccattttggattcaagtctttcggttgcctttccttagtaaatatgaagcccttgcaaaagttctaggtaacatgatcggtactttccttgaagtccatgaagactctcttaatgaaggttgggggccatttcttcgaatgcgtgttgaaattgatgtctctaaacccctgctgcgtggtcaattcgttacctttccttggatggctgatgaactttggatagactaccgctatgaaagattaccagatttttgctatgaatgtggaatcattggacatgtctttgacaaatgcccactgtttttagagaagttagatgacggtattgaaccaagtttaccttatggcccttggatggaaggatctcctcttccaaggtctagttatgatcgttacatgcaagacttttctaaagagggtccttggccatttctcactcgacttgctcgaaacacaatcaatccgattctttcgcactcaaggccactccctgctgtccctgcaaatattactaactctgagaaaggaaagcaaatcttggattcctctcaaattattgagtccaacaacaagaactttcactcattgcaaatcaactgcctctcttctcagtatcccaaagatcccactttcagagaccaagcagctacatcaggttcgaaggaaattaaaatggataagttcatagacacaagctgcaatatttcctctgttactacatataatagtgacaatttcccacggcttgccactaccagcctcactcccacaaacacttcctctcctaatattacacaatctgcagcctctccacccattgccacatatccacctcttaccactcctcatttgaaaaaaccagtagcaatttccatgacaattccacctgcttacatgcacatgtcttcagcaactaattctacttccctaatgtccacttccacggctgtcactaccgttgctgctgattctccactggccacagagaatcgaatgtcttctctattcaccaaacgacagctaactacttcagggggaatgtgcgaaatgtgttgaagagatgtcgtaccagaggctctccacttgctaatactaccaatctcaaccagcatcaacgattggattcatcttttgaatgtcctcacaactcacagatgaatgaagactgtggtgcttccttggcgaaggctgcttcccagtctcgccaatcgccatgaatatcgtctcttggattgctcgggatttgagcaacccaagagcattccgtcaacttaaattgctcacttcttagtgtaatcctgatgttatttttattatggaatctaaacttaaattaggatctattactaaatttagaaatgctttaaagtttcctaatggtattgaagttcctagagtaggacttagtggtggtattttatttctttcgaagtctaatgtaaatgtatctattctcaattatggtaaaaactttgttgactgttacttgggttttgttgatggtccctcttgtcatttttctggtttttatggggctccttgtgcttctcaaagacatttcacttgggaattgctgaacaaattaaaagatactgctccactctttccttggcttgtcatgggagattttaacgaaattttatctaatcatgacaaacttggtggtcctttgcgtgatgaacatcaaattgatgcttttcgaactaccattgatcgttgtgggttaaatgaattatatttctcgagggatcgatttacttggcacaataagcatgctcaaagctcaaatgtcaaagaaaggcttgactttggtttcattaatcacccctgggctgacagtttcgttactcctataattgaccatttggttttttttggctcagatcatagagcaattttagttaccatatcaacaccagttgatgcaccagttcaaaagtttaaatcacgctttcggtttgaaaaattatggcttcaagaggagcaatgtctcgaaatcatcactcaacaatggcaacctgctgcaactgatcccaccagccgtgtcttgaataatatttccaattgtgctactcaacttcaacaatggcaccgttcaaggtttggagatttgccaaagaaaatcaagatttcccaacaaaaagttgaagctttaaacaacaaacatgataccagcagtagccattttgaagagctcaaatctagtgagtctattcttgatgatttgctgtcccaagaagaagaatattggaaacaaagatctcgcatctcttggttacaatcgggggactcaaatactcgattttttcatcaaaaagtcttaagccgaaggaccaacaactctatccgaatgcttactgatgacaatggaatggaacatacttccctcgatggtattgctcaggtggttcaaacttattttcattctttattaagttttgatggtgtcgacttggctgctcttcagcaagttatgtcaactgtcccttgcctcataacagctgacataaatctgcttctaacccgaccttacactacatctaaagtttatgacgctctcttatctatgcaatcggatggcagtcctggcattgatggtatgtcagtcatgttttactcaaactattggggaattgttggtgaccttgtgactaaaactgttcttcacattcttaatgatgggggcgatccttcaagcttcaatcagcaataatcactttgattccaaaggtgaaaaaacctactttaatgactcagttgcgtcccataagtttgtgtaatgtgctctataagttagtctccaaggccatagttcttcgtttacaaccaatacttggcgttgtcatctctgaatcccaaagcgcttttttgaaatcaaggttagtcacagataacattctcattgcttttgagcttttacattctctaaagcacttaaaaaggggaaaagaaggttatgcagcgattaagttggacatgagcaaagcattcgatcgtgtagagtggaattttattcagcatatgatgctatctttgggttttgattcctcggttgttaatctcattacaagatgcatctcaagtgtctcattttccttccttatcaatgattctattcaaggaagggttgttccaagccgtggtattagacaaggagatccactatccccttacctatttataatttgtgctgaaggactttcaaggctgctgcaacatgaagaaactaggggtaatttacaaggtctgaaggttgcccgtagtgctccaagtgtctcacacttattctttgtggatgatagtttgcttctgtgtcgtgccaacaaccgctctgctactgctatcaagaatgcccttgatctctattgtaaagcttcaggtcagaaactgaacttggacaaatctgtgctttcattttcaccaaatacactcccttcggttcaagctcaatttcatcaaattctttaaatgccaatccaaccttgtcatgaacgttatttggggctcccttcctactctggtagagataaaaaattattgtttggtgacattaaagagaaactttggaagcatttgtcagcctggcaagaacaattgttctcaatcggtggaaaggaggttttattgaaagctgtagctcaatcgattccaacttatgctatgagttgttttcgtctctctctccaaatcgctcattcaccaaatttaagtcatgatgaataaattctggtgggggttctaactcttctaaatctggtattaattggaagaattggtctgttctttgccagccttagtcagaaggtggtatgggtttcaagagtttcattcactttaaccaggcaatgttagctaaacaggcttggcgggtcttctccaatccaacttctctgcttagtcgtattctgaaagcaagatactattccatttcttcgttcttagactcacgtaaaggttcttacccttctcttacttggcaagggattgtctggggtaaggaactcctcttaaagggattacgttggaaagttggagatggacatagcatcttatgtgtatcggacccctggattcctggcataacaaacttcaagccactgcaatcggctgggactaccataaaccagcaagtgtcttcccttatcacaccagaaagacaatggaatttagagttattgcatgcaacttttcttaactctgatgtagataaaattcttcaaattcctttgactattttcccagctggtgaccaactcatttggcattatgaaactaatggggcatacacggttaagtctggttatgcactagccacaagccttgaagaacagctgcctactgtttcgggtcttcaaagtcaaaattggtggaacaaattctggtctttaactcttccttctaaagtcagaatatttttatggcgagctataaacgactgtcttccaactgctgcaacacttcaccatcgacacaatgcagactctcctatgtgccttctctgtcaaaatgcaagtgagaccactcaacatgctttgttttactgtaaaaggcctaagaagatctggaaggactcttccttctctctttcccatttcatatctgaacatatgaccattaaagaagttctgcttcatgtttcggaatcatggtcaaatctttagcttgagcaattcataacagtcctttagctaatatggaatgagagaaataaagaaaaacatggtagtagaacaaaaccgtataacatgttggtgtattctgctctatcctacttggaagacttccaagcggctcagaaaaataactctgctacagcacctgctgtttctccaagaaatttacagcagcaacaagaagcttcttggctcaatcctcctaccggtaggcttaagttaaacacagatgctgctatcaacaaggagactcaaacaacaggctgtggagcaatccttcgcaactctgatggtgaagttgtggcagctttttcaaagcctgttataggctcttttcggccagaggtgatggaagctcttgctttgatgtatggattacaatggttaatagacaatggtctgaatgttcactatattgagactgattctcttatagtggccaaaggtttgcaatcaccatcttcatcagtttccaatttccattgtcttttatctgacattacgaacctagtgtcctactt

SEQ ID NO: 188378 - DNA, 2135 bp, Cannabis indica
tttatggttaaaatttgggttgtgatataagttgtaacatcaattttgtgttggagcccaatggaagcttcacttagtggtcttgcaatttaggttgtaattggagcatgggtaagattatgatatggtttgatggtggttggtcatttgggttgtgatattagttgtgacttaagttttgttttgaaaatcaatagaagctttacgtgttggccagtctcgaatattaacagagaggatgacttagagaaagaggaaagagactaagattgtaatatggtttaataatgatttagagatgccatatatgttgcaagttcaattgtgattttgaaagaaaccaagcttcattttctatggtggagactgaataagaggaagaagaagagctagcaccaaaagatgtgagataatagattaaagtgaaaatgaattaaaaaaatataaatttgatgaaaaataataaaagataaaatagaaaaataaaaaaaaaaatcgtgaaagtgaattagtttcatttgaattatgaggaaatacttaagcaataaaaaaggtgagatgttggtttttataaacgactattgactaactaaatagtaaagaaaaaaaaacatacaaaaagtccaataaaactacgatgaaaaaaattgctaatttataaaaaaaaaatactaatacgacaaattattcaatcaaactaataatttaaataggagaaattcgagtaggccaccaaggatgtaggagaggaacggctcttataatcttccattcatgtaaaaagaagtgggaaacattcgaaatatgacaaagtgttttaatacgaaagtaattcctataaagaattcgacattgaaaaatctcaatctcaattttatcattgaaatgtgaatagaagaacacatcttcatcgtcgggatggaaagcgagtatatcacaaccgaacttccaaataattctattatgaaattggacaactttccaagaaatcattttatcatctctatcctcgtgatcaaccaattcccacacaattaaaccatacaattgttttttctcatcaaagcacttagagtgtgccactcgcactctccctcgaaccaaccctattatcattggattttgaaatctcgggtccttagaaggcaaactaatcatacgacattgttgtgaataaatattcaatgcaagaataccttgaatttccaacgttccatattggaaatatatagttccgttacttccaactacagaactgtgatgataccatacattcacaggaatttgaaaattgatagttgaatgattccattgttcagtctcagaagaaaaaatacttaatcgaaaatcatgaaatattattgatttgagtatgggattttctatatcgacactaattttaaccactttatacttaattgatgtcacaatattactactagtattaacatcacctcttaataccactaaagcatatctacgacatatttgggaagttggtgtctctggaagcttaatatactcctttgtaaaagggttgcaaatatacaaacttctttccttacaaagttcaattagtaacaagtcttcgaaccacgtccataaaacacaaaatttattatcattccaaggtaaaaactctaatgtcttttcttgtccgtatccaaaaacttttgatctttcagagaaaaattcatatgaaaaagcagaagaacctatcgtataatgaatatctgtaattagtagagtaaaaggacaaggagatgacgaagacttattatcaagtcttttttgacggtgatattgattaaatttgtgactaaaataagtctttgaactacgaattgtcgagaaccatcgcttggaaacgcaagcacactgtactatggatctaaaatcaggaagtctgagaagtatttccaatagtaaatcatcactaatagttgacattaaggagctcattattctctttatctcttctaatcattccctttctcgctcatatacaatatagatttttttttggtgaatctcatatacaatatcgatagttatatattttaatactctacgtttgtttttgaaattaatatctgacgttttaaaatagatattgttatttttgaaaaaaaaaa

SEQ ID NO: 188379 - DNA, 1873 bp, Cannabis indica
actacatctctttcgatagtcatcatgccaccacttgttgctgctaccactgctcagcaatctctatctacaacttctctactaggacatgcctcccctactcattctactgcaacaccagaccctccattatcagatggtgtaatatcagtggctccagcagtagaaacatttggtccaatagctacattagaagctccagttacatcagacgatccaggtagtttaattgctcatgtgtaagcaccaattcccttagtggcacctattgatactctcatacttccaacttatgctcatcctatgtgcactcgtgctaaatcaggcattagaaaacccacgattttaatggcagcattgattcctacttttgttcaggcagcaatgaaggatatcctaaagggttaggagctatgggaactgaatttttgtggcagttaagagaaaagtacttggattcttgtccatttacctcctggcaaaacacctataggctgtaaatgggtcttcagagttaaagaaaatctagatcgcacaatttttaagtaaaaggcaagacttgttgccaaaggttttcaccaacaagatggtttcaatttcaatgagagttttagccctattatcaaaccagtcacaatctgagtggtgctttctattgtcatctctagtggatggtctataaggaaattagatgtcgataatgcctttttgaatagtgaactacaaaaggatatctacatggtacagctacttggttttattgatgaaacatgcccaactaaagtatgcaagttaaataaagttatttatggactcaaacaagtgccaagggcttggtttgacaaactctcaactattctaattaactcaacttaaatttttctcggccaagacatatcattctcattcatcaaagtcactctaacatcctgcttgtatgtgcttgtatacattgatgacattttaattattgatagtaatgatatttcaatgtcttctcttgttacagatttgagcaacatctttgcacttaaagatcttggctcattgtattacttcttgggaattcaagttcttcataatgaaaatggcatcctactgtctcaaaataagtatcttaagacttattatgcaaagctcagatgcaaggagttaaaatttaaaactctcctatgaatggtgggcttaatctctccaattatggaagtgacactgttaagatctcactttgtagagatccataattgtgcacttcagtatgcttgtatcactaggcctaacattgcctttagtgtaaataaggtttgccaatttatgcataacactctccaatcacattgagttgctgtaaaacatattctcaggtaattggtagggacacttgaccatggtcttcaacttcaacatatatcctccctgcatattcaagcatactatgatgcggaatggattgttgatcccgatgatcatcgatccacaataacctattatgtgtttcttgggaaaaaattagtaccatggcattgcaagaaataatctgtcatttctcactcatcaacaaaagctaaatttcacaggcttgcagcagtggtgtttgagattacatggatctagtctttgctcacagagctaggtgtccaaagtagtctggttcctactattcggtgtgataaccaaagttctttgatgcttacagctaaccctattctacatgttaggacaaaacacattgagataggcgtatattttgttcgggacaaggttctaaataatgaaattattatcttccatatttttcttgcttatcaacttgcagattgtctcactagcctatccctagtagccattttctttttcttcgtaaaaaaactaa

SEQ ID NO: 188380 - DNA, 8481 bp, Cannabis indica
taaagctcatctttgacgcttgtttttgtgattttctattagtttatcgataaaaactagctcagtcttactaaaaaactaattggtttgggaacagatgctgaaaagtccttgtcagcttgatgcatggatgaaaatgttggtgtcaaagatgctgttattgtttttctatggatagttttaatgatatttttgaaaagataaaatatcctgaaaatgtacagaatgtagattttcactacaaattactggcataaaatgtcctacaaaattaaaatttcaagagaatgtctataaatggtacaatggttttcctttatttactgatattgaggcatttatcaacattatcctgctacattgttaacctcagctatatttaatagataaatggctaacatttttaggcatagttatttgagctaccataaaatgtagatgagtttagttattgcgtttatgtttgttgtgatatttcttaaggtgtgtatatgtgggtgctactaacgaaatgttaggattctacattgacgaagtatgagataggttaatagtatataattacttgtacaccctcctctcttaggctaacttttgagagtgagttctacccaagtggtatccaagccacgcacgctcaagctggaccaacattgcttaaggggagacctagggattaggccgctgggtgtattgttaggatctcacatggaccaagtatgagattagttagtagtatataactacttgtgcaccctcctgtctgatgctttgggagtgagttctacccaagtggtatccgagccacacatgctcaagttggaccaacgttgcttaaggggtgacttatggattaggccactgggtgtattgttaggacggagtatgggattggtagtagtatataactacctacttgggcgccttcttcttaggctagcttttagggttgagttttacccaagtggttgtatcacgaaactataacttatgtaaatatgttagcaacataacaaaacaaccataataaaactcatctacatgactcctgtagatacgtcaccgattgttattgtgctaatctttttcttcgctttatccacaactacgatcatgtttaccgaaattgaatgaattgtcccttatccaccatttgtaattgtttcaacaaaagcaattttaaaccagttgtttattttttcctcttttccaggtgactgtaaattgttatgtctggattctctctctgttggttcaaaacctatggttgcactttctttagctgaacttcctggaaataatgggcgtatagtattggcaatgggaggattggataacaaaattcatctctactgtggcgggaggtctgaaaaggtatgaactttgaaatttgtttacttaagcattaattttctttacttttttatgcaactctttattgacattagctttattcatctcagtttgtccatgcttgtgagttgaaagggcatacagattggatccggtgtttagatttctctttacctttatattccaatggcaagacagaaactattctactcgtaagttcgtctcaggacaagggcatacggatatggaagattgtactgattggagaaaagaaagaagaaattagtttagcttcttatataaaaggtcctgtacttgttgctggcacattgtcttatcaagtttctttggaatctctgctaattggacacgaggattgggtctattcggtagaatggcaacccccgtctgcttctggagatgggggtgcctattgtcaaccccagagcattttatctgcatcaatggacaagacaatgatgatttggcaaccagagaggacttcgggtatctggatgaatgttgtcactgtcggtgaattaagtcattgtgcattgggtttttatggtggtcattggagctcgaatggagattccattttagctcatggatatggtggatcatttcatctctggagaaatgttggtgttgacttggataactggcagccgcaaaaagttccatcggggcattttgctgcagtttcagatatttcgtgggcaaggaatggcgaatacttgctgtctgtcagtcatgatcaggtaatttgctctccatggtttgaatctttgttaaaaaaattcttcatttaatagaacatagagttgcttctttattatttatttcctctcgaataaatgtgcagacaactcggatatatgctccttggaaaaacgatgcttcttctgatagcgatggctggcatgaaattgctcgcccccaagtccacggtcatgacataaactgtgtcaccattattcgagggaaagggaaccaccgatttgtctgtggagctgatgaaaaggttgcaagagtattcgaagctccgttgtcctttctaaagactctcggtcatgccatttcacagcatagtatttttgaagacatccaaaccggtgttcaggttttgggtgcaaacatgtccgctcttgggctatcacaaaagcctatttacgctcagagtgagtttctatctcatgcttggacatagaatctataatcagttattgaaaatcataccgtttctgtgcagatgagaacgacaacacatcaagcagagtcggtagtgagaacatagacacacttgaaactatccccgatgcagtccctgtagtgttgactgaacccccaatagaagatcaactagcatggcatacactatggccagagtcacacaagctctatggtcatggtaatgaacttttttcgttatgctgtaatcatgaaggaaaacttgttgcctcgtcgtgtaaggtacagataaggagctattcctagtacattttttattagaatttattccattttcatggttatcgagctaaaagtatttaacatgacatttttacgtgggttgtattgtatcgtcgtggaaatcatgtgcgaatggaagtaatcaaagtattcgctctttattatgttttgcaggcccagtctgcaacagtagcagagatatggctatgggaagttggttcatggaaggcggttggtcggttacagtctcatagtttgacagtgactcagatggaattctcccacgatgacaaatttcttttgacaatttcaagagaccgacagttttctgttttcgcgatcaaaggagcaggtaattgtttctacctctatagttactaaaccgacggtgttacaatgctttcgtatttcatagccagacacttttgataccatgcttgtatgaaaaaatggaactcatcttctatttctttttcggctgttgtgggggcaaagatgagtgcagttttaaagtttaagggcgctagcatgccagtgccacaatggggctgatattcttatttcatttcattttatcttagttttttcggtaaatactactttggattttgtgttttgcaaaagttattgatcgtactctctgttttgttaaatgataaattggaccctgtatttttcaaaatggtataaaataatacattgagcttgattttcattaatttttatttaaaatataactaacttgaagccaatttctagtacgaacggatggaaaaaatgtaaccagtctacacttctaagttaggttattattatgttttattttgataaaaaataagctcaatgtactattttgtaccattatgaaaaatacagggttcggattgtcattaacaaaatagaagttccgatcagtaacttttgtaaattacagagtccttctctcatcttaccatttatactacaaggcttactattttcccaccattttgaatttttttttggaggagaggtggttgatttggtaggacatttttttttacatgattttggtctcccattgagattgacaataacagagatctttttcttttttggttaggcacagaagaaataagtcaccagctagtagcaaggcaagaagcacacaagagaattatatgggcatgctcatggaacccatatggttacgaattcgcaaccggttcacgagacaagaccgtcaaaatttggggtcttgaaaatcaatcatcagtcaaacttctcataactttgccacccttcaaaactagtgtcacagcactgtcttgggtcggtctcggcaaaaacagaaacaacggtttactagcagttggattggaaaacggactcattgagctatggagtctatccataaaccgaactaacgatggcgctataggaggagcccccgctgcaactgttgcaccatttgcacagcttgatcctgtcatgtgtcacgtgtctacagtgaatcgtttagcatggaggaaccccgagaaaagggacgacgaatgtagtttgcagcttgcctcttgtggtgcggatcactgcgtgagattgttcgatgtaaaggtaacttaagcgaaccagctgtttatttcagcaaagtaattttggtctaaacctacatcatatcatattataagcatagtgagaattatgaaattttcttagaaacacaaggttttacttttctttttactattccttgacacatagacatgtttattttaaactattgtgttcatttttactcttaattaacctaattaagatgggctctgcgtcttgactagagaaatgctaaagagcatcatagatgtcatatcgctattagtatagttcaatatcggatgttatttattttactttaatgatgattatagaaaactgttaatcatttataggacgctccctcgtaaggatgttaattattatggtatctaatagcaatgctcttttaattaggaggctaattgttgtcgacgctactcaaaattaggaccaatgtagagaattcttcttgtgttttctttggttattgtctcatcaaatggtgagaatatatatttgcttaataaatggttaggatatcatttggtataaaaggctaaggtttaaatcatatactaacgtaatgtaaaaacaagacttaatatgtcagtttatgcagttcaagtcccttttcttacatagcaattgttatagtttatggtccctaaatattgtagggttaggtgggaattccaatttcaaaatatatattacataaatgtcaatgtatacatctcaaaatcttattgagaccttccaaaccttaaacaacacaaaaacaatcgtaaaaccacacaaaacagctatcaactactaaaatgagcataaaactcacctatcaaccactgatgatctatttcttacatgagtcatcacattgggaggttgtctactgacaacttcacaatgcaaggtttgccagaatacaacgtcactagccgtcgcatacaccaatcaaacttggtgtggcttcgactgcatattttgtgagattcggtcacttcaaggttcggggtggtatcattggattgagctattcgagagaaaaataacctatgcatttctgttaatgttttaaggtgagttcgtgggtaaatccaagacctagaagaagctttttcttaagacaccatcgattattcagactctagggctagtaccatcataacctacttttcgagtagattattttgatattttgcaaggtaggttccgtcaatgtgtatttttggctaagattctaactatatagtaacatttgcttataagttatatagtaacttgttaataattagttctaaaatataccttgaaggtagccatcataaaactaaaatagtatttattgaacaatagggtattaagtttatattaatgcaaacattatggtactaaaatgatagattccctattactaaaatattatttgaaggagaaacaatcttcttcacatgtagcaatagaaaagttatattactaattcactacattttaaaatgagaaaactattttatatcaccatgaatgtgtaaagagagacaaagtaatggtgtttagactcatatagacttgtaattaccatcgggtcgtacttccaatcctccttctattctcttctccacagagtagggcatataagttccgagcaatttatcccacataacaaagaaaggttgagagaagttatacttgtttccgtaaaattgatggtgtatgtcgtgataagcagtattatttttaaaaatgacgtgaaaaatattcccgggcaaacatatcccacaatgatcatccacacccttgatagtagcaaatgtgtagaagaaaatggaagctcgagcagacatcccagatactaaaaatgctaatgcaccactaaatgtgtcaacgaaaagtccttctaaagggtgattgtatagagctccgaaagcgtagggcacaatgagctgatgatgttgagagtgaatgtgcttgtacaaaaatttattttgatgcatacatctatgcatgaagtattggacagtatccaaaacaaccatagcactaatgaattgccttattaaattaataagagaagtagtctttttctctacaatatatgctccatcatttatattaacctacaaaacaattgaaaagataatatgaaacatatgctttcacaagtatgtttgtaaattatactttttatctttgttatttttaactttatactttttcagattctgtatgctttattattatttaaacctcgtgcttaaaaaataacttttagaccctaatttttttaaaaggttaaatagtaaacctctagacctaatttttgccaaaagaaattatgagtatgatcaaattatcttgttagaagttcctcaatttttttttctttaattgtcatgctttttgaatatagtcatattaaaaaatattttgagtaaagtcgggtctaaaagtttatttttaagagtaatttacaatgtaaatacttaaatttaattctcggttgtaaatcaatacttaagtttaatttttgacggtaataatacataagttatatttttaaaatttttgtaggtgtcttgactattaagtatcatgttaatggccacatagtagttcatgattcgtctaagttattaaatttttattttttatttaaaaattcatttagatataccaataaaaaaatgacacatgggtaagaggaaattagactctataccttttttacattattcttttttaattttaccctcttttttaaagtttattatttttatctattttttaaaacactttactaattttacccttgtcacctcaatatactctccatgtgactcccttatgtcagggtattttcagtacaatacatataaaaagagatatgtttcaattaaatataaaattaaaggtagatttagttaattgataaataaaaaaggtatttttcaataaacccctattaaacttaaattttatctgcaactgagtattaaatttaggtatttataccacaaattactctattgtcattaattttataaaatacaaactccaaacaaataatgctataaaacacagtctcaaaaaaaatgcagtgttttctagacttttcaaagggtgaggttcgggcataaacaaattatgttggaccttaaattttaagatgagcttaataaggtatttaaaaaaaatatatattttcaatacttttgtttcttagataaaaataacaattgttaagctactaatatctaattttgttagtttttatttaaattgtagtttgattcttaccatataataacatgtgattgcaaccatagcttgaagaaattgttgaataaggactccttttatcacaactcctttgggtaccacattcttttcatcctcctcttcctttgagtgtagcctatacttattacctaccaacaaatccaatagacaatacattccggagtatacccaatacactataattggtagaatagttcctaatacttcatcaggaattgtctccgaaatcatgtttttgatcttcttctgaaaaccaaaccaaaaaaaaaaatttaacaaaataatcgaatcatagtatataattctctgaaatattgtaaactatattatctattacataacaagacatataattggttaattacatatataatcatccatcatctattactttaacacataaataatagtaaataataatcattcaaaacttactaatatgaagaacaaagaagctaaatagttaggtatatgagattatatgaataataacacctagtttctaaaaaatgggtggttaagttgagatgaagagtattgtatttatacttaacttattcatttataaaaaaatcaataatattttagaaaatattgagaaaaaaaagtaagtcctctcatgaccataattattacacatatagataaatatccaagtcaagtgaaagtaaacttaatggcattattatcaccagtcatttaattattccaagtagcaaaaaagtcattaacactctctcattcattcgtaattaatattgactctagctatgcattaat

SEQ ID NO: 188381 - DNA, 5771 bp, Cannabis indica
ttttcttttttctttttctttatacgaaatcattttaatattttttaacaaaatcattgtgatattgacataacaaaaaatacatatccaatattttgaacgaaaagaaagttgcattttggtaacacaaagaacccacacatgtttctgtctaaagaaagattttctatatatgtgtgtataacataaaaaataaaatatacagaggaaataattatattacatccatgttatgcaatctgagtttaacagccttctcaaaactacatggtataataaaatttctatattcactagttaatctctcttcttcctttattttttcctttttacccaaattcttgaccttatgtttacatggaactatatatactataactatatatactatgttacatcaatatacagttatagtttttggtttggaaaggcacataatgtaagggactgcgcttagaccatgtatcgacgcagataatcaactctggctggatgcttcagcttcatgagagccttcacttcatgcttcctaaccatttctcttgaaatgttcaagtttccagcaatttcgcctagtgttctatcgcctttaccgtctaatccatacctctgtctcaccaccaaactctccttaggctttagagaatcaagctgaaagacaggatttgaaagcattcaccaaatcaagatacaatgcttagctcattcattttctatgcttagttatagaacataatttaagtaattaccacatcatcaagagcaagcctgagaagagctggttttcgtcggtcatcaccttccacaccttcgacatcagtaatactgttgatgaattcttcttgtgtaactgcatgctttgaatgaagagagtaaacaggtttcgaggctttcattacttcgttgtacctctcgggtgaaatgccaaccctctcaactatttctttttctgttggtaatctgttaagctcaaacatcaactgaagcttggccttctgaatttctacccttacctacataaattgaatgagaaggaccgtgagagtgttttcattatgtttgataagcattcttttgcctaatttcttctcaacttaaagtacaacaaatttgcagtttcccctaaaacagtgtggttgagaaagtagaatagactattctaataagaggcgttttagctatttttattctaaacaatgtgatgtaaaatggtgtatgctaagatatatgggatttcatttcaaaatcaattgacaataaatgaagtagttcatgcatattaacaataaatgctaagatgtatgaggttcccgcatattgtcaatgtgagactttctaacaagaaaaaagtctagcttagataggaaaaggtcttacagattcgaggccaaatgaaacacgggtaaagcttgagactgtcatggaacgtatgatggcatgcctaatccagaaaagaccataagtggaaagccggaattttctttttggttcgaagcgatcaattgctgtaattagtcccttaactccagcctgacaaaggtcctgaaattttggaccatttgcaaagtcttgaaaatatttgttcattacaaacaatacaagtcgaagattgtgctggaaacagagacaacaatcatcagtcaatttcctttccaactaaactgccatggcagcataaactcatgataattgaaagaggtaaaatgtacaaggcatagattgtacatagtagaaggcaaggagcacaacataatgtgttgcttaccttaatgagtttgtttcgtgcagcccagccaatttccaattgttttttaacctcaaccacactcatattagttgcttcagctatttcgccttcagttggctctctccccatagcagtttgcaaattctcttgcactttgaggagttcctgaattgagaaacgtaattattagcagccaaaactaggcatactcaaaaaaatcgacacaagaggaatacttcatcagttcatctcatatttttcatatccttattaaagccttacctttagaggctgcattaacttgaacaaccaagtatgctccgtagaaggaagaactggcggtatcttcattttcttccaatccaagctgaccaaatcagttgaagtcgaatactccctaacaagcttctgaatcttctcatcttcagtctcagcaacttttctatttcttactgaaacaacaactttctcagcattattctttcctttccaactgtttttcctctttttaattgaaacaacctcattctcttccttagcccttttcaatgcaatcctactatcaagactcattctctccttccttgaacggtttctaaccacagtatcactggtgttcttacctgtttttccatcactttcactaacctttctcttccttcttcggcctctactcatcaagcgatcagcaccatccgcatccacatctgtatcggttgttgcagggctaagcttgtaaatgttttccagcttggccgcagcctcattgtaatccacttccatggtactagtagaaacttcatcggtagctgtagctttcactcgatttttagtttttttagctttccttactctgttctgaatctccttgtgtggttcaatgggcaaaattattggttcgtgagaagaaaccaacgtagttttattaggcttatcagctttaaatgccacaatcaagggcttcttgggtgcgaatccatgacttgagaattttgtgcttaatcctaggggggttcgagaagcagagctagaaactgtcacaactcccatgccaagtaaattttgggaaatcagaacaaatgaaaaagttgagcttaagttttaccaaattcttaattcctgcacaacaaaaattggtataaacatcacatttccttccatttccttcctaacaagtgttacaaaaactaaattcaaaaacacccttcttccctaaacacacaactttctatggaaagaccattaattttctagccaaacaaacaaaattgaataaagtatgtaactgaactaaaactccatcaattcctttcctgccttctcagaataaaatcaaaaataataattgggctataccttaaacccaaatactcaacttgttactttgaaattagataatcaaatcacataaacacaacctcaaaccaaaattataccaactcctctctaccctaacagagtaaattaactaatcttgctcttaaataggctcatttccaaaatcttacttaaaactacttattcaacacttcattactcatacaacatcataacaaaattctagctttacaaacacaaaccaatatctttactgaaaagtatacattttgttctttgtataatgaaaaaaaaaaaaaaaaaaaaaaattctgacctgaaaaatctccgaccgatccgagttgccgagtcgtcactgattttggagaatctgagttcgaaaattctggaacttaaatttggaaagtgttacgacgtaaattatggtatccacaagtttaaattcttaaatatccaacggtcacaaatttttggttggtagatcaacggtccgaacacggtacacgtagatgcaggtgtagtgaaaatgaatctattggatgacgtggcgagtgctggagcagaaacacaatctatgtgaagctgtgacgtggagtgttgtgattgatggagaagatatttggtgaaatgtaaggatgacaattctgaaaaattgggaaaataggggtagtggtttacaaaatattcaacctatatattgggacccacctagtacgttgcttaacatcaaccagttaaattaaccaatttttaattttattgattttgtttgactttaatttgaaaaatatttaggttatttgtattgtcggtccttaaattatatagattttagtaagttggtccttaaattcgatttttttagtaaattaatccctaaattatataggttttggtaagtttatcatcagactttatattttattagcagcattcagtctccactcttaaatattggtatttttattattttttattgattttactttaatttatttttgtgtataaattcaaagtagttttatttttttaattatatatatttattaattatttaaattttacatcagtcctaataaaatttcatgagttcgttgttaagcataaattttataatataatttacttaagtagtttataaaaactcatttaaagaaaaaaaatactttataaaaaaaatatatattattttggctacaaaataatattttattacatatataaatagattttacaataagttcttttaattatttaagaaatgagaaaaaatatttgcttatagtgcagaggaattattcgatagcaaaaattaatattttgtgtaagtgttgttcataaaaagataaattattggttcacgtgtttatatagttttgtaatgtttaaatatgtcttgattaattaaaaatacatataaataaaaaaaatatatgtttttcttatttcgacatatttaaaaaatatgtcttaaatttgtgttttttttcttcttcttattttgatatatttaaagaaaatacatataaaaaatattgtatatcaatataaattgtcttaaaattaatgcaaaattaaataaataaacaaaatactattctttaagagtgagaactttatgtttcaagaaaataaaagtttggggaccaatttgtcaaaaaaaaaatttgaagatcagcttgccaaaacttatatagtttgggactaatttgcccaaaactaaagtttggagaccaacttaccaaaacctatatagtttagggacctgacatacaaaaaattctattttttgttgaatttgtttaggcttatttgtattgtaggtccctaactatataggttttagcaagttggtccctaaattttattttttagcaaattcgtccccaaattatatatatttttgcaagtttatccttaaactttattttttagtaaattggtctccaaacttttattttattagcaacattaaatctccactcttacatattgataatttaattatttttttttatgtattttacttactttaatttatttttttgtgttaaatttaaataattttatttttcaattttaatattttgataaaaagtaattatattaatatattttatttatttatttttatttttcaatattcttataatatttaattttttaccaaatatttaaaatatgctttattcatatataatatttaaaatttgcatcaacattcataaatttttatgagtttgttgcgctcagtataagttaaaaataaattttttataaaaaaaaaaatttaacaataaaataatattttactatatatatatgaatagattttatattaagttttttcatatatttaaataatgaccatcctctaatagaggaaaaataattagagaatgtaaaaacttttttgacttatatattagtttttttttttttctttttgcatgcacatgaactatttgatttgatgagaataaacatttgtatgaagtgcaaataaattatttggtagcatattaataaaatatatttgttttctttttatttcagcatattttaaaaataaatgtatcttgtatttttttcctttcttattttggcccatatttaaaaaaatagcatatagataaaaaaaataatatatatatatgtactttttaatttgtataaggtatatcaa

SEQ ID NO: 188382 - DNA, 4563 bp, Cannabis indica
atcatttaatcctaactttaccttttcatgtattgtatatatacataatacatatacaactcctaactttaactttagctaattctcctttgtataagatttcatctcagatctaacaatgaatgaatgaatgagcaaccaaatcaatacaagttttagtctttcataaatttgatttgatttggtttgatttgatttgatagtagtacaacgaattcactgttaagttaacacctcacatcatagggaaactccagtaagcttttatctgatatcccacattcttaacttaatcatgtatagtatagctcttatcaagttttgaaaccatgttattgttgtttgttacaaccatgctttctttgttgtcagtttggtcaacaaacccatctcactgcatagtacatactacataccaaccgtctatgaaatctttcttctaatgttttgatggatttttatgttaccctttttggtggattctggtcattgttggttggtaccttcatctggtatcaaatgagaattctttttctttttttcttgattgatacttattttggtattatttgactgtacttgctatagctgattggttttaattgagggggaaagatgaaggtgatagacaagatccaggagcgtagcaatgacaaggtgttgttctccttcgagttcttcccacccaagactgaggaaggagtggacaacctgttcgagaggatggagagaatggttgcccacggcccttccttctgtgacattacttggggtgctggaggctccaccgccgatcttacccttgacattgccaaccgaatgcagaacactgtctgcgttgagagcatgatgcatctcacttgcaccaacatgcctgtagacaagattgaccatgccctctccaccatcaagtccaatggtcttcagaatgtccttgctctccgtggtgaccctcctcacggccaggacaagtttgtccaaatccaaggcggctttgcttgtgctcttgatctcgtatgtcatgtccccatctatgattcatgatatctatccccattgatctctatctatgtaattcaatcaatcattatctcatctctccaggttgagcatattcgggccaagtatggtgactactttggtgttgctgttgctggttatccagaggctcatccggatgcaattggccctgatggcgtggcttcactggaagcataccagaacgatcttgcttatttgaaaagaaagattgatgcaggagctgatttgatagtcactcagctattctatgacaccgacattttcctgaaattcgtcaatgactgtcgccaaatgggaattacttgtcccattgttcctggaattatgcccatcaacaactacaaaggctttatacgcatgactggcttttgcaaaacaagggtatgctcctattgctaattgaactgaaatcataagtgctaacaagccaatgcttatgatgttttggatttatatgttcattcattatagataccatctgaggtcactgctgccctggagcctattaaggacaatgatgaagctgtgagagcgtatggaattcaccttggaaccgaaatgtgcaagaagattttagccagtggcataaaaacattgcatctttacactcttaacatggagaaatcagcattggctatactaatggttatttctcaacccttatggttttgcacattggaatgattttgaaattccaatgtttagattattaataatatcctagtatcatatcttggcagaatcttggcttgattgaggaacgcaaaatatccaggccccttccttggagacgccctgctaatgttttccgtgtcaaagaagatgtccgcccgatattctggtaggcaatttatcaaacttccccttttggctaagtgcttagttgtcaaatattgagactgttatctttctctccaataattatagggcaaaccgcccgaagagctacatatcaaggacttctggctgggagcagtacccacaaggacgatggggggattctcgcaatccttcatatggggccctaactgattatcaggtatgtcactgaaaattcctagtaccataaatatctgttctgttcattaatagccatgctgactgtccaaacttgctgcacctatagttttttttcaagttatatgtagtatcaattgctacaaaattagctattttacgtaagggaggtctagtatgcaactctgattgtgcatttaatcccacgaagcctgatggtcatgtcacatatggggcttgtctagatggtttctttagtttttatttctgtctttttaattagttaatttctgtgttacgtattcttttccacaacagtttatgcgaccacgttcccgtgacaaaaaacttgcagaagaatggaacatccctttgaagagtgtagaagatattcatgaggtgtgtttgttgtttcccttagcagaatgaattgcagctattcttatttttattgcaagttaattttaacaaatggtaacatattatgtcttgtactgtattgtttacttatcagcaattcaagaaattatgtcttggaaagttgaaaagcagtccttggtcagaattagatggacttcagcctgagacaaagatcataaatgaacagctggtgaaaattaatggaaagggttttctgactgtgaatagccaaccggcaataaacgctgaaaaatctgattccccaatagttggtaagcaagcagttaataatgttatctggatatcagtacttactcccatggctaacataacatgagtttgtttgttcaaataggatggggtgggccaggaggatatgtgtatcagaaggcatatcttgagtttttttgcagtaaggatttgttgaacgcccttgtcgagaaatgcagcaggggtttcccatcactaacctacatggctgtgaacaaacaaggacactggttgtcaaatgttgatggaacttgtgtgaatgctgtaacatggggagtgttccctggaaaggaaattattcagccaactgttgtggatcctaccagctttgtggtatggaaggatgaggcctttgagatctggtctagaggatgggctcgcttgtactctaatgaggccgacccttctagaaaaattctcgaagaggttggttggttctttctttcccgctacactgttaagttatgttctgttctgttcaagcatgacatgaactcgattgtgtttgtgttttgatctttcaggtggagaatagctatttcttggtcagcttggttgataatgattacatccatggtgatcttttcgctgtttttaacgagctctgagatgtgctggtgctctagtattggaaatgatgccttgttcttgagtttggtttataattattctattggattgtcctttgggaagattgtgtaataataaattttgtagcatgagaaggtgacccaagccaaattaaatttctttcactaattggggtcttacctttattcattattgtcagtgcaatcttaatattcttatatgatttatgattctatacaaagtcagttttcattgtacttttatgtttcttaagcaagaaacaagaaacatacttttgatacaaagtcagtcattatgtattgtagtctgattttgttaagagtgtgcaacacaatcaacaatggtaaaaccaaattctgcttttgttctataacaactttgttgattgatgtatgtttttttgtgcattgttgttgtaacataacatcatattcacaaattccctaaactttttagtatctcttattggcatggtttaagttaaacagttggcttttaggcatttacaatgaactaaaatttaggagtagcaattcgtattcatgtgtcgtgtcaagattttagtttaaaaacaaatgtgaaatctaaacctgactcatttatttatcgtgtcaaaaattaaaatctgaactgtttatacctaatctgatctgtttaataaacgaattagccgtatcaacttaaaattaatttaaatttatttattacaaactcaaacttgtttatttcgtgcgagtttcgaatcggattatcatgttggaaccaaattactacgcttactagtattcttgcttctaaaataatgtaattattattattactagaatttaggatataatgtgggaggcaaaatgaaattaaaaagtgaaaagatttgttgggatgtgtcctccaaaacttaggtatttatgtttgcactttaataacatctttaatttgatgatgcataaattatcagttgtaaatcgttttaaatgaatacgtgacagattacgcttattaataataattggcgaaagaaaaatcttccaataaaaaataagtatttatgttagtggcccatttttgtggacatattttcttgctttgccaatccaaatccatttatttattaaatttaaatcatcccaaattttgggtctcttcaattcttcaaaaatgaaggcattacatttccaatacagactgaacccaacaacaaca

SEQ ID NO: 188383 - DNA, 2668 bp, Cannabis indica
ctcaccaagctatggcagcttgaactttacaataataggttcaccggaaaactccctattgggatgagaaacctcacgaaccttgagaacttcgacgcttcgacgaactatcttgaaggagatttgtcggaattgaagttcttgaagaaccttgtatctctgcagttatttgagaacagtttctcaggtgttattccagctgagtttggagagtttagacgactggtgaacttgtctttgtacactaataatctcacggggcctctccctctgaaactgggttcctgggcagagttcgatttcatagatgtttcggagaatttcctgaccggtccgataccaccggacatgtgtaaacgaggtacaatgaagaagcttcttatgcttcagaataatttgacaggtgaaatcccagaaagctatgcgaattgtccgaccttacttcgtttcagagtcagcaaaaattccctcaccggcaaagttcccgccggaatctggggattgccagcagtcaatataatcgatatcgagttcaaccaactggaaggtccgattgcctctgatataaaaacagcaaagagtcttactcaactattcgctgggaataatcggcttaacggggaacttccggtagaaatttcggaagctacctcgttggtttcggttcagctaaacgacaatcatttcttcggcaagattccggcgacattcggtgaattaaaacatgttggcaatcttcattttcagaataatatgttctctggatcaataccagagtcactaggctcatgtttgtctctaaacgatctaaacatggcaaacaactctctttccggccaaatcccttcctctttaggaactctacaaagtttaaatgctctaaatttgtcgcacaatcaactttccggccgaattccgataactctggcttctgtgagattgagccttcttgatttatcgcacaactggctcgccggtcgagtaccagcgtctctgtcaattgcggcctataatggaagctttgccggtaacccaggcctttgcagttcggaaatcaactctttccggcgatgtcctcctaattcaggcatgtccaaggatgtacgtacactcataatttgcttcgcagtagggtcagctatccttctgctggctttagtttggcacaactatttaagaaagagtgagaaagatgattaccaagatcggtctttaaaagaagaatcttgggatttaaagtcattccatgttttaacattcacggaggaagagattcttgattccatcaaggaagagaatctcattggaaaaggagggtcgggaaaggtttaccgagttcctatttctaatggcaaagagctggccgtgaagcacatttggaacaacctcgactcacaatttggccggcgaaaggaccggagtagtacgacaccgatgctgaggaaaagcagcagcaagtcgaaggaattcgatgctgaggttcagaccctcagctcaattaggcatgttaacgtggtaaaattgtattgcagcataacaagtgaagactcaagcttgcttgtttatgagtatttacctaatggcagcttatgggaccggctccactgctgccgaaagaacaaactagattggaattcgcgccatgagattgctgtcggagctgccaagggccttgagtatctccaccacggctgcggccggccattaattcaccgggatgtcaagtccagcaacatcttgttggatgagtttttgaagcctagaattgctgattttggtctcgccaagaatgtggttcatgctagtaaagaaggccaaagctctactcatgtcattgctggaactcatggctacattgctcctggttagtcttgtatatattggaaacaacaattagttatcatgcatttagtgaattaagtttttttttttttatataattaatattttcctttaatattgcagagtacggatacacctacaaagtgaatgagaagagtgatgtttatagttttggtgtggtgttaatggagctagtgactgggaagaggccaatagaaccagagtttggagagaacacagacatagtgagctgggtttacaacaaccttaacaacagagagagcgtattgaatttagttgactcagatattccagaggttcttagagaagatgctattaaggtattgaaaattgcagttctaagcacagctagactccctgagcagaggcccaccatgaggagtgttgtccaaatgcttgaggaggctgagccttgtaaattggtgggaattattgtcaccaaagatggtgccactgaaaccatggagggtctagatgacaagtttcataaaataattacttagtgtttattatgtaccaccgccgcgtagcatatctataaatcgagataacttgtacaatatataatgtattcgaatttttatattaggggttgttcacaaaaaataaaaaaaatagataaataaactgtattagggggcaatgtagtggtcggcggcatattaataatttttgtaccagttttggtgatgaaattgccttatagttagctttggactgtagttgttgtgggaatgaagatttccttttaatttttttggcaatgattaagtattttaacgaatgtttttttttttttttgttt

SEQ ID NO: 188384 - DNA, 2026 bp, Cannabis indica
attttctttcctcgaagcatcgatttcagttttattatcaagctcctcttctcgttctcttgtctcgtataatatattccaaaaacttgcatattgatttgcaggcaacggaaagataggatatgtaaatcaagcgaataacatgtacctgttccctgggttagttttccttcaatttcatcattttaagccaactatgcttatatcttgatggttgtaaactcatttttcggtcgccttttgttcagaattggtttgggaacacttctctctggcgctcattttatctcagatggcatgttacaggcagctgctgaatggtatattaagacttcttgcttgctttatttagaatgataataggaaaaaaaaagcagaagttacgctaaggacgtgtttgtttcctttaatttgctatgatcattataactattattctaaaatagtcaatgggaataaattttttgcgaaattgttagtttgcaattaatcctctggaccttatttggatcttagtgatactatcccatgaatttttcttttatgagactgtcttatagaacttggtgtgttttttcaagaaaaatgtaaaataaaataacacccttgtaatgccctgagtctaagtgtacaaaaaacagtcgtcaagaagattcatatacattttctttatctttttttcaaacaatgtctattgtactgcagctctgatagaactgatacacacatatatgccttacagtttttaataagctctttatctttggtaggtatctctatactggtttggtaggtatctctatactggtttgggaattgggatatggctaatttttatgttaaaaaattaaaatacgttttactaggcaggtttacaaaatatagttaatctttacctattattttatgttaactcttaaaatccagatttcattattctgttcagtatcagtacatacatgtgaattaaagttttgtttccccatgaaattgctgagacggtattctctactctgtgcagccttgcctcttatatgacagatgaagatatccaaaagggcatactttatccatctattaacaggtaatgatggggtctgaggcatcctgggtgtgtttggattttctcatttttgtttcactttctcacttcgtgtaacttctctttcacagaatgagagaggaattgtctttatatttatttagtttagattaacctatgttgcgagataaccttatatacgtatgtgtgccatggtgcagtatccggcatatcacgacagaggttggagctgctgttgtgcgagcagctgttgaagaaggattggctgaaggacacggtgatgtggggtacagagagctcaaacacatgtcaaaagtaagattttatatgaagcttttattagtttttaacatagaattaacacacttgttatagttgaataatttgaaaaacaatctgcactaaccacattgggaatctagataaaattcttgtttcttgaatcatttcagtcatattctctgttcttatctgtgttttggttgcaggaggagacagtagaatatgtgacacgtaacatgtggttccctgtttacaacccccttgttcatgaaaaataagtcaattaaactttactcttgtatcttttttatttattttttaaagtgtcaactgtttttgtatgtgacgtcgtacttttttctctggggctatttataggcagcaatttgttggttctatgtacttctgaatccataattttgaagcccagaaaagaaataagccttctcacttattattatcacattgttacatagtcgaacaaactgtgcattgtttatgtgggagtgagactaactagtacaatttctttgtttttctagacaatgtcataaaatatttatcttatgcgaaggtcgttttttttttcttcaagtagccattgcatgtgtgcaaaataaaacttttcttacctcttaaagttaaacatagttttagatgtatcgaaaaaaacatttgcag

SEQ ID NO: 188385 - DNA, 4101 bp, Cannabis indica
taatttttccaattttattttatgcagaatttggcataataaatcttcattctttatatttttaaatttggtttttgcgaatgagttttggttcatttgtttttgttttcctgaagaatagctccaagttaagatgacacgtatattagttgttatgaaaagaattattaccaaacagatccttaaccctgtatctgccataggaaaaaatctcaactttcttccaatttcttgaccattctacttcttgaacaacaattcatcatattggtcttggtgggtcgtagccaaatgtaatatttgttttgggttttatatcaacaaagttaaaatatgtttcctttgttagagtttgtatcagtaaaaatggtgacaagaagagtggacctccggtctgacacagtgaccaaaccaaccgaaacaatgagagctgccatggctgcggctgaagtagacgacgacgttttgggaaatgacccaactgcgtttcgattagaatcagaaatggcaaagataatggagaaagaagctgcactttttgtcccatcagggactatgggaaacctcattagtgttcttgttcattgtgacataaggggaagtgaagtcattcttggacacaattcccatattcatatttatgagaatggtggcatttcaaccattggaggtgttcatccaagaacagtcaagaacaatgctgatggaactatggatattgattcaatcgaggcctccattagagaccccaaaggagagcttgtctacccaactacaagacttatctgcttggaaaatacacatggaaagtgaggacctttttgttttttattttgtctttcatctcaactcttagtaatacagctttttctcataaaatatattataatacattattggcagaattttcattctctggtatttattataatgataaactttcggagtttgtattggtttttttttttattgttgtcacatgttgcaaaatggctgaactgtcactgctctgcttttcacttgtgcccaatatctgctgacgaaatgaaatgattatatttatcatatgtatatatatctatatatatatttggtatgtttgagcttcaacaagtattaaaataatgcttatatcagaaaccctgcaatctttctcactttggatatatttcttgaaaaataatgctagtgtcatatacttcaaatatgcttcatttcacccaattaattgtttatgataattctgatgtcctagtcatgtactctatgaactttaataacttgttttgtcaaaataagattccattcttggatgtagtgaagttggttgtgtttttttcccaaattatgtcttggatatcttttggaaccaatatgggctaacttgtcaagctgtcttggatatctaaaatgcagcactggtggtagagtgctctctgtagaatatacagacagagtggggaggtagctaagaagtatggtttgaagcttcatatcgatggagcccgaattttcaatgcagcagttgtgagtatacctttatcttattacaatttttattcttttactaaacacttacaaatagtgagttggttggcactcttgaaaaattataatggtgtcacaattaagttgatagcgatcacttcaaaacatgagttataactaattgatcctttaaaaaattcagaaagatgtttcccaacatagaagtttagtgatgactttaataattgagttataactaattgatcctttaagaattgattttcaccattattttaaatggttatgctctggcattttgcttttcaaaataatctcttatgcctctaattgaaaaggattggttcacaggcacttggtgttcctgttagcaggcttgtgcaagcagctgattctgtttcggtatgatcaccaacattgtcattcttacttatttagctcttttgggtttttcaatggctgatttatttaagaattgtttctgttttatggtttgttctaagtaaactatgctgcagtactcactagtctcaaatgtgtgtgaacaaaccaggtatgtctatcaaaaggtctaggggctccagttgggacaatcattgttggttcccagagctttatcaacaaggtaagaagaacactactaggtttcacataggactacacaagtaggactggttatgaaatatgaatgaatgactgaactgcttttaattatgatataattggtccttatataggctagaaggttgagaaaaactctaggtggaggaatgagacaggttggcgttctttgtgccgctgctttggttgctatccaagagaatgttgcgaaactcgagtctgatcacaagaaaaccaagtttttggcaggtattaacaatgttaattagtattagttaagttattttacttatcccaattaacttatgttcactttatccaatgaatgatgttgtgagcttagatgggttaaataaggtggaaggactagaggtggatgttgactcagtagaaactaacatggttagcattctcatcacccaaatttctaattgttgccatattttgcagtgaaatttctaatggtgagaacatttacttacattttatttattcatttttcaatagatattcatcgacatactcgaacacgccaagttaaatgcagaaaagcttcggaagaagctagaagagcatggcatatttgtgatgcaagaaagctcatcgaggtatggttttgtacagaacagaatctcagctctaattcagatggttaattgacatgtagtggtaacaacattcattaacgtcttttggtcttttgatttcagaataagaattgttatgcaccaccaaatttcattcaaggatgcccaattcaccttgtcatgctttcaggtggttaaatatcttaaaatatgaacaatttttctcagtggtttacttttgttgttgttggatatgctgactttggtttttttctcttttgttgtaaaattatgcagcaagctctgggtggagtacatgaagaaaatggcaactagttggagaaccaaacaaataaaatgataaaaagtgcctacctcttttcccatgaggaggattttgatcttcttcatttgaaatatcatatatgcttaaatttggaatttaatcttgtcaaactcttgacattgattaatgtgttattaattaaaataaatgcttagacttgtttgaaccacaagtttactgaagtggatgattcatatttcataataaataaatgtttgggaatttctattacacggaagattacatgagaagaaaaataagaaaaataatataagacacaatgaacacaaagaagatataggtttaaataaggttcaaaatttcgaattagaaatcattttctctcacatgaagacttaggtggtgtttgattgggagaaataaaaacataagaatagaaatggaataaaatttaaaatgcataaaaaaaatcataacctatctttatttcaatgtttattcaaatgtttgtcctaattgatctatccagctcactttttaatttccaacttcacgagtgaaatccttgatacatttttttaaaatatttatgtattatagtttgcgataagaaggttcaggtgtggtgcacacactcacaactctagatttatttgaagtaattttgtatagttcttaatggcttgttactaaaattttctttgaatatttatgtcatttttaaaattttttgacctaaaaatagtatgttgacattctttttgttcgcttaaattgctagagactagcaataagctagttggggattgtgattaaggttcaaatttatacattttaaacctttatttatgcgtatataattaatatcaattatatatactccttagctattttagctaggaatatttaatttattttaatttttatgtaatttttcataattgagcaaaatggtataagagaaaatttagtggcaaactcaattgcataaagcaaaccaattaaaattggctaaagttcaaccatttgcccatgcctttctctttccaatcacaattcacaactacatcaagttccaag

SEQ ID NO: 188386 - DNA, 1208 bp, Cannabis indica
acaagattttctcaaaggtcaagttttaatgtagtagaattagacaaatacaaattaattgatcaacacataaataataaactctcctatatacatacacaagaagattagaaaataatcatcaacaagagaaaataatgatgatcacaaaaatataactacaaaaaaaaaaaaggttagcctgtgacaatgtggataccaagagccaagatgagaatggtgaagacgccgaaaaagatgacggtatgaacaaaaatagctttgccatttgtggcaaagcaaccgaactcaacggtgcgagtgtggccggggagctgaaagagtagccctggggacaacagtatgaacaacaaccaccctattagaactggtgcccaatccaacatggtgataattttatcactatatcaaaattgttttgtgttggtgttagtgaacaaaaatcttagttccctatcaaaataatggcgtttttatattgaagaaggaaaaaaaaaggtttgaatgttgattattattcttaggcactattctaacttcaagtataggttagccaattatatatagcatctttttctttatcaaaccttttattaataatatgctctatgatttgagtccctacactagttatataattttttatttttttggatatattcttgtactatatgacaggactaaattctcacgcaaatgggggcttctttttttttttggctttgttttaaagaaatgtatccacatttttaagcaaaagattacctatttactgggtttagaatccattgtatatatatttacagatatttttggatcatattttgttaaactttgttatccattccaactaaagatttatttttattgaaaacaaactttagataattttcattaatagatctaatccaacaacgtaaaactcaatggtttaccaagcaatttacaaatgttcaccatcagtcaatataataagttcagtgatgactaatcaaaatattaaaagtaccactattgaatttgaaattcaacaacaatcatatattttttttttgaatgcgaatggataattttattagcaattcaaatatgcaattacaaaagatttgagggtactaggaagagtactcttcgagaaactacgattagaccaataacaagagccacgagccaaacaatgagcgaccttattaagagatcgcttaaca

SEQ ID NO: 188387 - DNA, 1024 bp, Cannabis indica
ttgaagagatatctattttttgaatgagtttttattcttattttacatcttaaacttaagttgactacagatgggataaagtatatcttgagttaagctacttaaaacctagagtgtaaacctatataaatgagacataatttgtaaagggactctaacgtttcattctcacaaactctagagaacttttagagaacataattctagagaactttcttcatgcattaagatcaataacaactcaagtggactagtctactaccgataaaagggggtgaagaactataaaatcattgtgttcatcttttttaaattctctttcagtaaaccagtttactttaattaatgattacttgtgttcatctttcttgtttatgatctccttagatcaattgacaaaaaatcacatcaacaacttagattcaagaaatataatgctaatggatgagactcatgattatattgtggccttattatgtgcatgcatgacacgtgttatttagatgaaataataatatatatatatataaatatatgtatatataatgcatataaagaatacaatgagttgatcacataggtactgcttagaaataaattgaaaaaataaattttgataaataataatgaattaaatattatgaaaaagacactatcaacattgaacaattacatttttaaattgttatattttactaaaaattcctacccatacaaaaagtaactaacaagttgcctatttttattattttttatttaaaaaattatttattgtatttagtatttatattcaaatagaaagatattattaatcattagattaagatcttgaatcaaaaataaatcattaattgtgattaatttactatagaaggacctatatattaaaatttagttttggtcatttaattattttaggcgagattttgcattagtggtgcgcttaaggcaagagtgagaaaaaaaaaatacttctttatcatgcaatcctacttatattgttcaatcataaatactaattttc

SEQ ID NO: 188388 - DNA, 4415 bp, Cannabis indica
  modified_base (29)..(29): a, c, t, g, unknown or other
aatccttctacaagccggctccagctgancagacggagaaaacagagaccgcatctgcaatttggagaaaggctcggtggatcagccactgaaaacggagagttgcctccaatatagctcaatcccactctatatccgctatgtcagaggcggggacagcctctgcttcggcggtgcagcccgagccaattaaggtagagaacagcctcgtatcagagtcgaagctggtttctgataaattagagaatcgggatttgggagtgaacaaagaagaacctcaatcgcccaagaaggaattttctgggcacagattggacgacaagcgcgagacttcaactgctactaaaccgtaagcatactcttatctttatctatctctcccccaaaagaaaaagattcgaattttcatcttctgaataaaaaaatctcgtcttaacttttcacctggggttgtttattttcaggaattcaacaacttccgatgttgagagacagcgagaagaaaaattccagatagatctgatggtgcggatcttgttcttgctgcaagattttttttttattctttttcaaaaaaaaaaaaaaactcataaatatttctatattaattttttaatatgaattatatattaatttttcgcaggcaccacctccgtctagatcgtctccggaaagagatagtgagattgattttgtggctgtagatgctaaagctatggcagtagatacagaaatggtgcgtgtggggcccaccctctttctgccagttgcaatcagatagctttcctttgttttactgttctagtctgatgataatgcgcctagaaattaattagaatggggtctctcattcattcactcactccttctctctctccctctatgtatttatttcttttaacaggaaacaaagcctctgataaaagaagatgccaaggcattgaaaaccagtagagaagaggcttcaaatgtggaacctgataagtcgaaagctattactcctattcttacttctattcccccagttgatgaagaatccaagaagcaccagccgcctacaactgttggcaaggagaggaatattgatttgcggcttgatttggaaaaggttgatagagatacagccgctgctgccctcgtccccggcaataagcaacaacatattacgagacagcagcagcagcagcagttacacgccagtgacaaaaatggtagctaaatttgaatgttctcttttttttttagctctatttgcctattgttttcctcctggtatgctgattttttcactttccgctttcttctccagctcaatcaggccctctaccaatgccaatgtccatggctggctggccgagtgggctttcaccaatggggtacgttggttttgttttgctttgtttttaggttcttttcacctcttttctggaaaaataacttggttgttattagcagatatatggcacctttacagggagtggtatctatggatggaacatctgtttcttctgctgctatacaagtaagtcaatttttcggttcaactatttctatcttcttactgaccattctgagcttcttttcttgattctttcctcatgagaattctcattctgtttctgacagtcaccgccttatctctttactcaaccacggccaaagaggtgtgctacccattgctacattgcaagaagtatatgctgtcaccaacaaattgcaaggatgaactctttctggccagcagcagccgctgcagcaggttctggttctctatatggggccaaggcttgtaatctcaatgttttgccgtcgccagatttgcatggaaacatttctggccgaggattgaacgcagttcaggacaagggtcagggtcttgctatgtttgctggccatactggaaaagacaagtcttcccaggcatccaacgttgttgatgctgcccagagaaagcaaattatgctccagcaagctctgccccctggtgcacctagtaatatattggtacgtctttcttttccgtctctttgtttttaaaatgacgtcttattcttctttttgggaatggtttcttattcttgtttgggtcttttttggtatatcagcaaggccctgctatcattttccctttgagtcagcagcaggcggttgctgctgcttctgtcagacctcctggatctgtgaagtctcctccagctcctggaaatgcaaatacctcgagtgcatctaatcctactacagcaacagcaccggcaatgacctttaattacccacctatgtctggaaacgaaactcagtatcttgctatcaatgcctatccgtttcctattcctgcacatgttggagctccaccagcttatagagggagtcctcaggcaatgccttttttcaacggctcattttattctaccttccatccttcacaacttcaacagcaacagctctctcattcacagcaaagtcaacaaggtcaccagaacccaagtatttctagtggttcttcctcgtctcagaaacatttgcagaatcaacaacagaggccgccacatcccagtggtggtgtaaatggtggtggaagtctacaaggctatcccacctcgaaaaaccagtcttcacagcccctacagcttcaacagcaacaacagcagcagcagcagcagcagcagcggcatcagcaaaaccagcatatttcgcatgcagctcgccagcttgaatctgagatgggggggtgaagatagcccttcaactgctgatagtcgtgtttcacgaccaagtatgagcatttatggacagaattttactatgcctttgcatgcgccaaactttgctttaatggggcctgcatctatgggcaatgcaagtggcccaaatggtgctggtggcagtaatggggaaaagaagcagcagcaacagggatcgaagagtgtggtagagccgcctcatgcttttgccatgtcttttgctcccatcaatggtgctgcaaatgctcctggcattgacatttcttccattgcacagcagcaagctattttaacagatgttagacaaggatatcagtacatggcagttgcacaagcttcagcacaacagaagaagaattaccgtggttccgaagatggaaaaaatggcggggactctaatttggaagaagaaagaaagaacatggcagggaagggttcatcaacgttggggcagtctatagctttttcgaggccagatttgtccgatgtatctggttcgacaatgccaggtagttctgtagttgatagctctgcgagaaatatcaaccttggctctactcaacatcgacctggttccgttatgactgcctcatctaatgcccagcagcagcttcatcggactcatcaacagcagcagttgcagcagcaacaacaacagcagatgcttcagctccagaagcaccaccaccatcagcaacagcaacaacagcagcagcaacagcagcagcagcagcagcaacaattcaccaatgcagcatcccgatccaagacaccagcaacaagtaatggcaatgtgtactctgatcaccacaacaattcatcaatggctgctaagttccccaatgccttatccacctttccctcaaaccttgttcatagcaataatagtccagctcattctcctcagtggaaaaattctggaaggtcaacgacttctcaagctccctctccatctatgacctcatcaacctcatcctccctcaaaaatctatctcagcagccaaatcgcactcaacagacacatacacaaatatcttttgcagccaatcctaaacaaccagggcaatctcaagtgctgcagaatagcaatagcaatcaatctccatctcctccaataatggtagggtcccccacgacttcctcggtgtcaaaaagtgctggtgggagcccaaggacaactacttccacatccacagcaaacaaagttggccaagcttcttcattgtcatctcagcaggccaagaactccccatccgtctcaaacatgaagtcttctcctggtcctggaaaaaatgtacagtcaatccttggcaatccacacatcacctcttcctccagcacaggatccaagaatttaatgtcgcagcagcagcagcagcaaatgcactctaagcaatcactacagcatgctcaactatatttctcttacaacattcctaatcaaacaccacattctaatagcaacaccccaactacagcatccgcagctgctgctgcagcaggagcttattattctcaaagacgtcgacctgagcaacaacagcagcaacatagtggaccagggacatcgtcaagtggaatgttaacattgtgtccttcggtttctctagggaacactagcacatctgatcctgccaacggcgtgtggcggcgtgcagctgctgctgctgctgc

SEQ ID NO: 188389 - DNA, 1375 bp, Cannabis indica
tttttacgttaaaacagagtaatacagggaaggagcagtttttatttatatatatatatatattgtggaatgagatgtactggatttttttttttttcatttttttaataactattaaataaatatcacaaataatagcttttttcattaatttgttagtaatttaatttaatttaattttacgttttttattagttgaaaacttttaaatttatttaagggtgatattgtattgattaatttattagctgtatggattatattaacaatttctctataaataaatataatatagatgggagaaaaaaatgttcattatcctttaagattattgttatgttgttaaaaaaatgaagggttataaattcattcaaatgatattagtttgaaggatttaaatatttaagtttaatttttaattataaataaataattaagtttaatttattatggtaataatacattagatatacttttaaaactttggttacacacaaagttttgagtttatgttaactaattattttttctaacaccgtaagtatttgatgttcgtaaaattataatttttttcaattttatccaactgtgttattatcttaaacggagctcatataaaacctagataatagataattggatctgaacggaaacatgtagtagcatttatttttaaattttcttataagaaattttaaataaagtatgtacccacaattagagaaaaataaaatttttataaatactgaatatttatattgttaaaaaaattattgaatttatactgcgtacaaatttaaaattttaagtatttattctactaattattttaatgataataaatttatatttatgcacattttctaagactatatgttgtgaataaagttataacaaattaagcaaaaattttagtgttttttttattattattagaaagtgttacgatactaacaatataagagacattaatagataacaatggcctgcaaatgattaccatatattattagaccaatcaaattttacttgtgaaaaaaaaatgtatacaatcatgaaacaaatttattatataatatgttacttttcttcttttctcatcctcattatttaagcttgataaatattaattaataaaaacttatttggtcaagaactttaactcgattgagtttcatattttggattatagttttcattattatgtgatttcttaaatttttaatatgaatatatacaatacaatgtcggtgaaaaggacccactgtttatattaatgcatttttagcaattaataagtattctctttatgcggatttcctacgtaccaaccgtaaatactattttagactctgcgttttgcaaaagttacaga

SEQ ID NO: 188390 - DNA, 1178 bp, Cannabis indica
caaacaataaaaaatcaacaataaatcaatgaaagtacaagataaaatacacaaaagcccgtatttttcacaaataaaatcataaaaatcgtaaaattatgtaaaattttatataaatgtatttttataatttcttttatttttgtatatttatgaaataatctctaaaataaataaatacatataaatttgagaagtattttaaatgtatatatccgtaacatctttagttcttatttatttatttattttcatttattataaattaatattaatgttatagaaagtttcgcttatcaacattattttttggcaagaactctggcttatctacttatccaaacacttctatcttttattcttccttgtatcaacagagttgttattgtttcttaattcatttaaatgttttttatgatggaaaaaatatagtaaaaacataacaatttcatattagggtcatggaggaaaaacacaacacaattggttttgatcatgaactttaatttttcgtcgatgaaactgataatataaggatacagacactcgtaaaaggagatgaaaaagaagaagaagaagaaacaaagcagaaagaaaaaacaaagaaaaggggcacatctaaaacaggtccccaagacagaaaattacaacagatacttaaaaatcatatacataaacaccaagctcgatccaaatgaaacctccttgtgagaatttagaacatgtaattgatcttttcatttttgaaatatactagtgcccagataagagaaaaactgatactttgattgctctctgttccagattacatggtattggtgcttctgaatgatccaagagctttgacagcggctgctctcaatacaaattggtggtagaaagcagcaatggcagctccaatgaatggtcccacccagaagatccactgatcgatgatggaaaacacatgcttattagttagaaatatcataaatttgctacaagatagtacaaacaaaaagattgggttttaagattcatacgtggtcattccatggcttctcctggttgaaaatcactgcagctccgaaacttctagctgggttgataccagtaccagtgatggggatggtggcaagatgaaccatgaacacggcgaacccaattggaagtggtgccaggacctgtcattttgacat

SEQ ID NO: 188391 - DNA, 1290 bp, Cannabis indica
ttttttttttttaatttatagttgaaaagattaattgaactttttagtatggacataataatgttgcatgcatattagagtgatatatatttaattatattctagttaattggcattatctttctcttgtatcttaatgtacttatgtaaatatgacaaatatatcctatccaataatattatatatcttccattaaaaaaaaaaacttatttttcaattgaaaagatttattatgagatttttttttttaccgaattaggaatgacaagatgagtattaaattactctatataatttttagttcatgccaattcagtttgattgatatattgtttctaagtaggtaggtatgaatatgattttcttgtccaataaaaagtctcattattgtaatatgtttctaaatagacctattaattcatatataatatatatatatatatatatatattcctacgtatatcatgctaatatattctacatatgcatacatgaatatgagttaaaacaaaaaatagagtgagttttcgaacctaacgaaaactctacttaattgtcaccttgcttggcgttaatttcaatttcacaatcgcctgcttctcttctcattcatacacaatttatatatatatatataaatatatatatatatatattcatgtataattgcatatataaatatatgcagtttacccttaaatttatttatttattgatcatatatacatatacaaatgagtatatgatattgtattgagattctcatatttttatcttgtgctatattatttttctctatattggagacagagtgataatagttttaagacatcattatgaagcaattaaacgacagtattgcaaaaagtggaatgagattagaaaacgacatgtcgtatagtgtttgtttatttagaaaatatcttcatgcaagaagagatcatcaacttaagattatggggaagaagactaatactaatactaatactcctttattctcaccacctaaaaaattcactcctgcatctttgctccggccgccgtctcttctagaactccgattaaacccgaaattaaggtaattaatatagtaattagtagtatgattatatgttaatttaattgctaaatttactatatattgcatgagatactataatggttaatggtggttcattgaaaattatatatatagtataatgactatttataaatattattttagagccacacactaatataaatttgtttgttaacttataaatttattatatattgagagagaagta

SEQ ID NO: 188392 - DNA, 5587 bp, Cannabis indica
aaaagtaacaaaataacgaaaatcaagtttagacaaggtaggagaaggaccccaaacatcagaatgtactaattcaaaaggagcactggcacgtttattgactctaggacttgaactaaggcaatgatatttagcaaactgacgtgattcacaatctaacgaagacaacttactatattgtgaacaaaactttttagaggaagagggcgacccaacctacaatgtgcctcgaagggaggttgtacaccagaacaagcaactgatttaggtattggtgtatcaagaatgtagaggcctctagattcatgtcctttatcaataatttgcttcgtcataagatccaaaaataagtaataatcaggtgctaaagggatacaacaactaagatcacgagaaagttggctgaccgagatcaaattacaagaaaaattaagtaaatgtaaaattaagtaaatgtaagacggacaacaaagaaagcattggagtaggagtaattttaccagacccaagaacacaagatggtgacccatcgactaaggtaacagtagaaactgaagcatgaggttaaaaatcagaaaagaagctagaatcacctgtcaaatggtttgtagcactagaatcaataacccatttagaagacaaagaaagaagacacgaatttggtttacctaaatcagcaatggtagtgatagaagaggatgaatacttaagagactcttgatactgtaagaatttggcatattcatctgcagaaacaagaattggtcttccagaagccattacaaatattatgttcgtcccaccaaactaactcaaacaacaaaccaaccaacaaatttgataaaggagcaaataaattgagacaacaagcagagaacaaaatgagataatgagccaataatcaaaatctcacaatcaaaatccaataggagaacaaaaagatgaagaggcaaacaaaaggattagaagcccaatactaggagaactaaaacttgcccaaaatacacgagcaccgaacgacccaaaaccagaagtgaaagaccagctcaaaactgaccactagagacaaattgccatcgaaatcgccgctacacagcgcctccacgtgtcagcacgtgggattgtcgcaaaaacttcaggcggtgcatgtggctcacgcgcacgaattccaccaccaaactccggggttctgcagataatccgatggtgccgacagtgaaagttcacgtgctctctaaatatgttttttgagaaatgagccttaaggaagatgaagaacaaaccctaattacaaatctcaattttgtgaaaaaacataatttcgagttttgaattttgctctgataacgtgtagaaaatgatggatgaattgtctatattattcatataattagcatgtatttatacaacctaagagaaactaaaataggaaagtacaagagaaaataggaaaagaaaataattacaactgaccttattttctagctaatttacagctaatattctaacatttcctaacttctgtatttaatctgacatccactactgactattggactgcttttgaagttctatgatcaatttttcctcataactttaatagtcaccagcttggtattatcaattcaattcctagcatctaattttgttgttccaccccaccaaaatcaaagaaagaaaacccacaaatgcagagacgaataactttctggtcgggcattaaataaaccagaagagtagaacagagacattccaacattttagaaatatgattctggagtcaccagatctcccatttgcacacttacccacttatttatatcagacgtagatgcctattccgctggtattaaattatgcattattgtcacagtttgaagcctaaaactttctcttgaaggctcccaaacaataagatggtatgagaaaaaaaaaactttactacaccaacagctctaagcagaccttgcaactatgttatgctctaacagtagaaatcagtttcgtgaatttgaacccccaccactaaaacactcaccactcaaccaatcacttagcatcaagtggcatgtaatttttttctttcttatttactgaaaaacaaagctacgtcaaataggaagcagaaagtagcatcttacatttggtgaattacgacgagtagaagctgtgaccagagttataccatgtgtattatcatagacagggggtttccattcaggaagtactgcaagtttaataaaaaaaaaaaagcactaagcacagaaaatgatgtatcacaattacaaacagcttctcttttgtatttgcacaatccattaacaatggaacgaactccaataaagagcatttgaaaaatattagtttgtgaagcattgaaacaaacttcctttaattggtgaccgtaccaaatgtcagaaggagaaggcagcaaataggaaaattttgaggcagagaagaacgacttctcatagtcagctgaacagttataacccattttgaagggaaatactgatggaagtataatcagaagtctaatacacgtgtatatggaaattactaaaaggttaactattaactattaagtgacaccaaagtaaaatatcgacttacctataaggttgcaaccatagagattgaatgctggactcatgccagaagtaacctgaaaaagacataaatatcatcattaaagacatatgtagactgagtgagtcctaaagaaacataagctagacaagatttttagatcagttaaaaatgatgcctttgtcccactcagaggtgtaaaacgagtcaaggatcaagtgaatgtgctcatcctatgaccatccataggtaaagcagagaaatgaataaggaagcaatttcagagtgggagttctttacttaccactcccatttaatttcatggtcaaaagatatctaacttaagtgtataaaaatctactggttcaatgctgacaaccctcttaatgaacctgataaaccttccaagaagtggaactattgtagtagttttagttagtgaatacaaaaaaataacagcaatgaatgatgacagcaacaacgatgataagaattattattaattgtaatgttgataatcatagtaagagaatgatattcaaatggtaaatctggcttatcaactcatgtgcatgcaaagctggagaaatataaaagaggtgggaatttctcagcataccttcttgccacgtgttagacttagcctgatgtgtgtattatcaaacataccattccgaataagagttctgaagatggcttctttgacctgcaattatacattcatactctactgggacaactcctctcaaacttaaggaaaaaaataaatgaagcgaaattcctttttattaagcccaaacatgaagcatatttatatgttatctatgaattaaatatatatatatgcttgagttgtgcaaactataggaagcatacgtcttttatccaagccatatatcaattctagtcattcttacctcttcacgactaggcacattctcgaaagctaaagcctttgccgagtcaaacaacctgttgaatgtaaacttaaatcaattttcatgagacgtttataatgaaatggtatagattgaatcatcattaaattataaaaaatatctacacgtgcttaataagaaagaaattcatgtttgttacatataacttataagtatcacggtgctctgctgaaatgccctgggaacattcttcaattttagcagtgaactctcatgaaattcacaattctaagtgattagaacataaattacagtagtaaaatggaccaaattgtttagtttccctttactaacgattatttgatttcatacttattgcatactgcaattctgacccaagatacagccaaactaatgttaaatatacattttatacatgcatttgtatcaaagccaattttcttcgctgacctatctaaatgctcttcaagcttaaatatctttccatcgtaaactcggagtccctcccaagctgaatcacctccttggacaacagagtcgaacacagaaaccttgtattggtgacgaaatggataagtctctagacattagcacataatagatcttttaattattcaacagttggttacaacacgactcatcttaaggtacctttgcactttctcgtggtagaatctcatcaccaacccatgcaaatagctttgcattttcaggattaggaagatcaggaggaggcaagggggactttagcaaatgtgatgtgtgcttcgaatgacgccgaagccaattgtacagaggtagagtttgctccaatacatcatacagagacaggggaaaaggctgagaaataagaatatagaataagctcgtcaaaggcaccattcttcctaaacactttagttgctattcaaaaccctgataagcaccaccaaaaaagatgcattaaaccactaaagatctaagcaggtataaacaattgatttacaagaaagaaaatgtcgaactgcattaacgaaaacatggaaattacaaaataacatcaaaagaaaatattgctttgattttataagcacatggaagtaatttaaaatgacaaaaataagaaaaatataacattattaatacttcaatagataatgacaatttgtatttcaacatgtttgaaccattggctaagaaacacaaacagcataccacaggatacttcctaactcgttcaaatccagttgatttatgtacacttttgtaccaccacggagcccaaatgccatctactggttttgggccagcttcccatctgaaaaaaatttaaattgaactttatttcatggacaagctactgagtgcagaacacagttgttctataaagtagaaacagcaaatttatgttatatattaaggggaaaatttacagaacatacttaagcattgaggcttgaaaaggaatatccaattcttcacaaagaccacgtaatgtaacctacataaaaacaagattggagtaacaaaaatattagacaatacctgagaaaatcaccgagctcaaaatattcagttaaagttttcttagaaaaaacagaaccgggtgagccttgcaacttctaagttcaagagtgtaatattgttttctttatgtatggctgaaagttaaaattacttagatccaagagaactatatcgctagaaaaacacgttcttttatcattgttgcaatatttgttaaaagatatctaaatgacaaagcatcttgaaaacaggtaaattcataagctatctatctgccatattgctatgctttctgcacggaatttttgagatagaataatttcggtagcttaaaacctcaggattcgcttcaagctcagctgcatcaatgattggtggaggccttcccaacgctgaaagctcaccgtatatactgatcaggcttccaaaacctaactcgttaaatgatggtggcacaaccttgtcaaaggatggctgaaaaggcatcagattaagcaatcagtaaaccacagtaagtgaggattaaaaaactgagtagacattaacagtaaaatatcaattgaaaaaaaaaa

SEQ ID NO: 188393 - DNA, 1771 bp, Cannabis indica
agcccccttcaaactcagtgtgggaagacatgaaacactgagtttgtctctgagaaatgtgaatctgttgctaggaaattggttttgtgagcccatcagcaatttgctggtcagagggaacatgatgcacctgaatctgcttattcataaccttgtcgcgcacaaagtatagatcaatttctatatgctttgtgcgagcatgaaagaacagggttggcagccatcataacagaacttaagttgtcgcaccagatagtaggaggagaagaatgaggcagcttaagttcagagagaagagattgcacccaagttagtctcagtaacaacagtcagcaaggcttctaaattcagcttctgatgatgatcgagaaatagtggtttgctttttagattgccatgtgatgagatttgggccaagaaagatgcaaaaaccagtggtggaacgtcgatcatcagggtcagcagcccaatcagcatcacaaaatgcttgaatggtgaatgaaggagccttttgaatgtgcaaaccaaagtcaaggggtgccagcaacatatctgagaatacgcttgacagcaacccagtgagattggaggggattgtgcataaattggcacactttgttcacactgtaagcaagatcaggcctagtaatggtggcatactgaagtgcaccaacaattgatcggtatagttgtgggtcagaaactggttcacttccaaactgggataaccgaagaccagaattcataggggtgctttgagtttttactccttgcatttgtgcacgacagagaagatcctgaagatattttttctgagatagaagcaaaccagtggcagtggaaacagcttgaataccaaggaagtagtcgaggttaccaaggtccttaagagcaaatttattgctcaaagcagagataagggaggtaacttgagtgggattgcttcctgttataaggatgtcatcaacgtataccagcacataaatgcaactgtgtgtagtgaattgcataaaaagagagtgatcggattgagctgaagtaaatccaagatctgtaagagctgcagaaagtttctcaaaccaagctcgaggagcttgtttgaggccatataaagccttgtttagcttacaaacatgtgtaggattttgaggatcttcaaagccaggtggctgaaccatataaatctcctcttgaagatcaccattgagaaacgcattatcaatatctagctgtcggattggccagtttcgagagatagcaagagtaagaacaatccgaatggtgacatgttttaccacgggactgaatgtttctgtaaaatcaaagccggcttgctgatgaaagcccttagcaactagtcgagctttaagtttgataacttcaccttctgcattttcctttacccgatacacccatttgcaccctattggagttctgttaggagggagaggcaccactttccatgtgttatttctgataagagcttgattttcagtgtccatagccttaaaccactttggatccttgagggcagttttcacagagagaggataaagagaggccatgaggactttgggtttccttataccattcttggatctagtttgcatagggtgagtattggttcctgtgtttggaatagtggggttggggacaacagtagatacagtaggtagatttgggggttcaggcacgggaatagactcagttggagtggaggtttggggcacgggtgtgggagatacagtgggggaagcaatttgaggagatg

SEQ ID NO: 188394 - DNA, 1681 bp, Cannabis indica
aaaaaaaaaaaaccttgaaaaggccttatttgtaaatagatgtgcgagcataccacgcagtgtctatacaatatagacttaagatgcggtggcatcatcataggcacagtggaaagttatattagtgtggtggcacggttatctatgcagtggcatattatgtgtagtatgtgtgctatatgcatgttatattcaatagattatactttcttactaggtcttggctcataggtgctctattgtccacgtaagggtaaagcagtgtcaggccagccatgaggtcgagggttttgatggtgaattgtatgtgtcccggtcaagttagactacgagggttgaatccaatagagagattgtatagaaatctcaattttgttgcttaggtcggcttatatgtaaaaataacttttgatattttaaaaagaattttacgggatcccagatatatgtaactatattattttattttgcattaaaggttattcctattattacaagttgttttattatttaagttaaattgtttttaattagtcacttgacttattagatcccgtttaatgggattagcaccatgtaatcacggcacgtgatgttcctttaattagggaattataaaaaccctccaaactcgcatttcattttagtatttatatttccatccaaaaggttctattaagtatcaaggtggacgattgacatatataaaagtgtccacgtgtcatgttcttattagtttacacaattttaattattataataataaataaataattctaaatatgaaaataataaaaattatataataaatttaaaatacatattccttttttttttcatttttcttctcctccctttcatttttcttttttctcaggaaccctaattccctattttctttcctagacacactctcactctctcttcccttctccttttcgtgcagccactacgcaaatccggcaaggtcgcctccgaacaccttcactactaaaaattatattgttggtgtcggttcatagaatcggcgtctattccacagtgacaaaaagaatattctttggtgtcagttctgaaccaagatttttgggcatttgtgtcgtttttaaactgacacttactggtgtgcaatatatttatttttacactatatgcatcggtttagaactgacaccacaaaaaaacttttaaatctggccacgaattactctgagccaaatctgagatcgaaaataataaaatttacatcatcaaatcctaaagtaaaaatttctcaaccgaaaaaaatctgaaataaaaatatacattttaaaattcaaacaaaaaaactatatattatcaaaaataatacaaaaagattcaaataaaaaaaaataataatataacaaatgagtctacaaaaacatgagaataatattaagacgtgcataattgaggagagatctgtcatggctcttgaggagccatccgtggcctctattttggtctttggtgaccggagttgccaccgttgtgcacatcctaggagagatggagaaaagataaagagagatcaggacagagaagagaggtctataaatgtcgacctatgaacaatgaaccatgagccctgacctatgaacgacattactcgttgactaaaaagacgaactcccgccaagaactgaaccacccaccaaca

SEQ ID NO: 188395 - DNA, 2850 bp, Cannabis indica
tttgtaagcacttcatcgtcaaaaattgcataaatgttacagactgaggacttattttgctgaggattaaaacaaaaaggaaaaaagaacagtgcaacccttcttccaattccacaaatggaatggatttgattttgggttgatctaagctgcccattattaagcgctggccatcttaactagcaaataatagcattgtatctgcaagcttcctttttgggtcccctcaatcttcttagttagctctttgaacatttattcagtatatgagcaccaagttgtggcgcttagtatcagagaaaacattacaacagttacctaggcaaatacatttcgaatgcttccaagatgatacatgcatcaattttcatgatttgttcatttaattcagaagtagaaacaagtcctacaacactttataattgcaattacatgacgataatgttttcattatccaaaacaaacaaggaaacttcagagcaaattaaatgtcaactttctactttctttggtttcatagcaaataatcactcttctgtatataagattggcatatacatacatcaatataatgaggttaaaagaaaaaagccgtagactgcttagacttaatcacaaccagaagaaccataacaaccaggcaactgcaccacatttagattcaaaagaaaaaataaagtatgagcaatactgtaagaccaatgcccaacaatgagatgaaaatgaacagggaaaattacgttttaatttgtctcgcaagttagctgaaaaataagtagtgaataagaatatacctaggatccaaaagaaactcttttggaatgtagttgatgcccaccctcaaatctgcagcagctccaagatcaataatcttgaatgtacgagaacctgctcagtgtaaataggtacatgagtttaagaaatctgaaaacaattgaactttactaacttttactgaccattataaaggacatttacactaccttctgaaaatatgatattttgaggcttaatatccctatgcacaatcccagttgaatggagaccatctagtgcaaataacagttgtcttataattgtttgaataattttgttttccctttccaatcctttaggcaaattttgaacttctccaagaatcatcgtctctacctaaaatttatactttaaaaaattaaaactcggtgtttagaaagttatttaaatacttatatagatcaatagttagttatccccaaccttacactataaaattggcagagaaaacccaaaaaagtatttgattcacagcagtaatagctaaattaaaggcttaagagaaaagcacaaacattataggggaactctttactctgcatcaagtctgcaagagtagactctccttcaaaacgccatataagccaatactcagatcctttcttggaagagctctgcagaagtttcaggacaacaattataataatgggattaagtgctcaagggtaaaaacaaagtgaccaagctggaaatgatttgtcatcttagttaaataatcaaagcttatctggtatggtagaagtaacacctcaaaaaagccgtatacaaaatcagcacagctgcttgcacaagctcttcgcacacgctcgttcatccaaatttctactgcaccatattcactagcctttttcaaaacaaggtctccctccttctaatgaccagtaaaaccacaaatgtaacaaaccaggtttaactatcatacaaacttagaacaattgcaagaaaagaaaaagaaagttaacactcactacttataagtatgaaaatttacattttgtctgtgatgtgtactttgctatattaaaacaagcaacaagttcataagcaaaacctaacaataattacgaggttatgagaaaattgaaattcaagatagataaattaacttctgaactaagaataaaggtcggtcataaatagatgaaaaataattcaaatatttgcaactcagacccagtaactaacaacaacaaactgatgcacatatattcatagaggctttttatcgaatagtacatatccataccttggaagacgaattcttagtcgatgaaactctgtagactgtcccaaaagctccctctcccaatttcttacccaaaataaaatcatcctatcacgccaaaaacaaaattcccaaataaagaccaccatcaaaacagagaaaaaaaaaatcaataaaaatcgacaattttacaccttccggtaagtgggtctgataagtctctcaataaatgcaagaaaaaacatgtcaaagaaacctggagccacaccgggagtggcccaaaggtaagagagagcactcaaagccaggaccgccccaggtgccgtaagcgtcaaaccatcagatttgggaagagtgcttctatatatgatatctccacactccataaccgtacagggcaaccccactccgacgccaagaaatagctcccggaccgcatcgatcagctcaccgcctcctccgacggccgaagaaactcgaaatcttttgggatcagtaatcgaaatcctattgaaattgagagcaagcttcttgcccagaaacggagaattactaatattggggttggaagaggaagatctgtggggatggaggttggagttggtgagaccgacagcaactccaccagccccggcagcaattgcggcggccatacccgttggtggtcggtgaatagataatagtgtaatggattagtgtagtaatgtattggttgagttggattggaggaatgttgttggaatttagaccactagtctttggaaatagtgacagttaattcaggtattttttgtggagggaaatcgctc

SEQ ID NO: 188396 - DNA, 5309 bp, Cannabis indica
ttaagtggtgtgttctggttactaattttgtgtgtttcttcaatgagttttcattggttttttaaaaaatacaggcaaatgcaaaatagtcactgactataaagtgaaaaaagaatgcaaatgacagtaatctgatagtaaagatgcaaatgaggttacaattatttaattccatattgctgtgttctcacttaaaggcttttattgacagaatagctccttgaatttgttgtgaattactaattagcaaagtggtctttttttttcattaaattacaaaaattagtgcataactcgattgttgagttttcggagtttcattctatttacaattttaccatgtgggtgttaatttctgttgttttgtaactttgttgatttgattttacttttgggagttatatatgccaatttacaagtttaatggactgttgtaattctaccacaaaaacaaggagcgaaattttcaataaattgttgcaaattttacgatgtggtgttaattgctattgttttgtgatttcattgacttacttgaatgccaatttatttttcaacgactacattgccagttacggcaagaggataaccattccaaaaatcactgatgcgagtgatcctactctatttcatagtatcttcatgttgcttatgtgttcaggcacatgctttcattcttggacaaattgttgttattgttggtggaacttacacatttctaggttttctttgacatttgggcagaagggtctctctagtttttctttttgtttcttgatttatgggtgtgcattttgcagtcagttattaaccttgcatccttcttcgttttcattattatattaaagttcagtttctcactaacatggttttcttttgatatttttttaatgatcatttaataaatctattttatattatcaggttcgatgtttttgtgacaccttacgcattcgatgggagtcaactcgtagtcgtacgaaggaacgtgccttggtgatgatggaaaaattggtacgacttatctttgttaatgtaaattttttagttttgaacaatttgttaatgtatattgatctttgagatattcgagcttttatctgttgtgattgctggttttgaagtggtcgacaatttgttgttaagggagggagtgatgtctttataacattgtattttgtttactagaatggctattttctctttatgtatttatgtgtgtgtgttgtttatatagtttatacatttatatttatatgaatcaatatatatatatttattgcaattcaaatctcatatagactactcttttaaaactgtttttaggtccaggggatgtatgaatcttctccaggagtggcgcaaaggattccactttgttatggggtctgcatcccaacaattgcttccttacggaagtatgattctcttttattatatgactgtacaacttaaggactttttcttctgacatttgccccttggtgccagtacttgtttagggactatgctgattggccaccatgttattctccaaatattgttatattctccccctttcttaataaatattatttcttgtgtaattgtctcgctcttttttttctgtctttttttttttagagaatatggtgaacttttagttagctgtggtttaattggagaagcattgaagatttacgaggatttggagttatgggacagtcttattttttgttacaggtatggcatcacttaatggattattcaaattacttcatattttattttgatacatcttctgctgctgtgcgtgggaatttcattaaaagtgtgaaatgcatcacagcttattgaagaagaaagcagcagctgttgatgtcatcaagactagattgtctgtaacacccaatgaccctaggttatggtatgttcaattttctttgcctttttatttctataacgttaccaaacgtattgctctctttctctctgtgttttatgtcgatttaatattactttgtctattgagactgatgtatattgcaatacgaagatgcaatttattatcattttgcaagttcttagattcaagcaatgggaagactggattgtgaggtggttctcattagttatgttgctaagttgtaaaataaaataggccacactccatagtggttccacgtaactcataaaagagtaatattacttatttttggaatgatagttttgttgctggtctttttagtcagatgcatttgtgctatatcaaatttgtatatgcttttctataaaataaaagacaacagatagaagatatttataaaatgatcatgaatgtgtttattgaataggacctagtcatatgttagtgttatatctgatgctagtcctatgaaaatttcagtcttgaagtcaattatgtaccaaagcctaataaaccatctcaacctatttcacccattcgcgaggatatatggggtccaagaatcctaaagattagtggggtgcgttggtttttgctatcagttgataatcatactcgggtaagctggacatttctcatgaaagataaatttgaaactagtcaaatccttccagtatttcacaaaatgatccaaaacaatttactagccaatatttaggttctcaaatcagactgctcgtgacttcttcaatggaatcttatggaattgtctatcaaagttaacacgtagacacacctctacaaagtggtatggtagaacacaaaaataccaccttcttgaagttgcatgctctatgctacttaaatctcatgtcccaaaaagattatgggagaagctgtgctcactatctcatatctcatttatagaattagaatgtcgtcacaagttcttaattataagacaccaatgcaaacttcccttactacctattgtcactcacactgaagcaaacttgatgttagagctacaaaatacatctttctttgctactcatcttacaaaaaaggatacaaatattattgtcccattaccaagaaatttttcaactctattactccaatttttcaactctattgatatgacctttttcgaggaccaatcttattactccaattctacaggcagaaaaatgcacaagaatcacaaaattgagattggcatctcttattggcattggtggatcatcatcgaatcccacttgctccccccttcgtgagcctcttatcataacctcaaacaattctccacgagcctgtcttataatcactaaatcccactcctcactccatgagtctattttcatcacctcacaccactctccatgagcctatcttatcatcactaaatctcacttgcccaagcctatcttatcattgttgagtccttcagctaccacaagtcctccctcaaccattgtaagtcctaaccatcacgctcctgtaaagcgccctccaatggaatctaaaaacacaaatcccaatctatactcaatctaggtttacacaaggaggaaaacatcagaacaaatttggtagagccaagaacttgactcgaattcaatcacctttgaaaacacacaagaaaaaattgaagctcttagttttgatttggacagtcctaatgctgaaagaaaagggctgcattgatgcactcagtgtccacttcattactacttgacttactcaaacctattccctttttatagagcctttgcgacatccctggaccaaatgaagattcctaatttttttttcagaaagcccttcaagatctagaatggaaagttgccactttagaagaaataaaagctcttgaaaagaatgggacatggactcccacaagtctcccttgaggaacttaaataattgaatgcaaatggattttctcagtgaagctttaggctgatggaggtgttgagagattcaaggctccttttgtggcaaaagagggctcactcaatcttttggtataaactaccaaggacttttgctcctactgctaagctaaatagtgaatactgtacgagttcttctatactttgttgttgatcaaaaatggctcttgtttcaacttgatgtgggaaatgatttcctcaacataaatctcgttgaagaaatgtatatcgacatacctcttcgttttgaagacaaattcagcaaaggaaaagtgtgcaaattgcaaaaatttctttatggcctcaagcaatcacctcgagtttgatttcacactattcacaagagttgtaaggcacactggaaactcacactggaaactcactataacagattgtatatgtggttgatatagtgtttattggcaaatacgatgaggaaatggtagagttgaaaatcaagtatctaggacaactaaagtaatttttgggaatggaagtggcttggtaaagccaaatgtgtcttagtttctcaacgaaaatatgtcctagatctttaacaagaaacttgagtgagtgggtgtaaaccgacacctatgggccttaatactaaactcagagcttcgacaaagggaccaactctcaattgagttaggtaccaacttgaaggtatctggttaaaacggctacttacagaacttcgaattgagatagagggatcatcttcaaatagtcccttacttagggtaatatattatcccaccgagattatggggctaatatagtcccagtagcttccatttatttttttttaagagatatgctaaaaaacactagtggtgcctagcatcacctaatgtgtcatatctctattggtaaaattaaatatcgagtttcacttgattaaatttaataactgtaatggaatattgctaaccattcgccaaacaccatttcgtagcaccactggtacctaataacaatattttttttataagtataagagagtgtgagttaatatataatacttaacaagcaaatttttaaaatatcattattttactttaaaaatgtaaacattgcaatttttgaactttttttaaacaacattattttattaaaatattactaaattttaaattttaaatcttaattattatattttctttatctgctagaaaattattacaatatagtatttagatagtctaatgcaatctcaattaatagtccagtcctgtatgccaaaagaacactactagttgaaccttttggctttttggtaataatgccatgatctcaacttttctctgttgggaatctgattagatttattattttatgtaagtaaattgtatgctaagcaagagcacaaggtgacagtcctgaattttgcaactatgtcttgtctgaaatagtgataacttggatcacacacacacacacacaaa

SEQ ID NO: 188397 - DNA, 3037 bp, Cannabis indica
aaaaaaaatacaaaatgaaaaatgcaattggaagagaagagagacaacaacaaacttaaaaggattatattattactactactactattattattattattttcagattaccatgtttaaggctctgtgagaggcagggtaagagtgcttatagttttcttattattaaagtaagcttagtgtgaagtgaattataggacagcttattgggttttcgaaacttaacaacagtattaatttttcacagctggacaagccggacaatgaatttacttgccaaccatttattgtggtagattactctatatcaaaggtcttttacttgaaaatcttaaactagaaaaatacataatatgtaactgtacagagagacgatgatatctgatagcctaggatgagaaacaaataataacagaagatgtgttactgccgtgaaaaaaagacctaaacttagaatttattcaaacatcagagaaaaatgaaatttaagcaagattctggtgaaatagcaaaaggcaatgcacatttgggctgaagggctgaaagagtacctttcagcaatagaacgagctttttcaacgtctgccatggttgactcagcaaattccatgaattttatccaccaatagctgttatttggagaacttctaacttgtttctcaaattcctcagcagttcttggcatatcattttccagtaatctttcttcagcagctctaatttctttctccctgcacaaaaatatttcaatattaaaggtaaaaataaatagggggatttggggagggtggagaagtttcaattggaaaaaactacaaaaatgtgaagactaaaataacctctctttctttgctttcttctttgcttctctcttgctcttttcatctagggtgtctgtaacatttataagctcttgattttgaatagttataccatccacattttcctggtatatatcatcgagggccacttcaagtggaggaacaaaagccctggattccgcttgtgcaagaatggggatttccaaatttaaacttgggcattcaacatccatattgtggattccttgaaaaccactttcaggtaatgataccaacttagtatcatttacagaactgttgttaatggttgcatcagccacttggtctgaagattcctcagcatcatcattttctagaacatagaaattcttcattccgagagagattcgatttctttctgcatccacctaaaccgaaagtatattgtcagaacataaaattaacacattctgttttattgaatatcatacaatcattttccaccaaatctaaattgcaattctggataatccaaaccatagcaggaccgacattagttctacaatgatcaggttagataataaacgattcctatcttgactacaagtaaaacacaaatgtcgaaatgcatagaaactgatgtatcataagcctgaatgagaattagatttaccttcaatatttttgctctcactttctcacgtgctttgtatttgctttcaatattctcagtacggtcatctgaaagctctgagatatggcacaatccaacctgaaaataaaagaaaaattaaaagtaaataaaagaaacacatcaaggcatttcacatagtaaataacaagcaaccccaatcgaattccacacactgtattgctctgtacgtagagcaatccaacagattcccatttctattacaattctaagtgactttacaaactatctgattctatgagaaacaatcttgtttcaaaataattctagggaatacttccagctaggtaataaagactggaaggagtaggctgggcaaggaaacgtcaatggagatgcaaagttagttaatatgaggaaaaagtgatatatcaaaatggcattggtcagtggtcaagaaatagtttacagaatcataagatcctccagattacacactctgattacatggatcttcatttaggatttactccaacccacgcaagatagggggaaacaaaaacaaataagttggttgtgcaaataaatttccacatgttgacttcacagaattactttctcattttcaggtaaattttaaatgcccattttcaggaatcaaatcacaattataattatgcaaaagtgacttatcctgtaccaggttggtgttgtcaatagagataaataaaccatacttctccacccgcttaatcctgccagaaataatatctcccacgtgcaggctacttaaattagtaatatctgattttggtccactgcttgcacccatggtcttcaatgtaacttcaactcgctttgatagaggttccacagataaaatcctgtatcgaaactcttaataaatgcaacccgtattcatctgctaatagaaagaactttagacaacaactgacagatgaagaaattgacttacctgccagtcacaagtttaccaatggggaattctttgacagggtcatcaacaaatccatcagataaatttgaaagaagaattttggcatcaagtctccgggagagaaaaatgaaacaaccttttggagtaacatttttaacataaccctgaaaagcccaataaattatttaagatgacatcggcataatattgtagggcaatacatgatacatgtattttataaggaagagatgttttacagcacctgtatctccatattaggatgaagatcttcaatcttttccacacacttggttttagtgggcctgcataggtaccagagagtaagtagccaaatgaagaagaaagaaattaactgaatggtatatttatgtattaatacttttatttgttaattagaaaaaaactaaattagattgagctgcaaacaataaggtaatctttgaagaataatgaaaacaaaaaacctctgccacacatttggttacagtgggcctgtatagataccagtgagttagtagccaaatgaagaagaaagaaattaacaactgaatggtatatatatgtattaaaacttttattagtgatagtaattataataataataat

SEQ ID NO: 188398 - DNA, 3343 bp, Cannabis indica
attttttttattttttatctaataaaatttcatttaattctttattttaattttttatcttaaatttaaattatattttatttttatttaatatgtatattttataagaatataaatcaaagatatattttaaaaaaaaaaattaggaaaatagggcgccttaataagattttgaagtgtaatataattttaaaatatattttatttttatttaatatgtccctccctcaattattgcatacaacaaggtcacaagatacatgggtcattcttattaattgaagtcttcacattacttttcttttaaaaaatttaatataaaaaagaaattatatagttggcaaattagctttttattattactattgttattatataatttcttaattaattttagtcatcaagtacaatatcaatcaacaaacatggtggaatattctccaatacacaaaaaaaaaaaagtaagctcattaagagcttactttaacaattttagctttttatttgaataataatatatattttaagtaatattttatgttattttagtcataatttatttcatattattttttgagaagttttttttattattattattgattattagtatcactttcttgaacttctttacatgatttttctttcaacaagaaactcacattttttgtgtgactaaaaatgttctttttgttctaaaaaagtttccaaatagactcatttcttttttagtaaccattttttcatataactaaaaaaacattaaaaagggactatagttgaaaataaccattttaaaacttaaatataaaaagtaattaattgaaatagaacaatttttatagaccatgattgaaagatttcaactaaatttgaatcattggctcacatgtcaataccaagagattccttatttttagaaaatatttgtacttctaattcacttttattgtttaaatagaaaacttagttttggacattctttattaatcttatcttaaaagagtatatgtttattttaaaactatattcccaatccaataggacttttgcaattataactctaattttaaaattatattacaatattcaaatagttatttaaaattatttatggtatcaaaatcaaaattaaacaattgttacccacataattattttttaaaacaatatatatttacgtacaataaactgtttaaactcttatttcgactctcacttaatgtttcatatttccttaaaatctacaaaatcccataaataactaacactaaacatcattatataaacacaattagatattataatttttccttaaattgtgccaaagaattttcaattatcataacataacaatatgaataatcaaatccctaccttcccataaaatttatattgacaaataatatatacatatttaaataaagaaacaataaacaaacaaaaacaagggaagatgcattgtctagttggactttggtcatagattaaaaaaatatatattataataaaattatttctttttatataaatattaaaaaaataaaaagggttagattcatagtcaaaaaagtgtccaaattattaaagaaattcaaaaaggcaaacttaaatccatatggaaatgtttcataataaaaaattactaaaaagcatcactgatacttagcatctttctcgaatcatactattattagtataattaaatatcaagtctcatataacataaaaaaaaaaatattgttaaccaatcataaaacaccacttataaaaagtattaaacaccactggtatccaataccaatactactcgtaataagagaagaggtatgagttggtttgaggcctaccatttaagtgaatcccacatggaacataaataaacatgcatacctaaaacactataaataaaataaaatatatatatatgtcaatttttgtaaaatcttatgggtcccttccgatgtgggactaaaaatattgaaaatcgtctgactatcattgcacttccaatatcccatttccttaacactcttctttcactcccttgccctgccgacacttttttgtataatttagttatactataacaacatcaaataacaaaacatatacatatacatatataggtgtgtcaaacaaatatatggttatatggttactacaactattagattaagattgaattgatctaaagtaaaaaaaccaaagtacatccaatcgaatttagaatacatcaaaatggaaatggatttcatctgtcgcgaaaataacaaaattgaattagtacatcaaaccgagtttagagtacatcaaacaaagtttagaatggttttgttctttgagaataaaggggcaaaattcattccctatatgtgtaaatacatagtgaaactttggatatgtatagtaaaaatttgaacaaatgcaagatatacaactagttttatacatgtgtaaaaatcttagaattcataacaatgtaatgttcacctaaatatatctccaaataaacaagcctatttggtattgaaatacaactttgagctatatatatcaataataaaccaaagattacaagttattacatttaaattaaaacaatcaacaatagcccttttttttctttcacttttctctcacttgaaaattaaatgaaccaccaaaaccaaataaactagaaaaataaagaaagatggtatataggaatatgaatgatgaagctaacttaaacactttacttgctaatatctctaagacaaaaattaattgcaaacaaggacaaagaaagaaaagaatctatataagagaaatttaattgagaataataactaacttattttgattttaggtagttttgtattgttttttttttttggtttttttaacctgtatttttgacaccttgaatagcttagcttattctccttcctttattttttgagctttaacttagcttaacttcactactaactagctcatttgttcaccaattagatcaagacccaccaagagaaatgtcaccccttggaaaagcaagaaatagaaatgtactccttgagccgaaagaaggcttctaaaggcggcggtgagtagtaagaaagccaaagttagctcctttttgaagatcttgttcgtcttttttgtaggagatttcgggggagtagcctcttgatgcccttttaatttgtttagttcggagagaccactatcagaagttcctctgaggagttgagtgtgatgattcatcgcttttgattctcgctcctccacggctaaaaggtcagattctgatgacctaccggcttttttggtgacgacccattcgtacgagctacctagt

SEQ ID NO: 188399 - DNA, 1507 bp, Cannabis indica
tagagagtagcatatgccctcacaaatgggccttttatatggatgccctcaagcttggcgagatatggaattgaatagcctaaattcttaactttagtcgattttgatgaacgcacatgatagataccaagaaaccatgccaatagtggaggagagggtagtggccaaaaatgatcttcataaacataatcttccatgaccatgagctcttttacatgaggaatgaaaacatactcttgctgattttttttaagaaatgagtagttttgttgtgaaaatattgcatcatgatgaggagagacaacatttagcaaacttgaaattcttgcttactctttcctttcttcactagtttggattgaagactgctcccattggagctcaaaattttcctcacacttctcaaactgttcaccattattccaagtgagtttttcacattcttcttaatcatctagacatatattttgcatatcacttggtaagacatcttggattctattattcaactccttcaataattcctcaacatgtgcttgtaactttttcaaggatgttcactttgttgaagaaaagtgtcatattttcctgtattttttttatatcttttccatgtgcactcttaataattcctcccataaacttggttgtggctcctcaattgaaggtatttcttgaaaattcacctcccatggtccttgagtgtaattttcaaaactattctccatctggctagaggtgttctcccaaaattggtaagttgtttgagaattccaaaaacactctccgccatgtcctctaacatccaatagggttcatcgatagatatttggtagaaattcatggtaccatctactctttttacccattctcttgtggttggatgaagcccatttatgaagacttcaagtacacactctctagaaaaaccatggttaggaaaatcacattagcaaatctttatatctccagattgctctatgtaaaggctttgagtcatgttgaatgaaagtagcaagtacttatcgatgatacatcttaagttccttgcaagagaaactaaaacaaacaaacaaaacgtaaaatagaataagaaaaataaaacaaaacaactaaaaaactgaaaaccaattgataataattatgttccacaaataaaatttcacaaaatcaatccccgacaatggcgccaaaaacttgttctaaaattatatgtgcaagtgtacacaatcttcaaacaagtaataacgtcataaatcgagtatcgtctctccagggattaaaaattagaaattaattcataaaactaacttttcacaaattggtttgaacaaaaataaaataaaatgattagattatgtaaaaattaacaaacacaaactatgagacgaaaataaggtagaattattaaattagcgtaaaaatacaaaattgatatagtggtacaaatgaatattattgtaaattgatatttgtcaactagaaatttaacatgtcataatccttt

SEQ ID NO: 188400 - DNA, 2914 bp, Cannabis indica
tagtaaatccaatttttagtgtacttcacaagttcatgataaagacattaatcgtttaaaagagtaataagagtactactgtactactatcaataataattatccacgacttataaaggacatcacaccgaaattatttgaattgtatttatttatagctttgtcttatatatgttcatctagaaaaaaaaaatcaaaggttttgaatagctattgcaatttgcacggtcataatattaatcagagataactatttctcgaaagcaaattgtacttgtgacgcttaaatgtattttttttttttaattgccaataatagatcagaaaggaaattgcacagagtaacttaatttgtgtactgtgcctgtgtgaccacacttctcacgacgaattatatattagttcatcaccacaagttatcctttggtcaccttctcttaattatcctactttttgtttcaacatacttcaaactacctatggtatatgatatgactatatatatatatcaaaaaggaaaaaaaaatgtttgtgtttattataattattgtaaatgatataagtttcaaattcaatggtatatataagggtatgacgtaattacgtaataattcaaactatctttttttgatgtgaatatcttaatagcctacaaaagtatgaatataaacattactattataaacattacacgccctaaaactgactttcattgaagtatattaaatgcgacatgaaatgataatttaagaatggaccacctaatcgtcttagctggaatgcagttggggaatggttaaggcaatgggtcccaattggggcccgcaagccacacttcataatttcataatatgactagtttttaatttttctcctacttttcattacgtcaaacccattctcacattatcacatattaatttttcttctacttttcactccaaaatatgactaataatacgagtaaaaacagaaactcgatcgaccaagaaaatctctcccatcaaaactataaccgatcagcaaaaaagttatagttttcgttaccaaaaagagcaacacttgaatttataatgtggcttccatgttccataccaaagttaattaactagcaagactgtgagtaagaattataaaattattattgatcaataatcatgacatcatatcatggacgtgcattattggaggatatatgtacattttataattaatcttcaattaaattaattatcattatatgaaatggtttttaagagtaataataagaattaataatgattgagagagagaaaaaccttgcactgagacatgaaatcgtgatcagactcccggtccccaataccgatatccggcgagtcgccaccaaactctttctcaatggcaatcttcttccatttcccgaccaaaacgccgggacttttgacgaaaccggtggccttcttggtctttggattcaccgcgatctccgttcccaaaaccttggtcccgccaagaaattccttcacgaacggctccaccatcaacgtcgggttggctgtcacgacaacctttctttcacacttgtcgaacacatcgaagctctccgatctcacatccgccgcgtaaaatctaaataaaaataaataaaccacaaatgttatcattaacaatcaatcgagtacttaattagggattcgaaacggccgatcgagtacgaacctgggcaagacggcgcgtgagacgagctcaatatctcggatcttgagaccggcgaaagaaataaagatgaggatttggattcccaaggcttctgaaactaaaaggtaggcgaagatgacgagaggtagagagaggagaaggatgaagccacggagtagactgccagcttcaacggctacgagcatgaagtaagggatggagcttctggagatgagaagcgttccatcgagatctgctgcgatcgaaccgtaggaagtcgtcgtcgactcattgcactttgtaatcggcgggaactttttcgccgtcgacgacattgtttggagaattctgtttgagaagcgatgatgaatactgaaactgagaggagggaacgttggggttttaaatgaggcagttgtgcatttcaaattaccaaaatgggtctcaattcttaccctttttattacaaaaaaattctctctctttctcctctcttctataattttggcaattaacaaatcggtccatttctttaatttttatattagaagtggccattttagatgaattctacaaaatgaattaatgtgttttttttttttgttcttaaagaattgctatctatctttttctttattttataacaatatagtttgatttggtattatacaattttatctattttttgtttatgaatcataaatcttaagaatataatgcattaattaatgtcggtcatgatcattaagaatgtttcatgaaaaaaccgactccgctcattaaaatatatttgataattgtagttgaaaaagacaaaacaatggagatttacgtagtgcatgtatatatatctctgtttgcaaatatcataaccctttggtttaatttgattttacaaatattaataattaacaaaagtttacttacaataaaataaaaaataaaaatcagtagctagaattgaaaaaatagagaaggttgagtgttggaagttggaaataggtaactttagttaaggatagcaaaatacttaaattttctttatagttagttggggtagttggaaaccttgaatggcttaaatggttaaactgcttttattggtggccatactttcttgctcaactcattaaaatattaaattaaaccttttcaaataagcagctaattttttgaccttgcttttatgttttttatttttaatttcaatggattgtctaaatatctaaaactt

SEQ ID NO: 188401 - DNA, 1302 bp, Cannabis indica
tttttaataaaatattaaatatattaggtattatttttaggtaataattaaattttttaataaatgataataaaatacaaaatatgatattttttaaaaataaatttagaaaatttttgttaagaattgtttaggctgtgtgaggggtcttgggtgttctactgttctacttttgagccggccttgatgataacatgtttatttagtaatagatttcaaatttgaaactaaatactctagtcttaccaattaagtctaatagtcgttcttacactatttaaggggttcattagagtgtgaaaccattgatcacagtattactttctttatagttgataaatgacgcatgtggtatcaaatttaacaaatttttgagtaattacatcattgcatagtaattatattttattttaaaataaaatatgtttgaatattaagtggtaattatatctgaatttctattatcatgtttagcaagatagtttgtaattgttatatccatattttgaacagtaaatgaatggatttattcacatgacatgattacaaaatactaaatgacctcctcgcaaagagaaaacatgaagagaatcttcttgacaaatatcaaatatgtcatggtgatcaacgaggcaaatgtaccatcgaaaatgctcacattgcatatcacaaagaactaagacataacctacacagatagaaaggtcaagttagttgcgagatgaaatgtatttaactcagctcgcataaggtttacaacttgaaaatgcttacttatgaggagaagaatccttcagccaaacctcattcttttaagcgaccagcaagaagggttagtccatccccgttattcgtgaggaagaccacgattcaacatacattaatcactcaacgtatcttccgagaagtaatgaagctacttggtgaaaatatgatgaatgtttaaattacaaaataactgatattaattttatataccaattgaaaaccgttcccatcaattgagaaatatatgaaacgtggagaatgtccacgtttgataactgtattttagataaggaggaggaggtttatatggaacaacccgatgggtttatcctaccaaacaatgaacataaagtgtgtaagttgaagaaatctttatatggattaaagcaagctccgaaataatggcatgtcaagtttgacaatgttattctttcaaatggctttaggcataacaatagagacaagtgtttgtattcaaaaacttgtaaaaatgatgtgataattgtttgcttatgtggatgacatgttaattct

SEQ ID NO: 188402 - DNA, 2781 bp, Cannabis indica
aaactactttcttggtatttttttcggtgataatgtcaattctaacgacttttctgacactggcagttactccagcaactttttcaggaccgacaacaaacttcaaaaaatcatcgaaattggcatagtcgccagaaaaattaccaagaaactggtttcttcatcaagaaacaatgccaattctgacgacttttatgatgtcgacaacaacttcgatgacttttccgacactggtagctactccggcaactttttcagtaccgacaacaaactctaaaaaattcgtcagaattggcgttgtcgccggaaaaattacctggtgatttttttggtaaatttttccgaagataatgccaatttcgatgactaaacctaaacctagttggattcctataaattgatagtgatggcctcaaattgaaagatgatgaacacacttgccttcagtcaaaattttgagccatctcttctctctattttcgaatcctccctctctctttctctcttcagtatttcgaaccctatagtgatagagtacgtgcccacacacatcaagtggtactcaatcatagtttgtaagactgtgaagaatccaaatcaagagaaggagaatcgggctcagatcttggtgatactctgctacagaaaggatacaagggttggagatctgagcggaaggagtcatttaattccgctacacccaatgtaaggtttctcaaactttatatgtgtttaaattacattgttttagaaattcatatttaggatgttaaacaacatacatgatagtaaatctagatcttggtaaaacataatccaacatactttactttggcagatagagcaataggggctaaaagaaccaatctggtgaaaagattaaggttagaagggaggagatgactaaaagccttccaaatgaagtgctttatcttgggagggatgttggaagaccatacaatcttccatcagcccttgaaggtgttcgagatagaagaagaaggagcagactggttagagttggcaaggtgataagctgagtctaccataagcataccagaagggtcatgtccccaaatgaaacagtccttggaattaggattggtaggcacacagaggatggagtgaatggtatccttgtcaaagtgggaattgagtttgttgatatcccaatggtcgtcctccttaatgaagtaagaaagagtactaataggaggcaaagaatcatctttataagaaatatatctatgatcaggcaaccaattaaggctaagggtaggaatatttttaccatccccaatctttcagactaaacacttagagagcagataaagaaggctcctccaagaataggagggagagtgacccagggaagcattgaggaaatcgttattcctaaaatacttggcttttggaatagatgcaagaagggaatcagggttgtggtagatcctccaagcttgtttagccaacatggcttggttttggtgaataattgtacgaaaaccaaggcccttaaagaatttgaatttgcaaagattgttccaggctttccagtaaattttagagtgattgttccctttagagccccacaagaaattagccataagcgtttccaactgcttacagatagaaaggggaatgctgtagcatgacatgacaattgaaggaatagcttggattactgctttcagaaggacctctttgcccgctttagaaaagagcttagagttccatgtgctaagtttagtgttagctctttgaagaatgaagtgaaaggaggactttttggatctcaaaaaacattgcgagacccctaaatatttatcaataaaaggtttatccaccaaaccaagaagtgagagaaaggagttcttgttatgagaagtggtgtttggggaaaacaaaaccgaggacttggataaattaaccgactgaacaatggccttattatagatacttaagatatctttaatagtctggcaattctgataattcatctgagtgaagagaaggctgtcatcggtagaaagaaggtgagttatagaaagggtcgatcgacaaatgaaaatgccattgaccaagttagattgttctttagactgaatgatggcagctaaaccctcaacaactagaaggaagaggtagggagaaaggggatccccttgcctgattcctcgggacaataggaggggagagcccattattaatatagagcttgaaagagacaatcaaaatgcagttaattatgagagaaacaagagtatgggggaaaccaagatgaagtaaaatgtgcttaagaaaatcccatttacctttgttttttttttttttttaaatattacataataattagaagaaaaaaaattacattagactaaaaatttaaaaaaaaaaaattataaaaatacatattgacgaaattttttttatatacattataattatttaaaattactataatttttttttttgaataattaacagtactgaatgtaaagtttaattattttattgtaatcatgattattttgtcttatatacgtagtaaataattatttaaattttatttttagtagtaaattattttaaaatttacaagtaatcttaaataaatataacattcacaataataaaaaagattaaattaaaaaaactctcttaaatactaaaactaaactctttcaaaaagtactatatttttccaatagttaaaatgaaataattttcttttaatgtttgggaaatgagattaatttgaatgatataaatagtatgggg

SEQ ID NO: 188403 - DNA, 2564 bp, Cannabis indica
atttgcttttttttttttttcaagatctgaaaatttgcataactaaacgacattttgcgaaggatccataaaaacttatttttagataaaaaaaacaatggtcccatcaaaacataattttagaggccaaatatgatgcccaatgtcgtgttgcataaaatataaaactctaaaaagatttagtgagagttaacttttcacggttttgaaaaattatgaagcaccaaaacttttatcaaattttatgcaaaactttggcgacaccatcactagaccatcgcaaggcaatgtttttctagggagcatcacggtaccatgatggacttttttctctttttttttttcatataaaaaattgctcgaattctacaaatttcacagattgaaaaaaacgctaatctaactaataataaattaagtacaaatatatttgaaaatcagaccatcaacaatcaactataacttgactatacgattttaacagactttccgacgagtcattcacattcacattcacaattttgaattgatccttcaagtcaaactctgtattttatgccttaatttgaaatgctaaaacttccagaagatcaaatcatcactcgtaaataatcgtatgacaatgtgataaaagtgtgaaatccatttttcctttacaaagctataacattataatccaccctgaaaaaaataaatgaaaaatttctctatccaatcagttccgtgtttctaattaaatatatttaaaaaatctccaaaagataaaaggtttcctgttaacaataacaagaagatgtctcaaaagttgaatttcaagtgaaaaagagctctgcttttgtcgttgcctttttcccttcaataataagaaacaaaaatcttgtaaaattagtagtccagccatatgatacaccaggttatgccgactccaagcagagaacaacttgggaaagttaaggacgccacccagttttttgcacgcaaatgatcccttctttatccttagcataagtcattcgaatgtcccactgcaaacttttcaaaatcccttctaaaggatctagtatctcaattttatcacgtataattacccaacctcctggccgtagtatccgatccatctcaacaacaattgacactggctgcttacacctgcacaagtagtaatttccaagctcaagtgataaacacaattaaaaaagttgtcagcatacaacacacaaaagcaacaaatatgacaaaggcgaggcacatcatgtatatcacgttatcaaaggagccccattacacccaccagtaagtaatgtagggagctacagctacactgggacaaattcatcccaacagcacagtggcagtggccccacctcattgggttaccttgtcaacttatctttaaaacttgtgttcgtcaatttacaaagtaatgccaaactttataacccttatgcagttattgatttgggatatgcagatattcccagcaatatgaatctgaactactctggcattggtgtaattatataaataagagggtacaagggtcgttatattgggggtagtgaggagctaaaatatgatagtacaagtaagaaactatgaaatgagaaagacatgatgagaatgatattgtaattgagcagtagctcttggagagttgaggtctctcgaatacctcattgttcttgtgtgttcttatcagatttattatccattagtcaatatcagatatgcatagttaattctattgccgtccattctcaatttcatctatgaaatttcctatcatctcccatactcattgaagatcctagttggggaactatcagacccattccgatccatcatgagccttgtcgatgttggcaggactcctcttgttgcagaatatcagcaagcattggactcgatcccatctgaccttggcagacgtgaatgaatgctccctcagctcgatcccttcagttggatgcaagactagctccttctccgtaaagaaatatagtcgtcatcgggaccactaaggctagtctccattcaatacatggggagtagccacattaccacaaatatcagaggcagtgcgcatgatggacaatgttgcacacatcagagacagtgcacatgatggaaaacattgcacacattgatgagatcgttccacttgaagaaaacatcctcttgtctagcattgtggaggcaaaggaaatatagaatccattgggattctctagcaaagtcacaaaaattggtactttcgtattcagcgtgaatggctacaaagaactcaagattttcagtccatatatatcgcgatccattctcccataaccacgcagtggatcctcacagtacagtgaagactcgttgtacaccaaagacgacattatttgatccgtgggatgacaccagccatgataccttctttgatatactgtttctgagttggttggggaaccatggtgtctcctattggcagaggagctgtgtcgtcaatcgtcgtcgacaacgtcaggggagatgttggttatactacccaagcatcgtagggatgtttgaggctttca

SEQ ID NO: 188404 - DNA, 2595 bp, Cannabis indica
ggttgctgaagtataatccatgaatgagtttgaagctttaggtataaagcttaaattctctaatggtgatttgtgattgttgggttatattgtgttttgagcctatgaatctgtttagaatacatttgtacaatgttcttcatagtttgagcagttttggtaaggattggttttaatttcttaagtttatccaactaattaaatctagtattatctactaatttccacccgcacacacttcaccaataaagaaaaggaattaacttaaagaaaaacttaattaaaaggctatttacccactaacttcattcttaagtaattcttaacttaagggtaattttttcataactaattacctcaaaatacctcgatacacaccatattaatcatactcaacaaaaccattggtaccacaaattaataccgttgtgatatttctggccaccgataggttctccacagttgttggacctaaaaatattttattttaccaatatcatatatcatacccacatattctaattaaatcttcctatttaataaattacacgtatttagtcatttatatcaaaattcttagtgaccatgtaatttggattaataagattataatcctacccataatactcatgacatacttattatcccatattttataaaatattccccaattattaaaattagatttttgggattttacaagaacaatcaaaatgccaaggttgtccctcaacaactctccatcaatcaccctcacaaccaaaacagaccaaaacaaaatccagagtggtaccctgagaaagtaaaaggaaagcaagctatctaagcatccttcatagcattaccaatccagtgaggctaaaggtttttgggatgggaaatttaaaaactaaacaaaaacactcggattgaagattgcaactcagagagacatgatcaaaatcatgaatcaaggcttcctctttagtaagagtgaggctggagctagggttttgagagatattgctcatggtcaaagtgcaggaaaaactaagaaaaaagaggaaaatatattggtaaagaaaagaatacctagagaccaaatacaatcttaaatagaaaaactaggaaagaaagtacttgaagttgtagagcttcgtaggtggtaattgagatgccaaatctatcctacataatcttagcccgaatcctccaaaactagagttcttaaatgcccagatccttccaaaaatataatcagggacctttaattgtgagatttgatgcaaggaagaagaggagccaagagttcttgagagtaataaattagagttacaacatgatgtattatcaaatattaataaatgcaaagtaataattatatgagggtaaaaatggaagaaaggattagagggatgcatcatgaaggaagaggagaaactggtaaggtaccaaagtgaacggggaaagacccctagagagttctagagcaattttcttgagtggatagctagcaagtagttgatattagtatgagttgaacctaatatactttagaacaaatgatatttatgaaaaattattatattttatttacaaaataaataaaaaaattcaatattttttatcaagaacacaagatactgtattaaacttgtcgtggaacaaagatacacatggaaggaggagtttcttccaagaaagcttatcgtctagttaaagggcatgctataagccaatccatgagcctcaatattaaaattgcgattaacatgaaaaaaaaaatacttttggaagtttagacgacaacactttaatgttagaaaatataactttttaactcaaaagtgtactcattagagatattcaatattaaaacaaagaacaaagaaacaagatagcttaaacatgcggagatcaatggtacaagccaatttaatcccatccaatgtgtcgtgcataacttccgcttgaagtgctaaaagactaccactatatcatagataaaataccaaaataatatctagcatccatcatttctcatttctaactgacacttagctaatttaagtcatccagaccatcagttccagcttaaatacaaaattagtttcattggaagtttaataagtaaaataagactaaactaaaaatgactttcttcctcgacaataccatcctcatccactagcatcaaactaagttcttagaatgggagaaaataaggggtgagcttataaagcccagtaggaaaacaactaatatcaaatgaccattggtttaaaaaaattcatgcatggttagcttttaaaataaaatatctcttcaccattatcaaaatataaaaacaaagtagagatatcacaaataatcacaaaatcaagcgtcaaatgcatatcacatcgtccactagacccctagctctcaataccactcatagaaaatgacatccaaaatcgggtagtcgcacttgataaccactataatatcagggctcggattctgttcactccctatacagattataggtctttcacctacgggtgagtgcacatctgatctacctatgatgatacagagactagaccgtgagacaataatatgcacaaatcatga

SEQ ID NO: 188405 - DNA, 2322 bp, Cannabis indica
atatatagtaaattgacattaaagtgaactttatttttgtcaagttatgtatgcattaaatatttaagtcgcgtatgtggttggggtctcaatttgggtgcgagtccaggattaggatttaagttcgaggccaggtctaagtctagactcagggtcggatctaggtccaggtttgggcttgcgtttggggctcgagttcgagcccgagtctaagtctggtttggggtttgaggttaggatcgaggctcgggtctgggtctagggtttagggtcgggctcagagttcgggtctacgtttcaattcacagtccaggtttgggtctaggtccgaggttggagtccgagttcggatcggggtctggttctgagtccagcagatcacggtctaggtctgagtttgatttagggtccagggccagggagcaggtttaggttcgagttcaggtctaagtttaggtacgagatccgcatccaagtctaggtttgggatttggttctggggctggggtcaagatctgagtgggttcggggtcggggttcgggtccgtgtttgagtctgaggttggggttgggtccaagtccaagtttaggatcggggtccaggttcgagttcgggtctgtgtctgtggctcgagtttgggtccaattctaagtcaacaagcttagttagtttctaaaagcccctacaaccttacattggcaagcatgtaaaaagttactaaagtatttgaaaggaacagtaaatgaggagaagaatgttattcggatgcagatttgacaaattgtgttaatgatagaaggagtacaagagactatgttgtgtacttaagtgggaacctcatatcttggtctgctaaaaaacaacaagtagtggcaaggtcaagcacagaaagtgaatttcgtgctttagccaacactgcagcagagatcaagtggattagttctcttctacaagagcatcatgctcctttgtctcagtctccaatcatctgggtagataatcagattgttgcagctcttgctgcaaatcttatttttcatgcatgatcaaagcatatatcgagattgatcttcattttgttagggatcaagtccttgcaaagcagctctctgttcgatatgtccctgcatatgatcaagtggctgatgtattaactaagtctttgtctactgacaagtttttatatcttatataagttcaaacttcaaacggttataacctcttttcgtttgagggagaatgttaaccgtgaagttagttagaagtatggttacaagttagttaggttgttggtttattaatcacagttagttagtgattaagtctgttatttctccttaaacttgtaatctttagtgtattataaataaacgcctaagtgtgagggtgcattcggttgcattgttactccacaaaatatttcgttctctgtgttctttgtgttcttgtgctatgcacttaatccttattcatacaagtttgcaacttgcacacaaaagtgattaaccccaatccacatagcactatttttgtgagtctattagctcacgaattacaaaaaatatgctctctatattgccatacaataacaaattcttaatatgatctaaaacaccgtcgatatttctcttttctatataattagacaattttaagataatcagacgctaatataagagaaattaatctatatatatatttttataacaaaaaaaaaaatactaatgtttagattaggtcatctccctgccgttttcctcaactctcttattttttttttaataataacttgtatatactcatgacatttttctttttctttatatattattgatgatcactatattatataacaagtaaaattatattattgttggataagataattataacaaaagaatatgtgtgcgcactttgactttatatatgtatacaattatacatatatatatatatatataaatatttttttttagtttgataagtcactattaatagctttgacttaaatgtttaaaaagttcatcatcatctaaaaccctttcggctataatactactcatcatgttattaacattcaaaccaataacttttaatcttaatttggattatatatttataaataatataattatgaagtggggctgtggatatatatacatagagtatatatatatataatcaagaggtggcttaatagtagtactttttaagtatataattaattaattaagatagagtttatcatgttatatattttcaagttatcgtcatcatggtagtcatgatcatgatcatgtaagatttatatatatatatat

SEQ ID NO: 188406 - DNA, 2236 bp, Cannabis indica
gttattttgtactgctccagacaggtgacttgagctattaggttttctttcttagtaaatgttgtgcttacattttgtgaatgtttattgtgttttcttaaaattttattgagtagtgctgtcttaatattttcaaattttaaatttcaggccttggaacgaagctccttacgaggatgctgcagagagaaccgctctgggtaatttatctcttaatgggtttctgtctgaggtctgtatgcctatatagcctattcattctcatacttcgcacagcataactggttttgcctttttcatatttattgtgtttcttatatgattatcattccatgatttccatccccaaacaaacttaggaaaaccatgatgaaacagcacattctatttcaaaattatagtaatatctctaaaccattattaatacacaaccccctataaatagtcaaatttaacaaaaatttcacctttgtcctattttcatttaattgggaactttatttatttatttttttaaaaaaataaaatttcctacccccaagcggggtgtatgtgtaactatttttgtagttttggcgaaaaactagtggtatctgtataatctatgcctaaaagttagatgtcgacatgtatacactttgtagtaaatataattagccacgagtcatttacagctcaggcaattttacgtttttattgtagtgctatgctatctggagaaattgaatcataatattatttataagataaaatatttgggttgggaggagttgggtgatgggtgttgggacattcttgtgaagctaaatgatttgtttttatgttcttcctgacatttttgtgtacataagatatatctatattcctttattggttttcctttccattttctgatgatatatctctcaaaaaggaaaataactttattctactaagtcttttgtaattatacatgatcatgtgattgcagtgggcccttatgacactactagatccagtgcgtagtttggctaatctgatgtacattggatacagtggtgatccagcttccgtgctccaagttaatagaagaagaataaaagatcgtaaagtgcaaaacacagaaagaaatgttttccaatgctttgtttttggtccgaaaagtgctggcaagtctactattttgaattcactattggaaaggtattgcctctttagcaggttgctatagtcaaaccatgcttggcagaaattattttcagtggtttctcctgtttaaaattttcccatacccaggcctatgctgtccaatttgactttacatgtgaagttttatgatttatcatcaatcctcttttttgttttcctagtagaaaatttacgcttttgtttccttttagaatgttaattttttttttgaatcatttacaggcctttctcaaagagtcatataactgcacctaccagtgagcgttttgcagtaaatgttgtaaaccgagttggggtatgtactatcagcaaccctgtccctagtaaatggttggatttaaaaaaatctatttccgctgatctttccatggactagcaaaattgtctgatgttgagaaaaaatttacttgacatatgtccaggtgaaggacaatcaatatttactttgacatagcacattgcatatataattctattcttcgtcttggtatcatttagatgagtatgtgtaatgatcatgtttatgatataatgttgcagcaggggaataagacactcatattaagagagatacctgaagatggagttaaaaaatttctgacaaacaaagaatttctcgcaccttgtgatgtggctgtctttgtatatgacaggtaactttgatgcaattacataattaaatgctcatattagttttgtgttatgggtcattgcttttactttattacttgactagcttgatcacacaactggaagttttctgtcctacagctctttcttgtctccacttgtgcttgccaagtttacaccagaaagacatttatatgtatgtgtaggcaggttttgattgtaaagctactgatatcagttggataatgggttcttctgatgtcatgtgttagttttcttgtggaaattgaccagctatataccatggttttctcaagttggttcagtatttggaggaatcttaaaaagtagtgttttttttttgtgctgaaaaatattgttcttgttgattgtagattgtaagctcctttatctgttt

SEQ ID NO: 188407 - DNA, 2062 bp, Cannabis indica
tgcttgcatcaaatggctctgtcgctctttcgttttatggcggctataggaaggaccttagttcttgccactatggagggtacatttatcatgttgatggttcttgtgctaggaggatttgttatttccaaaagtaagttttactcttaacaattctttagaatccttatttaaattcagatgtggcatgttattataaacaaaacacttactataaaaaatttatgttgtgttgtagatgacattcagccatggctgttatgggcctactatatttctcccttgatgtatgcacagaatgcaatttgcatgaatgaatttcttgatgaaagatggagtacggtaatatttcttattagattaatggtcttcttcattcattaattagtttactgcagtgaattttacactttcatattgttagtttggaaaatttctcctctcatcattggagttctaatgagttgtttacctactgtagccaatttcatctctacaacataaacaatccacagtgggaaaatttctcctagatgccagaggattctttacagatgaatattggttttggatttctattggggcacttattggattttcttttctattcaacattgtatttgttgcagcattggcctttttaaatcgtaagttatctcttcttatttttactcaaagtgctttggtttcgaaagcaatgtatcaaagctaacaaaggcatttcatgtgaggaaaaaaccagctattggagattcaaaagctgtcattgcagatgaagaaagtgtcaataagaaaaaggaaaaagccttaggacaacaaacatttgaaggttaactcttgagactatttcatgtctttttcattatttgtgactgtatttttcactagtctctaactatgtgagatatttataggtcttgagatgccagagaaaggttcttcagaaaccattagaaccactcctgttcgtgcacaaaagagaggaatggtgttgccctttcaacccttatcacttgcttttagccatgtgaattactatgttgacatgcctgctgtaagttttttcacctttgattttactattgtttcctctacaaaactcttttatttgaagcaatgattgaaggaaaagtttggtttttcattacaggaaatgaagcaacatggagttgaagaagaccgccttcaactgttaagagatgtcagcggtgcttttaggccgggaatattgacagcattggttggtgtcactggagctggaaagacaacccttttagatgtgttggcaggaagaaaaacaggcggttacatagaaggaaacattaacatctcaggctatccgaagaaacaatcaacatttactcgaatcagtggttattgtgagcagaatgacatacattcaccctatgtgactgtctatgaatctcttatctattcagcatggcttcgtcttcctccagatgtaaaggcgaaaataagacatgtatgtcaaagtgtcctcttgtaaaatctctttctcagttgttacaatacaatatgtctatatgtcatatcttttgtatgaaatattctgcagatgtttgttgaagaagtgatggaattggttgaattaactcctattagagatgctatagtggggcttccaggtgtagatggtctttcaacagaacaaaggaaaagattaacaatagctgttgagttagttgctaatccatccataatctttatggatgaaccaacatctggtctcgatgctcgagcagctgcgattgtcatgcgaactgtgagaaatacagttaatacaggtcgaactgttgtgtgcacaattcatcagccaagtatagatatctttgaagcttttgatgaggtgagattgtatttcaattttttatttttgaactttattcatcttttttgcttataataataataattcatgttgttgcagttaacactaatgaaactaggtggacaagtgatttatgctggatctcttggccgccattctcacaagctcatagaatactttgaagtgagtaaattaagatttttgccttctgaa

SEQ ID NO: 188408 - DNA, 2661 bp, Cannabis indica
aataaagctgagtaggaaaatgcaaccactcgtacgtactagtacgattaacaaattacctgttatatataacatattaataatttgataatattcagcaatttagtacgtatacttcttgttttatttcttatttattattttttttaaaagacttttagttcttatcttaaccttgtaatattacttgaagtaatttacttcattgtcgcaattttcttttgcttcataattaaaatttaaaaataatatcaagtaattatgtaaaattaattatttagtatatagtttacgtttatccatagaaaaagtgatataattttttaatttcacagtataagttatttaaattcaactcaaaatctagttaagatcaaattgtccattgtattttcctaaaatttaaaaaaaaaataaaataaaatatcgtactatacctttttattaataaatgtaaaatagtaaaaacaaacaagcgttgcactcttgtccataacaatatttaagatgcagaaagaaattatgtattccaaaaaacaatataataattacgttattattatcattattaattaaagtgtgcggtttgttataatttctagtcctttagtcatctattaattaatgaccatttatatgtatttatatgtttttttgacttctcatatgtagttggattttgaatcaaaaactatagtatatatcgaaagatataaacaatattaatcagagttttcacaaaaatattagattttaagtaaaaatttataattttactgtcacgtgtaaaaatactgtttttttataaaataactgtaaagtaacaaaacagaacaattaaaataacggtagaacaactaaaaaacaacatagtacgtataaacttatataatattttttaaaaaaattctatcccacagtaaaaataaataaataaaattaaaaatttagtgtaaaaaccctattaattattgctttcaaaacaaaaactatattaattaattaaactttaaattcctcttagcaagaacggataataatttgttaaatgtgtacttagcaattatatagaaaacaaattatcaacaaaatagccgaaaaccaagattttttattatgatcattgtgtataataatctaccaaaatgaaattatatcatcacaagatgaaaattaatcaagtgatactttaattaataaaaaaaaattcaaccattttggtgccctaccgcatacatagaagtttaactttttcaagtaatttttttcaattaatgtaacttaagaacctatttgtaagctatagttattaattttgaccacatgatcaacctaagaagattctgactaaaatttagaagtttgtttagttttgaataacaaaaatatttacaataatttttattttttacctctattattatttgtttccattaaaaacagtaacaaactatggagacaaaagataaaaaaataaaataaaatctttttttaacagactttttctcatctcaaacaaactaatggtattttgttacggtggtatcccatattttggaatggatttgttagatttttcaaattatgtaagattccatcctattccggcttggctaagaagaagccgagtgaagccgatggagccatatagtttaagctctctctcacgtgagttaaaatttcactgagatagtaaagccaaaaacaccacccccaaccaacccaacccaacttggaattgagaaaaccacgtactcttctctctctctcacatgataatactaaaccatacacaatacatagacacaaaaacaaaatacttcagagaattaagaaagttttttcagtctcttcttactcttctcttaccttattatacaaaagccttttttttttctttcttgtacatctcatcacggactcatattaaggtcattatgtacatcaaaacgcaatgccaaaaaataccccttaccttagattcttttttttattattattttaaataatatacattttaaataatccgaatttaatgcaaacccaaatactcaactttcctccatcacgggtagctataaaacaaccccatttctctcattaaaaagataaacccatttttatttttctcacaacaatatggtctcctctgtttcaatgagagaaaacagagtacttacttactactccgttttggtggcagtcactcttgtttttgtgactctgaaccgagtttcgggtcagaaaccggttttcgcatgcgatgccgggtcgaacgggttcgggttttgtgacacgtcgttgggggttgatgctagagtggcggacttggtgaagaggctttcgttgggagagaaaattgggtttttggtgaacagtgctgggaatgtgagtaggcttgggattcccaaatacgaatggtggtctgaggctctccatggagtgtcgtatgttggtcctggaactaagttttccaatgtcgttcctggggccactagtttccctcaacccattttgactgctgcttctttcaatgcttctctctttgaagccattggaaaggtacgtatccatatattcatatatatatatatatatatatgtatttgtatctgctaaaaactatataaaacattcccttcttctcactttatataatat

SEQ ID NO: 188409 - DNA, 5025 bp, Cannabis indica
aataattcctagtctacgagtctattgtattagccttacaggcgagtgtttgaatattacaagtgtttacaatgtaaatcctagctctatattccagctgtttctcttgaagaagaagaaagctagtaggaattttagcagaagttcggtaagtatgaaattgttcacctcttgtacataaaaaatgagggtattcataggcttacatgtggttaagagcatcccttttacccacctagggcttcgtactactgcttgttgcaagggtaaaagaatacaactggaaatctgaccgtccggcaatgaagaaacttcttgatcgtgtggtgcgcagagttagttaataccatttggataaaagacacgtgttgcgcaaaggtttctcctttgcagaatactctctagataggccgttgagcaaaaggcatgtccagaggtgcgtacacgcactacaatggtttgacatggaggacaagatctaatcctgtgtcagaaaaagatgtaaccatctgtaggtcgatttccatatggagctgacgtggccattcaccttcagataacgattacggtctgcggccagtccgtagaagtcttcacccagaagtcatttacttaagtcgtgttctaggacttcttagagctggggacgaatatggttcttttgcgtcccaaagacactgcttaaactggggatggctctccccatcaaatatccataaatctcctcccggatgaccaagatacctctgcgaggaaatttggtagttaactctactaatccgggaggttgacaaatcttcttttctaatcatgccatgtgtctcttgtcggaaaacacaaataacatttacaccctaagctttcgggactttttgagttctgggaacttgcaacctttctctagaactgactattgacacgtgctaactattagagtcgtggacgcatctttttggtgagttgtaattgtttagggcaaatggaacgttaaagcctgctaacgtggaaattatgtggtacattagatgccctggttaattcattacgcgtgtgttggggcgtgtctgtcaaaaaaagatgaaactaacggggggtgatttgaaatgactcgtctttatggcttgatggacccgaggaaaatcatgattaataaatgcttctgaccctttcaacttcccagccgttagatctaatgaaagatctggaccgttgattttgaaaaagtcgattgtcttcttgaagtataaattgacattgacggcgttctttttactttttccacaccacactttgaatttttcccttataaattttctctctcgtcgttcttattgcatgcaagaagagtgtgatagcttgattcagcgattgatcaaactccatgcgaagctttttccagacactgagtccctgcaaatcgaccaaccccttgccagatgaaggatttgatttttagaccagttgtgatcgccttattgactgggttcagagacttcaaacgagattctacgacagcaacccatctcctttccaatgaacacgtaagtacactaactcttggttgaacttttattatttcgtatctaggatagaaatttcttattcaagggagggctagaactgtttacatgttgaatagcgaagtaggatatgcgaaagaaacttcgcaattttaggaaaaatctgtatgagaatcgaattgtcgtaaaagtgaacaatgttgtctgggcatttatttctcatcataagaggtttcataagtgcctgtacgtttgtcgatttgggtacaagtctggaggtttttcttttacaagtcagttgcttcaaaaagcttggtttctctttgtttttgtgctggtagaaatggacctgaactaggatctccaattcggcgttgtgggaaccactgagaatgcacttgttattcttgtaagggaagcactagcgaaagaaacccaagctatggttcccattaaagtgcctcaacaagggacgactatggaaactgtcccagaggatggacctactgcggaggaacgacactccgcgaaggcaaaaggaaaaaagaaggctaagacacccccaattgcacatgtttttaatgactccatctgggagatggaccagaaagccaactatttccgctcctacggtatgttgacagcctatgctaatggtgatggtcttcgaaaccttcctgggttgatgtggcatagactgtctaccacaggagaatcaacttgcacaagtatagagggattcagtgcttggagttagtcccacgtctccaacggagcacatcttcccttaaggacctactttgcaagtctgatggccaatattgggatagctcctttccagttaatcccttcatcatatagactctgggtggtatgtcttttgtaagatgaataagttggatgtaccttccccgaaggagatcttttatttctacattgtaaaggctaatcccatgaaggcaaacaagaagaagttggggttcttcaggttggacaagcgtccagattcttactgcccattcagccacatggactatactcatgatctctgagaaaactagttcttctcctctgagttccctgtgaaaagggtgccttctcttcaactggacttccagctaccaggtattgttgccactcagccttgatttttcatttctaaaaaattctttgttttgatttatttgttgatgtctttaatttttaccaaaactcctttcccaaagcattaaaactatcaaaatagcccaaaaggaggcctagtacaaagctttttccgaggagcagttaaaagtcaaggatttggctaagactgaactactacgtaggtttggcttaatcgcaaagttttagaatattgaccctattaacctccggggacgtcaagctcccaaagaggtcaaggaaaacattgcaactgaaatagtcgttgctataactaaggcgaccaaagaagacaaactcctagagcctgattggctaatctgccatccaaatcctttatctgaggaggaggaggaaattgctgagagattcactaccgaaatagcccagaaggaggctcaatacagagctttttccgaagagctttttctgaggagcagttaaaagtcgaagatttggttaggactgaactacttcgtaggtctggcttaatcgtgaagtttcaaaatattgaccctgttaacctccggggacaacgtcaggctcccgaagaggtcaaggaagccattgcaactaacctaactgttgttataactgaggcgaccaaagaagacaaactcctggagcatgattggctaattcaccattcaaattctttatccgaggaggaggaaattattgagagatttgttgtagcgtagccggacatagggactccaagtgccaatactacaggaagaggtaatagacccttcttcatcttccgtatccctagcctttactgcatgtcttgggaggatcaaggggggatttgataaatactttttgagcttagaccgtcatagattattccatgaaagattatatagacagagtagaccaaattgttaggagccctagtaatccggaggcatcctcagacactgttagggtggatcctttaatgatcatgtcattgcctaactttagggaatatggcaacttccttgatcaaggagacataatttattttgctcgtggagaaccttatagcagctcactgaatggttgcactcacgcacaagtcttcttagtggatcttgttgctttacgattgtccttttatttgctttggtttggcttgtagcttctaattgcttatattgtagttatgtgtgtaaatactctagagtctaggatgttgaagtcgttgagtaataaaattgttgccaccttagccaaagctgtagacacccaagaaaatgggaagagtaagaccaaaactcgggcctccaggacccgaaagtcacgtcttccctcaacctcgtcattgttagatgttcgggacatcactcctcccactaaggtgagctctgtagctccgggctcttcagctcccgtcgaggtggagaaaactctcaccacttccaggaaggcgaccgaggtaccagttgctctgggggagcaaaccttgtgggggaatcctccggtgaagggagcgactttgagtatcccagagaatacgggcggttcagatgacaatctatactagcttacctttccaaggaaggatgcctccgcatgcttaagcacaaagggtccaccgcttccccgagccaaggtgccaaaaagtaaaaatcatcaacttcaactctaaacccaaccttatccaatccaccatctacaacaccgtcaccattgcaacaacagcaacaactacaacagcaacaacatcaacaacaacaaattccaccacaactacaacagcaacaacatcaacaaattccaccaccaccaccacaacaacaacaacaaattccaccaccccagcaactgcaaatagttccatcccagcttactccacttcaagcacaacagtttactccatctgaatctagcagggcagcaacctcttaggcccacatccgctaacccatctcctagaccaggcacaaccttgggcaaaattccaccattgggcttttccttccccatgaggtcagccgtccttagccacaattttcttactaagacgtgcgagtttgctgccaacctaaagatatgtcatgaaaaggaacaagtaatccttcatagaagagctagtaggctatcctccgtgaagataggaggagatcgctgaagggattcgtcagccctcatcaccgggcctggtacttgacattttgacacggtttcgcctctaggatcatgttgagaatcatgaggttccatctcaaaatcaattagtaatgggaggagtaacccatttctcttatatatactattatctttccacacattaacaatgtgggactctcaaacatccccctcaagatggaggctattttatatgctcaccatc

SEQ ID NO: 188410 - DNA, 1338 bp, Cannabis indica
caaaaaataaaaatttaattgacttgaactaatcaggaattgccacgtaacaatttacttaacatttaacatacatgtatctagggaagtttcagaattataactaggtattattaccgcaaaaaaattaaatttaaatatttacaattgagagttaaatttaattatttataccgcaaattaaaaaaaataataactaaaaagttttgaattattaggctagacgtatatagtgtaattattatctacaaatgtgtgaccaaatttcaacatttatagtgaaaaaaaggtttagcaaaaatctttactatttaatttcaaacatcatttaattgtcttttttaggaaaaaataaaagatcgactgacgcatacagtgacttgtgttacttacgtagaatacaacttataagtacgaaagcacaagtcatattcattcaaattggggtttattttattttattttatattgacacattcaaaaagagaagcaagtaattaattaatctctcaatttttttttcattttaattaaagggctaagatgacacaaatacattattcaatcacttacgtatataattaattaaaccttttggtagcaattgaattaatataatagtcacgtttagaaactcattgtctaattggatttatatgtaatatagtcagaaataattatataatttaatatatttgtttcactatataattaactgtaattatataattaaaagtaattgaggggtacaattacacttttcaattgtaattatgtaattataggtaattgaagagttctaattactaaaattttttattttaaatattaactactaaaaaatattagtttttcgtataattactaactattttaccaaataagatattaagagttcatatataattatcaccttatatctaaatatatatatattgtatttaaaatataatataattagtagaccatgtaattaccactttaataattatactacttaataattacacaattactttaaaatacacccataatctcaaaattaatttgagcatgaaaacaacgtacaatgtttttttttagggtaaacgtacaatattttcaatattttattttaaagaataatatggtatgggtccccaaagtctactagaactcttttttttttttgaataacagtagggaaatttgatttttttatgcttagaaaatcaaaaaatttgatttataaaccaataattaaaaccctaaaaaaactaataccttttttttctaaaaccccaaaatacccccaaactaaaacctaatctctctttctctctctatctagccggtccc

SEQ ID NO: 188411 - DNA, 1198 bp, Cannabis indica
tctaaataatttataataagaaggggactatagatttaaggtattactaccataactaaaatttgtttatcacaatcaagtgaaggatcatggcatattaatatcatgtaatgttagtaagtcatgcttaaacttcattggtttgcagtatagtgtattagtcaacactagctagacatgctaaaactattcaagatattgtaatctatatgattttgagttatttatttaataggttaaagaagatggtcaaatgtcattaaaacatgtattaactggtcaccggaaaccagtgtccattgtttcatggagtcctgatgaccatcagctgctgacatgtggactggaggaggtcgtgaggcgctgggatgtaacttctggtgattgcctccatgtttatgaaaagaatggcattggcctggtctcatgtggatggtttgcgaatggtcaagggatattctctgggatgactgacaagagtatttgcttgtgggatttagatggaaaagagctggagtgttggaaaggccaacggaccctaaaaatatcagacatggctgtaaccggtgatggaaagaagatcataagcatatgcagacaaactgccatactactacttgatagggaggccaattatgagaggctgattgaagaagaggaagtaatcacttcattctcactatccaaggacaacaggttcctattggtcagtctcataaaccaagaaattcatctttggaacttggatggtgaaattaagattttggccaagtacaaaggtcataagcgtactcggttcatcatccgatcttgtttcggtggacttgagcaagtgtttgtagcaagtggcagtgaagattcccaggtactctttatttaaaacacattgttaaatgagaaattaacttaaaatgtaaattgataaatctgctatatataaattcactaactgaacttcctaagttattagatggctaaattatattgtgtggctgcaggtgtatatatggcacagggactcgggggagctgataatgtcattgcctggccattctggagcagtaaactgtgtgagctggagccctgcaaatcttcaaatgttggcttcgagccagtgatgatcggacaattcgaatatgggtttaggtgaaagtcagcccactaactagagaggaaaagtaggtcaaaacaataggcg

SEQ ID NO: 188412 - DNA, 2157 bp, Cannabis indica
ctctctctctctctcaatatctcatttattacaatcacatgctcaaaatttattattttcttattattattattattattattacctacaataataattatattattacatatgaaatgcaatgaaagaaacctatgatggtcatggactatttttgtttgttagtttcttgggtttagatcctatcaatccaccgcaaaaataaaaataatctaatctataaaaaagctaaaaataataaattagggtggttggcaattttttattttttttttgtgtggagagataggtagttttattaattaaataaaatatatatgagctataaatgcgacaaccaaacatatgcactcacaataaatgtctggctggtcttattgagtcttgtgtttttagatggttcattaattacccacacccaccatttttgtaacttccacactctttctttaacctcattcattacattcccacttcaccataaatgccctttcccaaaaggaattcttttaccgtttgacaaaggaattctttgtcatattcttttatttttaatttttattttttttattttattttttttaataaatttagcaactttattaactcgcaatcgttaataataataaaacgcacttcgttagaacaattctccaattaaaacacacaacctagaaaaaaacaagaatactagctaaaacatgagccaacttgtttgcagatcgtttgacaaaacacaactcaacattatttaaagataagtgaagagtacgaacatcaggaactaatggaccaaaagaggatgacaaagtaatttggccagcagttttcaaaattaattgtccctacaaatgacggtcaatccagcttaaagcttcttttatgccaacaaaatcatctatttcaggttgcacctgccattttggcataaaaatccctgccatttttcccgctgcctccattccctgataactactcgacgccatggacacccgaacgaacccagaaccaagaaccagtaactaacgccagaaaccaataaaccaaaaccaaagagagaaactatagaaccatgtcaaaagacaagacggacaagagaaactaaaaaaccatgtcaaaagacaagactaacggaaaaacttaattagtttcaatacagaaactaaaaaattccaaccccataaaacattaattggaaataacataaaaacagcaaataaataaaaataagcaaataaaaacaaaactaaaaagagtagatttcctttaaacactctaaaaactacaaactattaatcaaacagtttataaaaagaaaatcaaaactttagttggagaagccggtcataagaaaatcgcaggaagaaatcgcctgcgactatgaagaagacgtcaccaacggagatcacggcaccaacggagactggggacaacatgcaccaacggagatcgctgagtggtcaacggagaggtcatggcatagttgcgattcctaacgaagcttcatgcgctgtcgcctgcgaagcccgagaatcaccgtcgtcctcagaggggaagaccgaaaaccaccgtcgtctgcaaagggaagagttgtgcaccaccgtcgcctgggaatggaaccctagaacgtgccgccgccgtccacaaggctgagctgaagcgatggaaccctagagattagggccgccgcctatcttttttatcttttatttgttatttttattttattttattttatttttatttattttttatgcagaattaagaggattacatagtgcagatcccttcctcactcttcgatcatttttgacaataagaaatttcataaaatattattcaaaaaaaaattgatgtctctaaattggtgtaccctccctgtctccaccaatatcagacacattatttatacctattttgcatatattaattccgtttagagtttgttaatgaatttattatatgttaaatatgtatggatatgtgtactcaaataattggtaggacagagaggggcacaccaatttggagacggtagattttctttcaaatttgtttctctaaactaaagctaactaatattagccaactaggccaacttttgtctattccttaaattaccttcctatttttcaacacactcctctctctctctct

SEQ ID NO: 188413 - DNA, 2109 bp, Cannabis indica
atatatagtattaataatatcgactgtggcctaaatactttgtaatattttctttcaaaaattatatatttctcattatttcatatataagactcttaagtagaatagttaaatggaaatttacatttgattgtaaaataaaatacaggtgaaagtgaaacactatttccatttggggtcagacaaaacttgcaggttaagtctacattacattctattctatgtacttcaaaatttctatggagatgattatatccaacatgcttcgtaatgtgcttttggtatatttggtatatggctttttctcaacaaaccaattcttccacaaataacaaaatcttacgaagctaatcacaaaaaacaaaagcatatattataatacaacacaattgagaatttaggtgatgatctcaccctcttcttcctccttatcatcttcatcatcatcactattatcattcggaaacttctcttcaacaatgccgccgtcctcgctggacttttccttgaatattacagaaggaaatgtcaaaggtttatcagctccatctttgaagaaagaattagctaccatgaacctgaaagcctgcagcaagtagctcttatctctagttatgtcagcactgagaagtttctccaataatgtcggtttcctaatgcttaatgaaggaacattcgaggaagcattattgttgttattatcattcatccttcgcttcttaggataccgttctcttttatcggatctcctccttttatcaaatttgttgggaaatcttcccctctcattcaatggtctcccattctcttctttgagagaacaccccggtatttctgcaacttcaattcccaattcagcttgcttagctagaatctccttaagttgctgcaaaaaagtaattctatgtattagaaatttatataaagtatttacatgaaggcaaatgaaatcaagaaaataatgaagcagatactatccaacaggtatcccagtaacttgaccaactacatcaatctgtggacacaaagatgataaaatatagtccagtcttgaagattcttataccattaccacatctaaacacagcagaactatagtcctgtaatttggtcattagtagttgagaacattccaagggggcgcctaacgcagtacaccggtacccctaatcctctctcttttcttttttctttttcaagtaatgatagatgtattgtaatctctaatgtactggccttttaagtgtgaagttggaaatttaataattaagatagatgagatgactagagtttgatgacacgattggcaacagaaggggacgtgtttcttcctagctttctagagaattatgagcagctctgtatcttgattgcaaacgtggacatgctgactaaatagacttttctgtttccagtgaaaacagcctcggcaaaaaatgaataagaaattgcagagatggggagaagcagacaatgtacctctcggcgtagctcagcctctttctcaaaactctctttgtcttgctgctttttcattagcttctgcaattgtggaaagaattattaaagtccccataaaagaggcaactttgggcaataaatacagattaaaaatcagaccttctctatgtttctctgggatggatagttctttctccgttcttcacaccactttcgaatttcttcttccgaatacgttaaagcaagagatcttcacatttgtgatataaaagaacaaaattgaaaagaaaagttaattctaattttacaattacaggaatccagaaataagaatgaacaatgaatacaagaatggtcaaatacagaaattgaggaaacaagaggaaagcagttacttcagtgttcagaatttagtttgggagcatatttccttcttatggaaagattacaaactttggtgaacaaacagctcagtgattttgattttgatttatttaatcattttctacatcttttgcctatcatggttgcagtgaacaaacagtacaatcaatctttataaataatagtgttggcaaggaaaaaagataagaagggatttataatcaatcatataacaatgaccaaggcttttcaaaatcactatca

SEQ ID NO: 188414 - DNA, 2143 bp, Cannabis indica
ctaatcaaccaaaagaatacaacatattagaagttttgaggataccataatagtcatcgaaatatatatatattattttctagatattttatattttgatttaatgtatacacatctggagatctaatgggctatggtacaatgataatcagataatacgaactctttcgctgcgtacctgatttagaaccataaaaccaacaatcctccatcattctttcagaactaatctcagctattatgaccaatgtttgatgggttaaggaatttttcctaaatttaacactgtagcattgcctcaccatcaattggtctcctcagaccgtttcggttcttcactatgtcgggaatttcaattgtaagtgttttaaagagctaattgaccccattcctgtaagcgcgagtacggcccattaacatattgtaaattgaaggtaaacctactgctaggaactcttgcatatgagttgttgataatggggattcccccatagttaggggtagctcgatggttccgaggctcgcaacattatcacatgtaagcccacacacattcacgaaacaaggtattaatttcacattctctagtcccatcttctttaatgtttctttgtataaatgttgactgagctcccattattgaccaatactcttttcatccttttatttgtgagttgcactatcatgaccaatgtatgcgggaattggacatgtgttacatcctcctcaataaaagatatcgagggattctcagattttacacattttaagacttaggtgcaaatgtcgaaacttgatttttgacttgattgatatactgttctaaatattgttgctctttccagtaaaatgaggccttccaaaaattaccaatatattctcgccatcaattggtggcggttcgatattttaattttgattctagttgttaggcttatttttctcatttggcctatttcaaatatatttttgaaaatacccactagagattagattctcaatttttttttttttcagttatctacatttctcggtggtatgtcctatatccttatggaatcgacaatattgttagggtcacttttacctctcgcatttcacatagagttaggtctacaaaatgcgacccaattctcattggccaggaagatagtctcacatgtttcattaacttggtatagagcgagtaaataggcacatttttttttcgcctttcgatgaatctttcaagtcatctttccttttcccatttggatttgttagaattgttggcagtagttgtggtagtatttgtagtaacgttgatcacacttggtgttgccttgtttatgtgaggcaatgaacaggatcaatgtcaacatgctaggaatatttatgtagcaatgaataggagcaagcttaagtaaattaagcttcccaacgttaacaatgttaatattctaagaatattcctgaatgtcttcacaagcttagcttcttcagttgcatattataagtgtgttgagcatcttgcattaatgttgaaagtatcagcttatcccaagaagaatatgcatgagcttcatatgtgatgagaattgactcttggttttttaattaaccaagttattttatttcttttattgtacacatgttatatacctagatccattatttattgcttgaaaatatgggtgtaacataatgtacatttacaattttgtctctaatttttatgggatggggcaaaaattttaaaattcaaaattaaaagttttttttaaaaaaataaaaaaaaaaaaactcttaaagaaaaaaagattaggaggcctcttaggcaatgacaaatctagttggggactatatgtggactgtagccttccctaatttttgttttattatttttatatgtattaattaggtaaggaaaaaaagattatatatgactattattattattattattttatggattcgaatttaggaccttgaatttaggactttctatttgtgaagagaagtgtgaaattactagactatgcctataaccatacatatgattattattagtttgcctccaatgtatgttaactcggtcactactctagggccaagtaaccttaagtaacggcctaaccctaaagacgatcctaagcatttatat

SEQ ID NO: 188415 - DNA, 3653 bp, Cannabis indica
taatacaatacaatacacacgacctaatatgacgtatataacatttaattataacataatatgcttttcataaatacataaatttaatttttaattgtaaataaatatttaaatttattttttttataatacataataatacataaaagttttcgtaagtatgtgaccgttaagtgaagttaatggtcacgtgatatgcttctaattggtttaggtcaaactttatatttaaaaaataatttaaaatatatatactactaataaaaaatgacacaccactaataaaaaatgacacgtaaataataatttaatatttttaaaaattaatcaactatttatattttattttaagtgcctatatcattaataatattagcaataataataataataatatttattgaaaggctttgaattcaaaaatggatttagtagtagttgatgagtcatggatgaaatgaaagagtaggggtggcgtgccaatttatgtttggttactttgagatattgcatcctattttctaagcatttccttatttgctgctccttgtcagattctcactctattctctattcctccccccccactctataaatccacatacctattttttttatttttttttaatataaccaaaaagccatgagatggtgcctcctgcctaacatttttgtggtatgtaatatcactattagtgtaattttatataaagtttcacatattttactttgataattgactataaaaaactgttaataccagtcataaaacatcacttcataataacgctagatactttagtatctcataacaatactcgaaagccatacatgcactactcagagtcaagtctagttaattaatttatatattctatacacatcagagtattgctattaattaatacatttatgcacactacagtgaactagctcatgattattaatacattactttaagttttgtacagaaattaaagttggatctagctaaaggccatttacttatgcatgcatgcgtggtagttaattataatagtaaccatccatgaagtactacatatctatttaattattaattctaggagcattaggtataatatttcctaatatcttatacctatctttctagttgttgctagctagctagttaaaaagtctagttatgttacaattgtatatataatatagagctatctcatttttcaaaagcatgtgagccatgtttgcacgttaattttttttttttggttgtacgtaataaatttattgtatcatatttctagctgccagtttaacgtgcatgcagatttcatttatatacacacaaacgtacatcaaaatctctataaattgtgttactctatcactaattacaataacataaattataaatttagtaatagtattttagtcataacaaaattcgtggtgactaattacaatagaataaacaaatacatataaaatacaagatcttgacctaaaatggttttcttaataaatttacaatttttcaaatttatctacaatttttttttaccttttttggtgtgcgtgacatgactagttatagtgtaagtaattaataatatataaataaataaagatataagcgttataactttgtcaatacattcttgatatatatgtttcctttattgtaaaataaaatataatttatcaattaaaatagaaactaaaagtactttggaagaagacaaaatacaaaagagatatgtaaagtggcgtttggttacaaaataaaaataaaatagaaatagtatggaatagaatttctattctttcatttggtaaagactatgaaatcttgaccaaaatgtctttatgtatcactctcaaacctataaacctgtacaaaaaaatatataaaaatatagtatatataatattattgtaatattaatgttgtatatatatatattttaaaataaaaatattacccatataattattaactttaattatttattcaaaaaaatgtagataggaaaaaataatttttaattggtatggaatgagttttcaagtcattttatttcaaaaaaagcatttctttagtttacatgaattacaatttttattggaatgagttttccaatgacaatgaagaaaccagaatgatcttttttaggaatatcaatttcattcttatactcatgtcaaccaaacactacctaagtgtatgtgagtcctacttaattagatttaaaaatatattaacataaatttacatacatttgtcacctaaatatatgtcgaatttacataagattattaaacatatatattctggatttaattaatttatttacgttcatacaatatagagcgaacacgttatgttttatagacctatttaaattatttacgtatcattaattaacattatttagaaaaaagaagaatacatattggaattaatgagaaggttagacgatttttgctaatagaagggcatatagtgccttagtaaataggtaggatatactacttcaattaacaacagtgttcatccaattaaaaaaaaaatcatccaaaagaaaaagaccgtacctgaaatcatggcccagagcatattatttaatccttaaataaaataaaattaacgtaccaaaagcaattaaaatagaaaaagaaaaaaaagaaacgtagtgggaagtggaggataagtcacccacaaaactagtagggttttttttggcatttagtctactttaattttgctgcttcattataattatataataacttcttcccccagctcccttagaaaactttaattcttaattgaactacacattcaaacctgtccaaattcattctactttacccttggtgtgtgtgtatatatatacacacacatagtttcattccccaaagaaataatgaaatgtataatatttagagagcaataataatatcagtgatcaattatttggtgatcattacaactttacaaatatataagcagttcatcagctgagagagaaactataggtaggtaggtgcagatatagaaagaaagagaagtgtgagtgagatatatataaagtgttaattaagaaaaataatggagtggaggaagtgttatttggacgtaattctggttccactaggatttttcatgatcattttttatcatatgtggctgtggcacaaggtccggactcaacccttgaccacaatcatcggaatcaatgctagaggacgtcgtttctgggtttcctccattgtcaaggtaacaccttctaccaattccttattacatatatataaacacacaaacatatatagggctagcattaccactgggtatactgcctagctaacactttctaaacgtatcattttacgattgattatccatattaacatgtagaaggctgttaagtttttagcatttctcaaacatatatatgacaatccttattcgtgcttatcaagattgtactatgtttacataatgattaaggaattagctaggagtaggtgcaaaaatattatttgggatttcggtcaatctatactcatttctatagagatgcatatatatatacatgtgtttaattatctatacataccaatattattttaatagtattgttgatttagaggtggcattttatgag

SEQ ID NO: 188416 - DNA, 3319 bp, Cannabis indica
aaaaaaatcctaattagcctatagatcattatactcgttttacttggttttacctacttaaacctaaggatgacgttttccaagattttctcacttttaaaataatgattcttactcaatttacttctgaaattataatgggttgaattgattggggtggtgaatattgttctctctctaactttttttgtaaacatggcatcctccatgaactttcgtgtcctcacacacctcaaaaaaatggtcgggttgagtgcaaaaatgatcacgtggttgacacaggactcactttcttagcccatgccatatgcttcttcatttctggccatatgctttttctacagttgtttacttgataaataggcttcctactcgtgctttacattcacgtagcccctaccatgttctctatgacaaaatccccaattatgatatattttttaaaaattttggttgtttaccatttcttcatctttacaatgctcacaaacttcaattttgctatattcttgtattttttggggatataacagccaacataaaaggtatctatgtcttcatcctaactctaaccatcttcatgtcacccgtcatattgttttcaacaaaactacattttcttttcaatccatttcttcatcctctccacctcctattgctccttgtaccattatcatttcccccttctagtccatcttttactcctcctaccccatctagtcctccatctatagttctctcctctccgatccattgttctacacctttgtctgcaatttccattccttctccttctagtcattctcctagatcttcctcctcatcttctcatgattctcttccctctcttcccttagtaggtgatttgcattgtcctcatgaacataccattgccccttaaatgtacatcctatgataactcgtgctaagtctgacatccacaagtcgaatctgttttactctattgttgtaagtactcccgtcgagccatcatctttcaaagaggccagcgattatcttcagtggaacaatgccatggaaactaaatttgttgctctcatctctcaaaaaacttggattcttgttccacctccgcctaatgctaaaataattgggtgtaaaggggtgtataatctcaaacttagtgttgatggtttggtttattgatacaaagcccgcctggtggttaaagggtaccatcaaactttgggccatgacttccatgagacctaaaacctggtattaaatttaaacccagcaccattcgactagtacttcctttggctatctcttccaagtgtatcattaaacagttggacattcaaaatgcctttcttcttggtaacttagaagaaactgtttatatgacacaaccacaaggatttgttgatccgaatcaatcgaatcgtgtttgtaaattgttgaagtctctttatggcttcaaacaatagcctcacgcttggttcatcaaactcagtacaactcctcttcattagggtttcattgcttctaaggttgactgttccatgtttgtatatcggtctggctttattatgctcattgtgctcatatatgtggatgatattatagttactggttcatgttccactaccattgttgccatgttactgtatctaaactctcacgttgcagtcaaagatttgggatcattacttttttttcttggtattcaggttgcacaatctcatgctggtcttcatctctctcaaacaaaatacatttgagatctcctcaccaagacgggtctccttgagtctaagccggttagcactcttctttctcttgctcccctttgtatacatgatggcgatcccttacaagatgcaactgaatatagaagatcggtcggagctctccaatattgcacgtttacaaggattgatatctcctttcccgtgaaacaaaaaaatgccaatttatgcatgctcctaccaccactcatctctaaacaaccaagcatatcttaagatacctcaaagatactgctcatctttgccttgttatttagccatataaatcgttccattgcactattttactaatgcagattgaacatcttgtctggatgatcatcatagcactaccatattgtatattctttgacatgaacctcatctcttgtttatcttccaagcaaaaggtcatttctcgctccaacactgaatgcgacgagtctgaatatctggagttagccaatcgtgcttctaaagtttcttggcctgagtctcttcttagggagctcaatatctctccccttggtgcaccaactatgcattgtgatgacacgagcaatttgcatcttgcctctaacccaatccttcatgcctggacagggcatgtcgagattgactaccattttattcgtgaacgagtcaactatggcatcttatctctgtcctttactccatcttctgattaggtggttgactgcctccccaagccatttgtcacttcttgtttttaagaacttcaaacccaactcaacattcttccttgcctgttgagtttgcggggaatgttaaatagtaattagctttattattaatttaatttttttgttcttttgtaattatcaagatatatttctttcctttattctttaaacaatttttattttgtcctttggtagtcccctccaaggtacctatatattgtatagtgtaaggaatattttgtgtgaaggtaacagaaaattttttaacattcaaataaagataaaaatttgtgcaaataatcgtataatcatacacatgaaatgataaaagaaaaagtggttaagaaaaaaatgaaaaaaaaggaataaaaatatttgtaaatcatgtaaaaacaaataatatatctacaacattatactttgtatgaaaaatgaaaatgaattattcaaagaattttcttacctatacttgagtaaatattaaaaataaatagaaaaaatacatgtataatgtatagaatgacataattgtaataaaatattaatatcatatctaattattaagttaaattaatttttctcaaaaaaataacacttgttatcaaactaaagagagtacagaagagaattttcttaccatctctaatagaaagatctaaatttctactaatttggcacaaaaatgagtttgtgctaaatttggcccactattgcaattgtgctccaatacacatgatgtaaaataagaaaaaaaaaaaaaaggattatttcacaaatatacaaaaataacaaaaaaaatattacaaaaatacggttgtatggaattttaaacattgttacgatttttataattttattttacag

SEQ ID NO: 188417 - DNA, 2020 bp, Cannabis indica
tacctttgagactagaacatttagaccagcatgtttattgtcccatccaaactcattgatattatcttcagcaccaagtgtttttccattgttttgtatgtaatctaagaacgaaccctcctcagtcgccctcctcagccatgctgccccccacaataattcatcctgataaaaataataataattattattattataaatatatatagtatatagtttccaacaatttatatctatacatttaattcaattctataaaaacctattggtagttatcactactactacatatgaaccaaaacagccaacactatttattataacataaccaaaatgttaaaattaaaagtggtgactactaaataccattaattaatttatttctaaccggttagaatttattaattgtgttggaaaaattaacctataaattttgtaaccatattatttcattaattattattactcaaattaataacttattaacttgcctgataaccactaaagtcacaataaaaagggcacacaccatccctaatatcagaattatcactataagctcctctataagtatcagcatactcaaaggccttcacagcatttcttatgagtgtttccgagtaactcggatcataagccctaaacgccatcgaacacgctgctagagctgctgcggtctcgccagcaacgtctgacgcgggtttcggggcgtccacggcgtagaccgttcgggctgtgtccatatcttctggtctctcccagcaattgtggtcatttatggggtcaccaacctacatattgttatttgtcacataatgttaaattttattataccattaatacccttgggagtttgttactataatttatgtcactatataaggagattaaggtctttttatatatatggtatgactatgtgtaatatagttatctcatcacttgacattttatatacacaaatgatatggtccatgcaaattgatcacggattttagacatgggaagatatatatatggtccaccacatacacatgattaattaaacttgtacacaaaaaggagacaataatattaagtactcactcattaaaaaactatattatataagtgaattgttacttagatataataatagagaaatgttaaaaggtaccagtaatatttattatttttgttacctattaatattattattagtgtcattaattatcaaatcacgtataatttaatataataatatttaactaactaataattttaagataatactaatgtctaataatactgtaacacaggtggagttgaaaaccataaaaggcagcaataataatcaaaatttacttgttttttgtgaaagtatatatataggacggctgaccctaatcatctactactaccacttcttaatatatggctcaaaattttacaaatctgacctaattaactatatgtatatataggtctagtgacatgcatgttagttacattcttactaaaatatgttattagtgtttaatacttttctcaatattatattattattggtattaaatctcataaacttaaaaaaataatttttaaaaaataaaaatgttgaccatttatgatactcaataccacacatatttttatcatgaaacaatgggtatcaaagtgtcatattaataaagaagagattatcgaaatagcatattgctttggaactttgttatgtataaaacgacacaaacttatattgggattctaacaaagggagtttcacagaaaaatgtgtacattttttccccttttctcaaatcactttttaccaattataattattagctctaaataaaatgcatgaattataataaattatatttcctacaaattaattacttaaatcaattatcagttacttattcactactcaccaaaaaagaaaaaaaaaacagttgaaaaatgaatacattaatgatgatcatgttcaataatcttaagaagtggggtccaaaagaggtcaattatcaaacaacaa

SEQ ID NO: 188418 - DNA, 3041 bp, Cannabis indica
aaaaagtgtaaaaatctgttaagaaattaaaattcaaccggaaattcagtttaatttgcataaaactaatgtcctgactttaatttttagatctataaaatgcagatctcaaaaaattaaacaagagttcccaaacaacccaactcaatcataattcaaaaaaattacatcaatacgatagtaaaatgtttatcgtggtgtatttttattattttctaaatttctaatggtgaatttgttcatattaaatcatgaaaagacatgtagatagagttacgtacgtggaaatactgttctgatttttaatgtttcataacagttgcataaacattttgctaacagttatttcgtctcattgaaaccttcatctgatgcaaccttcggccaaccacccagcaaccttcggccaaccacccagcaactatcctgcaactatcgtctgattgaaactttcgtctaatgcaaatatcacgcaaccacgcagcaatcaccctgtaaccatcatctgattgtgtaaatgatagtgtaagaggtattttggtaattaaaatcacataaaaaggtataaattttgttcacaccttatagaagtattttgtaaataaagtatcaatttatattttccatgtgatagtgtctaaaaaaatatagaaataaatataaaaatgaaaaacaaataaaataaaataataaataatataatctcctcctaaataaatcaaccaaatttgaacacatgacctccaaattcttgaagtagaacaaatcctcacaaaataatgcaaaaattaatttttttgtagctttctatgggatccacctcgagttaacaatgcaatctaaaaaataaagtgatatcattgtaaatggaatcccacccattcttcctcatttttagaatacaataaacccttttgcatactaatacttttcttaaattgaaagatcatgtgttcttagctgatcattaggttatttatcattatagatttattgtggatttataaattgagggtaatatcacatgtaattttactgtaattgatataaagtaaattatttgacaatttttttactattatatatgatgaaaactagaaaagctgagggggattatatgcccctctgttcaaagattcaaagtaacacaataaaacagaacgtacttcatagacattattagtataatacaacaccacaccacaccacaaagttttgaattattacatcagtctaaaacataatcttacaaaacaccaatcacaacattgatattgttctcttccttagtcacaatcacaaaccgcagcctttgtcaccagtcaccattttattcaaatcaatatttatactattttatataatatatagtttactaagtaatttatgtcaactccgagtggaagtcaacatgagccaagaatgagttgccgttttcagaagcagtcaaatgggtggggaggccatcctcagacccgaaaacctgtgttgcagaaaccataacaaggaaactgctggcaacaggtttttccattatggctgcaaacaagaaatggggtatgtatgcttcgtcagcatcaaaccccatttttctcttgttgtcaaacattgaggttgcagcggctatgatcagcggctgcaatccatgtggttggcatgacgatgccacgagaagtttccaacatttccgagacagaatggaaaggagagccaagaagattgagctggaagtgctcaagttctaccctggagtagacactggtcacctctgatcctgagagatttgaaccactgctgttgtttgcttcctttgatgagtttagtgttccactgtctgagtgcagaacatccgagctctgagaccgggaactcctagacagctgctgtccattcctgcgtttcattgccacaggacttgcacctttctcattcttctgaatccttgtgttcaagaaacggccaccacaaccccttggacgccgcatagcatggagatggcgagattcgtgcatatatggctgtaaaataaaaatggatgttaaacttttattttgagcttacattagtatttcaattgttttataaaatataaatagttttttgccgttttagcccatatagttagtgatccataatttatggacttaataaagtctagtcgaaacaaaagtgagttttagttaattggagtctttaatgagaaggctcagtccaactaaaattttattgttaagtatcttctttgtatgttattgttgatctacttctgttttaggaatttagaaaaaatgacttaataggttaattttgcactgtcaaactctattaattctcagttatttctatggagtgataaactctattaatatttaattattattgtatgcaatatagtatcctggtgtgttataaatttctaacaggtttctcacatggcttagatgaaatgcaaatcttatcttcctttttcatcttttttaatgccaacattgacatcaaagagaaaaccatctttcaaaattggcaaagacgttagaattttttgttctaaagaatcaaaatgtaattaaggtttcaggacatttgaactaaagtttgactataattaagttccatcttaaaagttcaaaagagattgagatgacaaattagaaaatccaagttgtcatacctttcgagctttaggcggcttactctccagcactgctgccttggcacgagactgtcgacgcctgatgattccatggtattgcttagcattgacatagattggtccatcatctgcagtgatgttcagaggtagcataatacgcccctggtgcattgcaaatcattttcatcagagattaacttgtaatgtacaagattataaagcaaggggaattttctgttccacacaactactatcaatgcaacaaagggatttttacaaaattgacaagttaggaggagatgaaggccaaccgatagctgatgtccataagagaggagcccacagaattgatccatgtatggatattttgcacaaacctgaagtttag

SEQ ID NO: 188419 - DNA, 2034 bp, Cannabis indica
cagtatttttttaaaaaaaatctgtccccagtacaaaaaataaaaatgttaaaaatttcagtagtgtaaataatcctaaaatttaagatctaatattacatgtggtccaataagtcattacatctggtccaataataaacattaaacacaccgtgatcaccacaaaattatcacacgctatatatacggaaatatcaataacaaatacttgttaacattccagcaaatactatataagggtattatattcatacacaatataaggaaaatatcaatgaaaaatacttgttagtaattttttttttgtcattctctactctaaaataaataaaataactatttacatcttctggtgtgagtgcttaatagttacttttgccaaatgaatttttgttaaccaagtaaatttctgatatgcaaattggttcattgatttattattagataggtcgtgaagagatcttttatccatttataaatacttgtcatattactcacatatcatcattcataataacttgacaaattggaaattcattacaatattacacaaaataaagttcatcatgatcacacttataataatgcgtgtgtagtttttattctccaaaagcaataacaacttataaatatatattgaaaatggcccataaataaacatagggtggtgtggtgttaattattataatatttaaaaagtagaaggtaagagttgttcctcgaaaaagaaatggccagaagtagaaagatgatttggcaagagtgccaacctcaatggacctaaagctcctttggtaacactcacttcaccagtgttgcaagttatatcggtcttgacatagccagggtgaacactgttaatacaaatgtttgggtacttgttgggcgagatcctcgtgtacgcgttcattgaagctttcgatactttgtaagccgacagttgtactggccaatcttttgcttctaacataccttctttgaaatctttaagaaactctcttataacctcttcgatcccttcttccgttagattattttcttcatcgcctaacacttgtttcgcccatttattcggtatattctatatattataatatgataatatatatgagacatttatagagagagatgataatgatacaataatatatatatatatacctccaattgtccaaggaaagaagaaatattaacgactctgggtgaatcagacagttgaagaagtggagcaagtgcttcaaccattgcctttgtaccatagtagttcgttttcaagcattcttcagccttttcgtagctttctcccataattatttcattccaatttttttggggctacataaatcgtacaaatgagaaaattaaacttcaggttttatcaggaggtttttttttttcttttctaaaatacttattactattttttgaacggtttgtttttaaataaagtttttactttaattaaaaggaatattttgagtcagaaccgtaataataatatattttttgtttcaatatttcactgttttcttttttgattttgagcatatgataataaaaactgacccatttacaaccggaaagctcaaattctctggaaaaagcatcagcatctagcataactccgcccaatccctgcattattttatctgtgaccaccaaaatattatttgacatgatcctaagtccaaacaataaaaataaataaaaggtttttgatgacatatttatgtatatgctaataattaattattactagaatatcaagcttcccaaagtggattttgatgaaatcttcaagagaagcaatactagcaggatcaacgacatcaagttgatggaatacgacatgttgatgagagaggttagactctttcagtagtttctcaacagcttcaacacctcttttctcatctctggcagttaacacaacttttaccccttttgaacttaattgcttgcatatttcatacccaatccccttgttcccgccactcacaacagcatacctgaacccaaaacctttcaattttt

SEQ ID NO: 188420 - DNA, 3408 bp, Cannabis indica
actttttttcggttgtggtgtgcaattatgaagcattgagactgaaatttatatgaggcaagacctctagtcacatggtagatgtctttgtggcattgtgtgatgatgaggcaagagagacaactactcttggcttgtaaatgtggctatagtgtatatgagtttctttaaggcaccaaaagataccatgccaatcacttcattcataaataaagtcgcccatatgggaccaaatcaaggagagacgatgagctgcatatgaatgctttttagccttttttttatgtgtaaaacccactcatacacaccaaatcaaacttaatatattagtgctttaattatcgactaactacttcataagggtcacaattacataatatatatctatatattttaatatttttattttctcatagatttttaatattttaattgattatttgctaggagccaaacttttgttgtcttgcaagagaagtgagctgttcaataatcatatgaggatgagtaatgaattgtgaaaccaaatacaactttataactcttcatgactcgataatattttgtacagtgtttataggtacaaggaaatgatcaaaataatcagtgtatgatctatttatttacatagatcatgattagttgattatatgtattaatttcttctcttgacttctactgatgtttctcaagttaatgccaactaatgtttatagttataagtacaaggaagtaagctaactataattgttgcagaggccattatccatttttgtagtgtcaaaaaaaaatattgtgattgaaaaaaataataataaaaaaaaaaagcatataacattatctttctagaacagaggtaaataaaaagcataaagaagaataagaataagaacaagaaaaagtaggacagagaaaaataagaaaacttcattacatagtaaatttgacattgtaatcttttacttattacgaatttactatattattggcgtttggaaatttgttggatagaagagagtgattaattaagctaatataaatgattagtaatgaaagtaaagcaagaagtgagggcataaagtcaaaaaagcaaatagttgagggacttttttgtcataaaaaggcagctatcttcccttaattttcgggaccgttgggcttttgtcctttttggtatttattaactgagagtttcagcaacaggcaaaggacacaatctgggtcccacctatctctatcaaaaatttgtcttcttcttattcgctcgtcatttacaatctcaccgtcgcgtgacgatatcacaaattttcttttctttttcagctaataaaaaactctttaaaaaaatgttttattacgtaaacaaattaattttctaaaataaatatatatttttttcctctgatattattgtacaagagagaggaacaacaaaacacaggctgggggaattgtttagtcctccccctatcctatcctgttagctgattttcaaaggtaaagaaaagaaaagaaaaagaaaataaaaaacttcactcttttcctttttaaaaatatcaatcattttgtcttttatcagaaaataaaataaaatcattttattaaatccattttgcttataaggtcaaacttgttgttcttggatttgtttggctaattcagatcgcgatcggtgggaatctgtctttcgttgttgttaatttcggttgaattaggagataacagtccgttatttaataattatttcatagtttctaaaaccaacagttgccaagtcttctctttctctttctcttctagaattgtatctggtttttctttttaaggataaaaccaactccatttgggttttaggatgaagatgcacttctgaactcaattggggtttttccagttttcttaattttcttctgttgtaagaaatatatatatacattatatatatttggtaacattggattggggttttcagagtgaggggtctgcagagagagatagaaaatgggggttatgtcgaggcgggtaatccctgcctgtggcaacctctgtttcttctgtccctccatgcgagcaaggtcaagacagcctgtgaaacgctacaagaatttgatctctgatatcttcctcgtaatcaggtttacatttctttctttcttctcttttcatttactatcactatcataatgccttgcacaattggaattaagctgtaggatacctaatttattgaattatagtattgttatgtttcagttatggtaattaaatatctctcacgttttttgggggggtccagtgaagaagcttagttgagtatagtgtttcttgtttcttttctgtttgatataattttctgggtccttatatgctttcttgttttcattaacaccgtctaccaggatgctgaaccgaatgataggaaaatcgccaaactttgtgtatatgcttcaaaaaatccgttgcgaattcctaaagtaagtggttttcgtttcgtttcaacagttttttcttttatttttctgtacactttctattttttagatgcatgctcttacatgaatttttaatggtttttgatctaatgctatgaagtaggttgtttagttctagtattagaagcaagaacttcatatgaaaaatagtaatacctatgtttttcttgctttatgtattgaaaacataggttttgtgtagaagtttgtagctattctaatgttttcacttttttttgttaccacggtttttctctgccataagtgaggctccttaatcaattttggaggatggaggacctcagtcttagacatatgacctctgtctcgtttcaaaaaaaaaaaatatccctcttattttgttccagagttaggattatttatgatactcatgacatttattgtgaatgcgattagagattgttatagttgctgtaaaattgtagttgtttgttgttgggtgcaattttcttccttttccattaaaattaaatgcataatttcttccagtgtttatcattaacagatcacagacctcctagagcaaagattttacaaagatttgcgcaatgagaactttggatctgtaaaagttgtgttaagcatttacaagaagttgttgctgttatgcaaggaccagatgtaagtttcatataattctaaatttatgacgttatatttttgcttcacttcccgtccttatgttagatgacaagtgcttgtttcaaaaaacttattgctcctctcctacaaaattgcctaaaagaaagcttaaactgtgagtgaatataaaccattgcctttgccatgacctcgataagcatacacatttccacaagcgagaagcagactttatgaacctttaggttttagttactgagttgtagaaccttccttcttttttgcatcaagatgg

SEQ ID NO: 188421 - DNA, 6398 bp, Cannabis indica
gtaaacattgttctttttctgcaggtgtctaagaattcaaaataatatatgtggtagagaaatttctgtaagttacttatcccatatatgtatagtcatgaatctatactaggcaaatattgtttaatttttattttgtcaaaaaatagtacgttgtagataaagccctttcttaaatcaaagaagctcaaggagtgtgaaacttttcttcaaaacatcttgtgaacatcattgaatgcattttgtctttcaaaacattttcttcacttagagtgtagtgtcttccatattataccatagcataagttcatgcgggagtagaatcaggatgtgtgtgtgtagttgtgtgtttcttctgtacttattctcttgagtttttaaaattatggtagtcaatcttacaccccttattttaaatatgctacagcatttattgagaaactgtaagttgcagagcttggtactttggtggatcagatccaaagagcaagtaagttcaattctttctttttctttactttaataacaaaggtcaaaacaaatatgcattgtatgcatacctggtctgtaatgaggccatgtgtaattttaatgcagatataaagtcatgttatgaaatttctgcagtagtaagtaggatactatttaatcgagaaatgaaacagttcattcattcattcattcatgatgcagccaatattaaacacttgtgtcactatcctatgtatcgcctttgaatttatgaaaatcatgttgagttttcatgtactatggaaagtgctgattcaatcaaatggcctgcactataggttggtggattatgtgaacttctaaaccagaatagtgaaagtttatcttcacttgagtttgctcactgcaagctctcttcagcttccattgatgaaatttttggttctttagcggtgaacaacgtgccaacacatgtgttacagagcttctcaattaacatcgacttttcttgaaaaaaatctcgattctttacctcttggacttgtatcgtttctgtcatcacggtacataagttattccctgtatgatatttgaaaataggtagcccttatgatacataatatttccttaaaatattaactgtgtcacctatcttgttttataaatgtataatatatatgcatcggatttgagcgggcatgtcttcagcttatcaagctctatctctttccaactttccaggaatgcatataaatattgtaaagtgttagctttatataactatgggagttgagctacattggcacatatataactatgtgtaaaatttactacttttcttctcaggtctttgtattcattaaaattaccttataattacctaggccggaacttcgccaaaatgatttttaacactcttcgtgatgcttcatctggtctctctgttctcgacctttctgagaacaatgtgagatttgcctttcaatgaaattcgagatttagtattgtgtccttgtacaattgaataacatgaagctttataaacaattatgcagataagcggttggctttctgagtttattccaagattctcgagcagtggtccgatgttgttaggatttggcaagtccttgcaatcattacgcgagctcaatataaggtacctttttgtgtgtgtgtgtgtttgcttgtgtaacattaattaatacaacgtcactcatctgattttaggggaaacgatctagacgaagatgatgcacttgggcttagatatgctatggttcacatgccccacttggagagtcttgatataagcgataatccaatcgaggatggcggaattaggtcagttggaatttcgatttcctttaaaattttgagctttgtgggtgcagagtctcacaagttattaaatgttcagaaatttacttccctatttcgtcgaagcttctgaaaaatgctctccattcaaggatttatatttagagaattgtgatatttccaatggtggagttcttgagctcatcaatacactttcaaccctcaagaaaccactggagtgtctatctattgctgacaatgtcctcggcaggtatgtcaaacattttgcttaaaaattgcacctttttttaattcctaaaggcaagttcggcttacagtttatatttgccagccaagtggcagcagcattgggaaatttgttgtccacatcaattcaaacacttcacattagtggcattggattgggttcacctgggtttgaggacctagagaaaaacataacacaaacacaggagctgaagctagttgagattagcataaggttcaaacattttctattattctatttcaattggttatgtagctcatgacataaaattgattcttataatttttttcgattgcaccatggatagcaaaaaccgtggtgggattgcaacagcgaattttttgtctacactcatgctacgggctccaaaactcgaatctgtcaatgcagcgtataattggatgccagttgaagcctcttatatcgtatgctctgccattaaagctgcaaaaggtaaatatttactaccgtgaaacttttagctgcgactatgttagtgaacatttagtttttctgtgaccgaaaatctttctactgcacttgcaccgagttgaactcatttcacattacttcaacaaaagaaaatcttctatttctttcaaaactttccagctgagctcgtgtagactcgctttcattatgaactcgacccttggaaatttaagcatttgcactggctatctaacaggcaatcttggatttttaaatttgaggggaaataatttggacggtctgacaactcacgggcttactgaaattcaacaggctggaagacctgtttgaatatttcatcattacccatcttaagtgcacgccatgacgatgatccatagatggcctctacctcagatacacatacaaacatattgtaaaattagtctgtgtatactctgttcactaaattgacatcgcgatatactgaaatcataggttttggtgtgtcatttttgtttttcgatactcgttttactccatagcaccttagtttatccagcaacatacatcatccatgtaagtgtgtgttttttgaacaagatcaaaactctcactggattgaactcatcttagatgattgatccttaagtaaccacttttggctataaaatataatttatatatattccatgctctacttgtctctgttgttatcacttagtcttatttgaagctctacttttacttgttgattttaagttgatcatgcaaaatccattgttgcccttatgctgtgtatgatcctaatttttgtgggtattttcctttttttttaaaaaaataataatagtaaaagttttgtcagtattaacttatcaatcaattataatggagaagcaaattttgatgcctgccctctgagctgtcatggtgcttccaggtacaagccaattctttttcttcagaaattactgatctctgcaaatccttatagccctttagatctctctttcaatctctctttttactttgttatttctggaaactgaaaagggtcatcatgatttggctgactggttctgcacttttacagctagaatctacactttcccacatgttatggtgtttaaactagcctaaaacaggtaaagaaaatggcatccatcttcatcaattgtggcatgtctgtgtttatattcatgtattatttgatttgattaggataataagtaggcaaaaagcccaaaaggggttttcttctttttttcacttcatgttttctcttttttttatccacatgctgaggcttaaaggttagattttgccactaatggcctacttaatctgccttgctgtaaagattaagactagttttattttctcatgtaaattcctaagggtaatactttcacgagtaatattactattggtgtaatttagtatcaaatctcacatattttaatttaagagtaatttgcggcgtaaatacttaagtttaactcttggttgtagataaatacttgagttatatttctagaacttctgtaagtacctagcgattaagtgtcaactattatccacgtgtcattttcttatgatatatttaaattaatttttaaataaaaaataaaaatttaataactttgaccaatcagggactaccacgtgatcattgacttgataggtcaaatacgtataaaagttctgaaatataacttagatattattactgtcaaaaattaaacttaagtatttatagtataaattactcttaatttaataattattctagaattgctaactaatggtagatatcattttgtggtggtgtttagcacaactgctggctaataacaatgttttttttttattattattattaaaaattatgaaaaagacactattggtgtctattgattcaatttaatattgagttttacatacattaataactaacatagaaaaacactaataattcataaacttcattttatggcggtgtcaggtgcttaataataatgttcatatttttaattcagaattgttaaagggcactaatagtatctatttgtacaatttaatatcgaattctacatattttaataactagcataaaaaaaatactaactcataaaatactactttataataatgtgaggtttctaataagaatgctcatgtcatttatatattccataataaaacttattgcaaacatcatccacttaatttagtgaagtattggtattagtattggtattagtgttagaattagtataaaataaagaaagaaagaaggtaacatgaaaagataatgatgtaaaagctaaagaggacaactcattcctctttttttgttggggttgtccaaaaagttgttggcttggctttgtcatcaagttatgccccctttcttcctctagctagtagttggtgttgtttcaattatccttttattttttttatttattgttttgtttttcacaatgtaacttatccctttctaaactcattaacgttaagtaatgatgattttgaatgacccgtgaacaaacaatttgttagtaattctggatttaactccttatcaatgtttgatttggacacctaaattttgtggtccacaatcatcttaaaactactttcatggattttattatgataataataataattattattattattctagaaaagggaatatagagggccactttttaaccttagaccacttccttaatagtggtttaaagagttaaactagttctaaaccaatctttgcaacctaaacttgattaggcttaattggagatacatgataagactattttataatattgttttgtaaaaataatagtgtcattgaaggatattgacacttaaaatacttaaattgttacacttaaatttttttagagggtaactaatagatgttaaaataataaaagtaacaacgttacgtaaatagtggacgatttcttccatttataaaaatttattatctatcttaaaggcatgcaaagataccttaagaaaattagacaataaaactttaataactaaaagaaaatatcaaaattgagagttgtaaatattagggtttatctgttctcatctacattgttaaagatgcctacaatacgtgttttaattagaccatattgattttacaaaattaactatatactgactttacaaattgccaaattattgatgttaggtaattcttttacgtaaaataaaaaatttagatttaagtgttttgatcgtaacaataggtattttttattgtgaaaaaaataggtattaagtgtttgaatcataccaatttatgtatttttactagaaaaattatttttaagtatttaagagtttgaatgataatattaagtactttagccaataattgtgactactatatcaagatcaattgtgatgtagcaatgagtatagtgattgttgtggtagctaaaatttattatgtgaaaacaatttgggtcaagactagaagatttttctttttggatcctatcgtaggggaggttgcttgtgttttaggtttagaaactgatattgcttataaatatgatcgcgtgattgtggaatgtgattctttgaatgttgttcaagctcttaatggaaaacagaatagatgggttatagctaactatacccaaaattgtaaaattgttgttgatcaattattggaatgtaattttgtctggattcttcgtaattgtaatgtttgtgctcacaatgttgttaagtgaaaaaaattggtagtgtatttccgacaaattgttgagggttgtttgaaaaattattttataaaatactatcaaaacaaaaaaaaaaaaaaagaactactatttgtatcaaactt

SEQ ID NO: 188422 - DNA, 2255 bp, Cannabis indica
attccattcctctcttttctcaacctcagctgtctgagaacaacgaagagtgacggaacagatcgtacggagcccacaaactatccaacggacatggccttttggagtccaatctcagccatggcttcccttttccgctccaatggagtagactcacatgcccaggatgtaggtctctacaaagacccaccagattgtcacccccaagcccatgttggttccacctgtgctccactctctcaacgtcgccggcgaaaaccagtagaaacggaggcaaggatcccagctcgtagatccggtaccgtttctggacccgcatccagtgctctaccttctccgtatacttgccttcacgccatctccctaaatcgatcaccatcacccccgtgttgaaataacagggttttcttccccgaaacgacgccgtaaaggccgggtttgaccagaatttttgggtgaaatagtttgtgaagttggcgtggcagtactctggtgctccgaccacgtggcggcctaaattgatgccccaaagctttgccacgtcatccacaacaattagatcagaatcgaagtaaatgatgcggcgaacaccggcgggtaagaggttggcgaagtagatccgcgcgtagttcagcggctggtcgagggcgcgtcggattgagtaagagatctttccacggaccaggttggtgtcgaagtggtagaggtggaagctcaggtacgggaacgtggcggcaatgactcgcctgagttcggcgcgtcgatgcgtggcgatgaagtggaagacaatattctccgggcacgaagcgtgttggaggacggagaagacgccagcgacggagccgcgaaggtaggttgcatcgagagtcatagcaatgtggattaaggaagggttgtaggagttcttctccaaagctgaagaccatgtcgttttgggacattccctgccgtttcgaaatgcaggtgcctctcgaaatgccggaaggtcgccggagcttgttgcagtcgccgccgccgtcaatgttaaattaacgacggcgacggcgacgatgaagaaaaatgaggaaagaatattgtgtgtctgaggtggcatggtctcttattcttaattgataagaaaatagataagagaagaagggaaaggagcaattaaatttaaatttcacttttctttatcaaaaaaaaaattaaatttcactttttttttttccttttcggattccttttgcttcaggtaagaggaaacgaaatggagaatacaagggtaaaaatataatttgaagaccaagtgggaccggagaattgagttggagcgagatcatagcatagacatagacacaggaacaaaggaaaaggaattagagaaaagaaaagggaaagttgagaaagccaggctggaacgcgttacaatacgtttgtctctgtgtataaatgaagaggagcgtgtggggcgcaatctagtggtggtgattccacagtagaaatcatgagcttgtttttggcatcgcacgtacacacgtgcatgcacagtatgttggttgttgggccttgtacggtcgtctctgaatatattacacgtgcacaaaatacgaatatgtgcacgtagaaacatattctttcttgcttgctagactaataagttttctactttatttttttaatttattactattaactatgttttatttattttatcttaaatttttacaatatattatatatctacttctttattttctttctataataattaaatattatatttttaatatattttatttattttatataaataattcatataatactaaattgtatttagcttaatgaatagttattatacattgtaaacttaattttgtaactttttctttataatatataaattgaactattttagatattagagtgctcttataataaaactatgagaaatactaaaaaacacctatactattgtaactcaatattacaatttaacttgataacaatgctcatgcacaaaaagaatctgagttggttctctctccacttttcgaactctataaaagcccacggttttcatctcgctcaaggggtcctttctgattcatattcttgatttttctgaatagatattgttataccgaaatttaaatacagtaaaattggaacgaatttaccgatagaataatctggctgagtcgcggacaatgtcgctctcttttaagacgtttcgcggctctgcccggaagtgtgcacgggcagtctagcaa

SEQ ID NO: 188423 - DNA, 2152 bp, Cannabis indica
acatcatcatattattattttttcaaacaaaatctcagaaaatgtattaacaagggaaaaaaaaatacaaggcaaaagagtggaaaaaactctgacaaaacaaagaaaaaacagtgacattggatgctgctattcactacaaaaatcagaaaataaccatttgaactcttttacattgtatatataactacacagcaaccgagtctttattttgttccataggaactccacattatcttccttactttaaacaattgcgtatacctctctagccacagtgctcactacgtaaccattacagccacttttcaggttaaaattttcctcttaccgcccactgtatacaataattattaattaggacctctaaacagtgataagagtgataagccatacaccaattcaatctgacatctctgaatactctgagccatagttctaatcagaaactaacatcaagaaatacgtgatcatttcttgaacattatgcaatccaaaagaacaaaatagggcgattcaaattatcgataataaatcaacatttttctaaaataatgtttaggtaaaaaagttgaagtattttccattaaattttaaagaacttgcctaccagcagaactcagcccaacaaacacaagtggctcagcaatacggttcttcaaaaaggattgcaaataaacatgatctgaacaaagttcatcttttttatttacatgccctgcagaaactagctctgaaatttctccacacttcttacatgaaaactgccattccacaggcagaaaccagaagccacaaacccgaacagctgatggccagtaatctgttgattacatgtaatcatgtgacaagaaaaattgaaaaacagaactaataaatcggaagtgttgaaaagaaaaaggtatcaaccatgaaaaatttaaggcaaatgatgcactatttttcactaaaaaaattatagacaaggatcaaggaagccactgaacgatatttgtggattaagaagggatctctatctttctgggacaaaatgacataatattaaagaatataggagtaaagtataccggggcattcaacaacttctttgctaaatccgtacctgacaagaataataatgtatagatgttatttgcattgaaatactactaattttagcaattgttcaaaaatcgatagagagcaacattgttcttaggagaatacttccaaattttcagtagtatcattcagtggttttgcctcaagaatttggggttcaatatactagcccatccctaaatttgacatgcaattcctactttacacagaaattaatagaattagaatcattgaaattcaagggtgagggtgcctaatatgataagtgcaaatacaaaattcttatttcattaacatctccacaaacatagaagttcaggaaataacattttccttctccacatttttcttgtgctccaattttttcctgaatattacataaagactaggacttacaacagcaagggagatgaagacctattatgccattcaggtagacccgtcactggatcctgagtttagcaaaataaacaacctttactacgcggacatcaaaatgaaccatgaatgttctgacttctgacaatactatatagttgaaaaagtagttgtgatacaatgaaatgtatactgttttcaggttaaatttatttattgttgtaatgtactgaaacgaattgaattaactgtaaaagggcaggaactcagattcaaatcacgcctccaagattcccagtattcagtgtacaatggccacatccaatgaataacgtcttcccaacaaacctacatatgaaattttgaatacaaaactaagacaagaatgttgtatgcatctcgaaaatttaattcacgtttatttaaataaaatttaaaaaaataaatggaaaactcaattcacttttcattgcattaagttctgttaaatcaactaataaagtcacatcacaagtagcaaacaatttaaaggaatatctccactagaactcatgacataccttgtgcctgggagcttccagtagatatttatacagcagtgggtgttcttttctgaagtggcgctcatatgatgatggtgcactgcatagaaatccaagaaacaaattaacta

SEQ ID NO: 188424 - DNA, 2695 bp, Cannabis indica
gaagaagaggagacaagtatttgagaagcctttgctcttgtgaactctaagccacaatctttgatacattttctgattttagagaaagaaaacacatatacaaaagggtttcttttttctttatttcctccgcatttgaaggctctctcaaacaaaataccaggtgggttttcaaaaaaattcttactttattttatgggtttaagaaatttgtttgattctttgtttcttctgatgtgatattggatttttggcagtttaaaaattggttctttttactttcgatcatcttagtttgatcttgacttgggctatttattttagtattattttttggtttgggtttagtattttcgttttttgtttggggctgattttgggatttaagtgaatgattatgttgggctgatgattcatctgttgttgacccatttgatgcatttgaagtagggactgactggttgatcgaaatggatttttggtatctgatcttgtacttacttcatcctttactcttttttcgcatgcaagttcaaattaacatctgggttttggggtacagtacaataatcaaatgatcaagtgtgctttcatgcataatatttcagatggaactgacattgttggtttttttagatgggatcaacatacaattgattatagctttatggtctcatagcttcttaagtggctttacttggttttccttttcattcttactttatgctcatataagcagttctgatcttgaccattgggtaaatgtttcttgagttcatctccatttgtgcttcttcggattgccttaaatttcactatactttggtgaaagtttttgtagttatgctcccccttttcccccaaaatgaaaaagaaataaatgatcttggggaaaattatggttctttattgggtattaaggaaagccatccgtttctttaaatttatatttgtgtgttcaattagttctaatcttctatgttttgttgtttgagagttccattaatgtttccattggtaggaacccttttggtattgcaagttcctcttcatatattcgcttgttttagattctcatttcttaccttttgcatattcatttatatcatttagctaactaagattttttcattatgccttgtgctcattgtttatagtttccagtcattatttatgcacttactttcaagtctactcctttgcaatatggagttgtctattttatgataagaggactaaggttcatagattgtccatgatttacagaaatggccagatgaagaacatgtatgcatgattatctaatggctgaatccgattcagagtccgatgcccagtcagatgtgtcgagcctgaggcatataagcagctcacttttcaatatccctggtttctttgtagggtttggaactaaaggttcatccgaatctgattcaatcaggagtcctacttctcctcttgatattggagttttttcaaacttaggaatcctgtaagtcttcgatatactcgatcatcatctgaaaatggacataaaaagaagtggaattgcagtaaagtagtaggccttggcattgtcaattcacttgttgataatacaacaggtggcggtcttgatataccaaagcagaagaacatacttttcggaccccaagttaagactagtaccactaattccttgaaactttaccatggttcgctcgattcttcgttgaaatccaagtcactgccaacaaactacattgcttcaaggctttctgaaaccaagtatcctagtccccatttggttagcagcagtgttgcctttgataatgaaattccattaaagcctgaaccattagaaaatactcaactatgtttctcggattcaactattccttcttcactggtcagcttgacctacaatcacaacttgaggtctgaaaacttctgtccagaagttaaaactagaatgagttcaccatcagtaattggctcaacaagttcagaagtgaaaaattctttggatatcaaaacaagtactcttccaatacctattgagcccagccagggatttgtgggctctctttctaagaaggagatagaattgtctgaagactatacatgtataatttcccatggtccaaatcccaaaacaattcatatctttggtgactgtgttttagaatgtcacacaaatgagataaacaattttggcatgaaggaagaactgggagtcaaatcacctcaagaagctaataactcggagggattagcccctattccttctgatgaagttttgaaattttgtcactcctgcaagaaaaggctggaaactgatgaagacatttacatgagcaggtttctccttctcatatgtctatagaaatcttcacttggtgtttatattatttttagtcatacctgacataaatatgtattcttctctcaacagaggtgagcaagccttttgcagttttgattgctgccccgaggagatattggaagaagaagcggagagaagttaccataattctgcaggaagctctcctggttcaagcttccacgaagatgtcttcttgttgggcatgcccgttgccatgtgatggatcatcgacaatgctttttccaggtttctagatcgtccgttgataagaagtgctgtctgtgtgattttgttagcagccatggatgatcaaaaagcattttgttgttt

SEQ ID NO: 188425 - DNA, 4338 bp, Cannabis indica
tatagtaaaataataattaattgtatgattttagtaggagtttaaatgctttggattttagctatttttttccctatgtggagtggagtagtaaaaagagcatgattattaattcttacttattgatggagctctctgaagatgtatttagttggaaaacttgccattatgtgagtgatttttatacttaatttgggtttatgattatgtgtgtaagttttatattgtatgaagaaatgaggcatacttggaaatgttggggctgtcttgaatatttggttgtgtcatgttacttaactataatgacatttttaatgccttaacatttcgaggatatgatccaacactaaatttttttaatgttatcttaacaatcttctgcgcaatgtcaaaaggtagattattggctggttcttgttgtggaggacaactgtaaagaagcaacctttgatgtacagatgagcagaaccaatgttattggcagtagaaggaggaggattcttctcatcttcggcttctgggtatagcaaaggtctggcccttcttctcttgggtcagaagaacaaggacaaacccatgagagttgcgccgtggaatcagtaccagtggtggaccaagaatctgaccctgacctccagctggcttctacgaagaaccgactcgcccgcgggtgtgcttcctttgtctgctttcgtcgcacttccgctgggcttgacactaaatctcctcttaaagtaggtcctgcccaacatcaggatgtcttgccagattctcttgcttctgatagtgataagaacaaagatcatgcagccaatacagttgacagtgacgatgcaagtaaagtttatcttaaaagtagcttgaagaagtcatcaaacactacttcagtttctgttgagactggatatgacagtgtaaggctcagtgaagcaggcagtgatatacctggcacagaaagaagaaaagtgcaatggacagatacttgtgggagtgagcttgctgaaatcaaggaattcgagcccaggtatggcattcttataatttgttcaaggttttgatgctttccctttattaatttatgctttaattgtcctttttttgttttttttttctttctttctttagccttttctttctttctttctttctttctttcttttcttttttacctgtttgattttgtccttttgttagttgattggacttataataaattaataatgtatgattcatgaatgtatgtgtgatttgtcattgatcatctgagtttcattggactgtttgcctttaccaaactggtgattgtctatttataattaagcatgttgtgtatgattcatgcaaataaaaagaaggcttttctgtaggctttgtttattgttcaccataggtaggaagagaagaacaaagatagataaaggaactgataaaataaagggaatgagaactttggactgaaagataatttcatcttatatatcatggttgttatgttatgtgttgtcatatgtgagacagatatagaagttcacaagtgttttttttacacaaaattttatgttttgtttggggaaaattgattgtagttatgataggtgtctgtcgttccatgtcaaggttttagtgttattggtagttaagttttaagaaaacaagttattataaatactgaaaacctgacaaaagtaagctcagaaaatcaataattggtctgtctgtgttggagataaatgcaccaaggtttttgttggattgctcattttgagaattttgtttgccaccgttgtgaagaaatttttgaaggtacaaaatcaatgattatagtgatagaaaatgtggaaggtctacaagagaagtatgataataatgttgattaaagtaaacaaagagtttaaatgtgagattccttgctacaggaagaggttgtatagatttatgagaaaaagccaagaacacaaaaatcaacatgggtatactgtatattgcggaagtgaagaagttaaggtgtgttggagaatatgggtaatatacattccataaaatgatatgcaattaggtgtgtggctaacgacaatgacaaaaagttcttaatagccttatggtttcagagttattagttttgaacattttgaaattgaggtaaagttaaaagtaccaactcttggagttcttatttgaacctagtattcccaaccaaagtaatgaaaactaggagatatgcatatccatgctcttttctttatcattcaacgtttcttattggagttgtttcagatatggaaccatacatggcatgattgaaaattagtctctagctattaaggtaatacactcaggaatctaaacctaattcatatttaaaaggtgattatgtgttcaagataataatattcttcttttcacaagcctttttttttaaaaaaaaaaaaatctatatcctatttggtcatattggagttttgttattttagaagttggagaagagctccattaaaggaatgagtttgtacatatattgagagcatgatactattggtgatccacctcctatttgttttagcatttggaatggattggtattttaaatactagcataatagcctgttgggggcatgaacttgagtttgaatcattgcaatttgcatctcaaactaagttcttcatatgttttatcaaaaaaaaaagttcttcatatgttggtccaattgtttgtttgtatttatttcttatgaaatgaattgatcatgtaaacagtactgcatttcccttttgtttcatcatcctaagaaacaccaacatatttcgatgaaaaagtcatttagtgtgtttttgcttgttctcattttgtttagtgtttataccttattatcattccaaaagatctgttgtattgacataatcccccaagttcatgatgctgtttctctaccatatatcccttcacaacatgtcatttagaaattaataactcgtgatcagaaaaccatgctcactggcctttgttcaattcttgttcgatattatttttgtacacatcaatttctgtagtctttgttttaatctttgctgacatgcaaaaacattgatcacttggcagtgaagtggacctatcagacgatgaatatgataacgggactgaaagaagttgttcgtgtgcaatcatgtagtttggttttagttgaggtgacatggggatttgcctcggttttcattgcaacgatgaaaaaagtgaaattacacagctgaaggagcttgttcatcgttcctctgagctagtcagattgattgatttctggatgaagaaacggggaaaccaaacgagtttttgatccgatagagcaaggaaattcgcttcctatttgtctatattcagttgctgagggttttcaatattttttttttcctcttgtgggcatattagccatttatggttttgtttattttcttaagctcatgtatgtgtgactgtcttgtttatttcctttgtcgtatttattgtgttattctttttttggtttctttcttttctttctacttatgttttagaccaaagtttcagtcattcccctcttctgtttttggttctcttctcttctaaaaaaaaaaaaaaaacaaagctgctatagagtgttgttttattacttatattaaaagttaaaactaagaaatcgtacggtcaaaagaaaaacttagctatgtagctcttgctgcttattgaattttgtaataaaattttagaaaattcgaaatattttctaactctaaaaaattatattaataatttgttacacgtttaactgcattttttaagtttatattttgtagtgtttcgaaagctattatgtaattagaatttagtataatttagagtaattataaaatttgaaagctattatgtaattagaatttagtataatttagagtaattataaaatttgacgtgtttgttcagttaggtatttacatagtaattatgtaactggcggtaattgaagagtttcgattatattctttaattttggtcccttatgaaaattaggtataattacacaatattattatttttagattattattaaaatatgtaatactaacttattgcgaaatataaaaatatgtaattattacttgacattcaaacacacattgtgtttattttcaaaaaaaaaaaaaaaaaaaaaaaaataaacacacacattgtgttagtaattacactatatgatgtgtttggatatgagatagttattatttatgaaattttaatatttcatttaacaaaatagtttgtaattatataagaaaataataacttatagtacttaatatttaaaataattt

SEQ ID NO: 188426 - DNA, 797 bp, Cannabis indica
acttatttttagttttttttttttttcaaatttacgtttgagtttctaaagtggttgcagtgttagttgcaatatgggtttctatacgattttttgttgcaatttaagttgcagcgccagttgcaataaagtttcagtgtataatttcgttaaaaaaaaaaaaaattgttttgaagtgtaaatgaaaaagtatttttttttctttgtataggtggaccgttcaacctacctaccaattaatgatcctaaattttaacacaattataaatagttctttttacaatttaattagaagataaagctttctagaagagaagttggttaatcacattttagtctcgtcttattaattactcttgcctttggcaaaatttcaaggtggcacccaggtttggacttctttgaaaggagagtagttgaaattgggtactacttaattcattataataataattaaaaaaaatatattaaaaagaatggtcataataaattaataataatccctcaatattttattctaattgtagtcctacagttctggggtcatcatcatcacttcacttctaaaatacaatggttataaataaaaaaaaattaaaaagagaaaaaaggagattaattaatgatcagagtccaaatagtcaattaagagtttgaagggagctcttgccagttgcctctgccaaaagggtcatctcatctttcatataaatttctggtttttctttggtttttgggtaatttttttgttacgtgactttgagtttttgtgacagaatttggtccaagatgacttc

SEQ ID NO: 188427 - DNA, 2184 bp, Cannabis indica
aaaaaaaatataccatgttgaggaaatgagaagaaagacaaaaattagggtcaatgaaacgattacaatgactccaaggcctgctgtatatccaagaagaactcccaatggaagcccgaaaatgtaataacatcctaagttgatgtaagccaccaatgcttgccaaccacctccaatagcaacacctttaagtaaaaaaagaacaaaaaatatcatggtcaaaatgtacttaattgactattaatttatgacctttttaacaaagagattggtacctgaaatgactggttggacactgttgagaagcatggtgataccgagaagatatgcgaggcgagacacagcttcttgcacttccttgctgttggtgaagatgactgaaaagtcatctttggttaacaaaattactactgcaaagaatatcccaattaggagagactgaaatactgtcacatatacagagtatttggctcccaatggacgccccattcctagctcatttgaaactcggacactgaaatttgagagaaaatcgactttgttagctatgcagtatgtaccattatgggccatcgaactagtttttgtatgtttggaaacttttgtgactaatgtatttatacctgatggctgcattgattccaataaacaacatggcttcccatccgttgagattcatgctataaacatataaataacacaaaaggactgttaattaagagtttttgattcaattcaaaacattgcactatcaatagtatagacttgagcaaatgttacaaatgaaggaaaacttttactgtaaggtttatgaacttaccacacagaaagggaatcaacagcaatcactgcatttttaaggtgaccagtgagaacaatcacactcatcaagtaccaaatctcaagacaaagcatgacagctgaagcaagagagagcctgacaaatgcccataactccttaaatgccagcattgaaaaaccactccaaccttcattacaccaacatatcacatacacaacttgagctatgacaatgagccaactggtgagatcaaaggccacagctgcaccagtcaaaccccaattgaaaaagtaaatgaagagccagagcagtccaacatgaagaaccatagccacaaagccaatccatgctagagcattgactttgctctgtgcttgaaggaatttctgagttgggaaattgacagcaagtgagaataactgaggaataactagaatggtgaactttcctgcaagatcagcaacatcatctgcttggccaaggatcttcaaaattggtgcagcaaaaatataaaagggcaagaggaaaaaacagctgactagtaatatcagccatgaacgctgcatgtaaatcccaagcatgtggacttgtccagctccaaaagcttgaccacatagcgtctccaacgcacttcccattccaagctgcaaaagttgatttttcagttttagaaatattaatgagtgaaacattattgtttattccctactcactatagtaacatattaaaaggaatattgaaaccaagattgagtgtttagttaaactcaacaataaaatttattacatcgaatctataactcaaatatataaataatcaacagaagattgtttattcttacaaaaaaacaaaacatgagattgtttataatataatatatctataagcatgcatcgtgcattcaatattatactaaaaatattaatgatttccaagaataaatggaaaacccagtttccaaatttggatttaagggatttctaaggcattaaaatctattaaagggaaaactaagcaaacataataaaacagagagagagaataagaagaagaactgaccatgaaaccaaaggaaaaggtaccgataacactgagagaaatggtaacggcagagagctgaagctcaccgatatggccgacgaaaatgttggtgagggaattgatgccatagttacagacaatggtgcaaatgattggacccgcaatcgtccatagcttgacggactctttccagaacacattacgcacgtccctcacactcaccactgcctcgtagtccttatcctcctcctccgggccggtgttctccgtcagcagtggcactgccgctgcctcttccgccgccattcgatcccttaccagtctctctctctctctctct

SEQ ID NO: 188428 - DNA, 675 bp, Cannabis indica
tagaagaattgtcactccattctacatgctattccattccatccatgcacttaactttcctttcttccataacaaaaaaaaaaaaaaaaataatcttgtcacatgtgattttgggtcaaaatttgagataattacaaatttcaaaacataatatgtgagtaaggtgcatataattaataattttattttaaaatatttttttttcttaattagaatatgtgaggtgaaaaaagtaataattaagaggatttttttataatattgtaaagcgccaagagattttgggttggtaggggattttattaaggaagagctaggaattaataaatatataacgttttgtctaattaatacaatacaatcataataagtgatattgtttaaggtctaccaacaatatcaaggcatgtttgataagatttagcagcaatccttaatgagaaacagatcttttttaatatacatttttccaattttgtgttcacctttttttagtttcctttggctttggattcctcatataatatagtttttattcatatgcaagcatgtgctggctattagtagtgcaattatgtcccaaaagaattatagcataaaaacagtctcacttaattatgtcacatccaaattataacacactgagctagctatacatatatcagccttgaaaaa

SEQ ID NO: 188429 - DNA, 1695 bp, Cannabis indica
aaaaaaaaaaaatgaaagtggaaagaaaattcctaataaaactaggatttagtgattacaccccccacaatgcacaacttaatttaaaagagcaaaactttaaactggacagaaaatactaaataaaaagagtaattcaaaacgtgcaaacaaagttctactaaaatccccttctcctccttaattaaatttaggggctaaagtttatgctgatttgtttgcaattaaaaataccaaaatctttctataaatacatctacacgtatgtgcgtgtatatatataagttaagaacactaaaacccctctccctccagaaaatcgccaaactttccacacttaaaagaatagagggtttggtcactcacagttgttaccaaaaaaaaccaacaattccaaattccactaattcgagataaaaaaaatccaataaattaataaacacaaaatacccaagaatattttcacaaattcgaacccgtaaattcgaggaggacatattagcttagatcgttaaatacaaaaaaaaatgcaaatttattctattaaaggatataagggcatcgatttgtgacctggagattgttgtgggaggagggaggaggcgatccatgacgatgaggcgtgggttggtgctgagtcgagtcgacccgagccgctgaaatgagaagaagaagaagaagaagaagaagaagtagctgaaggaagaagttaatgtggatgactacgtacaccctctgctgctatgtgtatgtggttggtggggccacgtggtttccaaaatttgcacgtggacagtggatgggaatggcatgcattcttcttttctttttttaataataaactagtttgggactttttcttaaaaaaaaaaacttacaaaaatactaaaaaataagaaaaatttacaaaaatattgggacacaaatatttttatatttttatgtattaaaaatattttgttaaaattttaaaattataaaatacgtactgtgtttcaataaaataaaaaaataattcaaaataactctagaacaacttaacaaataaaataaaaacaacaaaaaataattataaattaacaaaaaataataataaaatattgacataattgcaataagcaaaacaatatcagctcatcaatatgtttttgtattacgatttttttcatttagttttgataacttgatttatctatttatactattatattattattttttttcattgaaatttgttgttacaacgttattctttcaacgtttttttatttttattttttctttttcgttttgagttagtgatagtaaaatgataatttatttttaagattctaaagtcggtggctgcaaaaagtgaggttgttaagttagttaggcaataaccaacttaactaactctcttttgagtgagatctccacgtcagcataagtatgaatgcttctgggagcatatatgagggcttctagaattacgaaccaatgcattcgttgaaggaacttttcgaataggaaagagccagttgaagttgactatttgaaaatcctttctaggaggaacaactagccatccaaaactcctttctagaggaagattagctttcccaaggacccttcctagaaggacaagaaagccttccaggacctgcttccgtgagtcaacaacgttccaaaaatgatgataacttttggaaaacc

SEQ ID NO: 188430 - DNA, 1484 bp, Cannabis indica
ggttggactaatatagacccattaggattaatttggtgcaaaagatctactcttgggataaaatacaacatagtttgagttattaggttgagcaggtgagactcaatttgaatttagatatcttctgtacacggtcgtactattgacagtaacaggtgggcgtatgccattctaaggaatacagaatattagagtagtgggtaaaaagtgatttctttttgttgggagcctttctaaagttgcttgatttattggaatcgtttgtcggaggagtgcagtacgtaagaaacccccagaaatgatcctgagcgcattatgtttctggatgaaccctgaagatatctgttgagttcacgtcatttctcttgttaagtgttgatagtcgattcgaaacttagtgtctggattcacttctaggaagcgacatgaaaaccagaccagatgttcgattttacctatctttaattgatggatcgggtatgttaatccttaccgaaccagtaaatgagcttagtatttttgataggcctccgcaagggcccactaatcatctgaaaacacagataacatctaaaacaaaaacaaaaaaatcatctcccaatatataaatatatatagaaaaattgggaatgagtcccctaaaatatatttctacatatataatttccgcatataatattggagtgtggaggagataagggggtgtgtgagtgtgtggcctatatacatgttccattctaagtctcatacatcatatcatataaattatattcaattatatatataataatatgtatgctacttaataatgtatatctataataccaatgaacaataaaaaaacaaatatcatataatatacctatatatacgtacatgtacactacattatgtgtatatatagaagaaaataaaaattaagaaagagtaataatattgatgtattaaattcaaggaacagtttttgtgcacattaatgaatgaaagctataatcatttatttatattatatcaaataaatattggaccatgcatatatatacacataaaatttattacctgccttagtagttaaattaaacttaaaagttaagggtatatagtacatttttttatttttttttgtttgataaagaaaagttgaggggtcattttaattaaatatacatgatacacgtgtcatgactatatattttgtgtttgagggccagggaacaacattattggtatacataaataaataaaataaaacattaattaatatataaaggtaaatagaaggaagaaataattaaaaggcacaacaaccaaggctagcttatttattcaaaaattatccagtagtaattatttttaactataattatatatttgtagaaacttttattcttgtattattttttacttcttttgtaactaaattataaaattataacttatttatacatacactgataatagggaaaaaaaataaaaaagttata

SEQ ID NO: 188431 - DNA, 770 bp, Cannabis indica
tttttttttttttttatttcgtggctggcacagagacatttgagtttgttgcagatttccttaaaacatttcagttatttcacaattatctgttgtcgttttcttttgttttctctcaacgacattggactcttacaaatattacttgttttgttgataagttgagttcatatgtgtgcaactagtttgtattgttgagtacgttgcgttcatttatatatatttttcttgtgaaaatttcaaggtattagtactcttgccagttatatatataaatatatattttataaaatcacactaaagataagttatcacagctatacttttataatttgtaaatatcatgttatgtatacattaagtagcattaagtaaataaacaaataaattattgcaaatttaaacgaaaagtttcctttaagtaacgaatgtagaccacaccgttggacaaaattaattaattaaagagtaaaacgtttctcagaaccaatttaatatgctctcattttagctttggaaggttttttttttccttatttcctcttaaataaatcaaggacaaaatgattattattttttgaaaaaaatctataatgtactatttaaataattatttaatgtatattctgttcgcaaaaataattttttgaaacgtgattacaatatgtaagactttctttttgtatttgtaataatcactaaggtggcaacacaagttgaacaggaaagcacgattcgaaaattcaaagctcggtcttaatttttttttt

SEQ ID NO: 188432 - DNA, 7452 bp, Cannabis indica
gagttctcctgtggatcccaatctcttctagtttgcaaaataacatgaaaatgaaatgataatataaacaagccataaattaattatatgaaaagtttccagaaatcagaaataagagttcacctaataagaaagcaaaaacaagtagaaaccataatagaaaagtgatagcatacacagaaatcagaaatgagagttttcctaataagaaaacaaaaacaagcagagaccataatagagaggctttgatgagaaaagctgaaataccacattaattatctcggaaggctgtttgaagtgaaattacgcaatggattctccctcaacagttgtgtttctgtcttaaggtgttggtcatttccctgtctaagttgaaaattcaaacccctgctgatgctgttgctctcaacatcttctttgggcatctctttttcacattcttcatctacaaaaacctcaatgcaattactacctacaacggttcctggtttttgagaaaccttgtacgctttccacttgctaggcttgtcattattctctttgtttctctctgctcgagatccaagactcttccaagaagaagctgcctccgtctttggtatatcaacagcaaaacttggatctttgtatatgttaacaagagaagaagaagaagaagaagaagaatgacccctacctgtggtccttattctgttttctccagtagagaggacagtgccaaagcttcggagtgacaagtttttctccgtagagtcaccgacattaggttttggtcttctcattgagcgcataagaaattctgtgtatgaatccttgagtgtttgtatcggttgagcagtcctcgatataccaagattaaatatatcattggccattttcatcttgttcttggattccatatgcctagcataggatatgtagtatgaagcatgtgtcttcccgatttcgtttgtgtcgagaaaactgtatatgatttcagcatcgctgcaattttgtgcatattccaaccacactttcagataccggagatcatccttgtagcgatctgaatgccaaaaggtacgaacacattgttcgtaaatcacaaccagtccagaactatctccaccagaaggaaatgcttcctgaacccacttgatgcactggagccatggatggagaggatcatccccagaataatcatcgattgcttcaatcagtttctttcgttggtgaaggagagagtccttgtgaaaattgctggtctgggacttgagagcctcgttcaaggtagcaatcttacgacctctcttcaaaggccttacgttctccttaaagagctcccactcattcccagtttcttgctttgagagaaggaactccgtctcgggatcgaacttctccattatcgctttgctttgattttacagacagaaatggtgagaaggggaagtcttggaatctgagtttgaattttcaaaaatgctaaggcgccacatatgatattggtggaccaataataatgctttagaattttcctaaaatgtacatattttcaaatagtgtcgtctgggatgcttgggggtattattgtctaaccctaaaattaaacggctctgatccgctttgtcgtcgtctaccccatcggacggtggtggagctacagatgaggacacagacgaggtggagagaacgcttcccccttgacggaaccagggctttttcttcctgggatttccgattccgagttcgtgaagcaaaaaggcccctgggcacctcttcttgttcctaacaactatgcggtcatctgttttccccattctttacagagcaaagttgcgaaagtgtagcgttgggcaatcggtaattcatgggccactccgttccttgtttgcactcaatataggtatgtatgtatgtatgtatgtatggatgctctctttgttaattgttaatatttctaatattcgaatctctggaactaaaaatacttctgtaattgacgtacagagaaaaagaccttgtaaatgttgacgaatcaaatgaatttcagttgattcactcattattatactgaaagaaagaaagaattggttagctgtattcatcaatagttgtttaaacctaatgtagttgggataacggtctttgagtttttgaaatggactttaatgttatttcttaagatcatattttgttggtttctttttttaacttgtaagtggtgtaatgtataaactgtattgactagtcatttgaagattgttacttgaaggttcttccaccgataagtaactctgtgatgaactagttgtattctttgcattcccactgcttggttggttcagccccttttttaatcctatggcagtatatttgtgtctgcttttctttagctcaaaataaagcattggaggaggttgacatgtttcttctgtaactttatttgttttatatttcccttgattaactccttattgtaatgaaccattgcattaataaggattctgtcttagtaccaggtaaacgatatgaaagaggtcaagagcatgttaatttttccacttttgcaacaactgatgatataaatctgggctcggggaagaagatgctggcaacaaacttagcctctttgttagaagagtgttcagaaatagacgaggggaaacccaaaagtcgaatggaactcaagaggttttttgaaaatcgggtaaagaagagggtgaaggagcagtatgtgaatggtaagtttcaggacctaatagaaaaagtaattgccaatccagaaactcttcaagatgcttacaattgtataaggctaaattcaaacgttgatataacaacgttagacaacaatactgcctcttttaaatccactggtgaagagctgttctgtgaaaaatttgacgtcaatgccaatactttttctatttcaacaaaaggggcaaagaaagaaatcttagtcctgcctaatcaaaaactgaaaatcattcaagaagccattagaatagttttggaagttgtatacagaccccacttttctaagatatcacatggttgccgtagtgggagggggcacttcactgctttgaagtttataagcaaacagatatgtgctcctgattggtggtttacagttctcatcaacaaaaaggtagacacttgtatccttgataaactaatatcagttataggaagagaagatagatgaccaaaggctattttcgattatccggaggatgtttgattctcgggttatcaatttggagtttgggggtttccctaaaggtcatggtcttccccaggagggagttttgtcacctatattgatgaacatataccttgacctttttgaccgtgaattttatagattgtcaatgaaatatgaagctctcagtgtagaattccaaagtaatcaagaatctcagtctcagttgcgcaattggtttagaagacacctgaaagccaatgatctcagcagttcagggcaagaaaatttcagctcaagtgttcattgttgtcggtttatggatgagatattttttgcagtttctggttccaaagatgttgctcacagtttcaagtatgagattctaaattacttgcaaaagtctttgcacttggatattgatgataaagcagagctgttaccatgtgcaggtccacgcggggttcgctttatgggaaccttgctcaaaagaacggtgagagaaactccagcaacaaaagctatccacaagttgaaagaaaaagttgagttatttgctttgcaaaataaagaagcttggaattctgggacagttcggatcgggaagaaatggctggcttatgggctgaagaaagtaaaagagtcagaaattaagcatttggctgatcctgaatctgttctcagccatatttctcattttcgcaaacctggtatggaaactgatcactggtataagcacttgctgaagatatggatgcaagatgttaaagcaaaagcagcagtgtgtgaggaaacactcctgtcaaagtatgttgcagaaccagccatacccaaggaactgaggaactccttctatgaatttcaaaggcgtgcggatgagtatgttttatccgagacagcttctactaaagctcttttgcaaaattctgactcgtctgtccaacccatcatcgatactcagataattgcacctattaatgccataaaaaaacgtcttgtacggtatggattggtgacaaacaaaggttaccctcttccatcttctcttctcattttacaagatgacatccaaattgtccattggttttcaggcattgttcgccgttggttgagatggtacagtgagtctgacaatttttctgatataaaactcttaatttctgatcaagttagaaaagcatgcattcggactttagcagtaaagtatcacatgccagaaagtgatattgaaaataagtttgatgtagaattgagcaggatcccttgctcccatgatattgagcaagagatggtgagcgagacattggatgttttcgaaaaggatgaagcattaatgtatggaatttcttatggtggtttgtgtttgctgtccttatcaagaaaggtgagtgaatctcgtccttgcaattgttttgttataggctgctttgatccagcacaaagtgtttatgctcttcatgtaatggaaaggcagaaatttccaggatggaaaacagggttctcaagctgtattcacccaagcttgaaaagtcgtaaaattgggttgtgtaagcaacacttgaaagatttatatcttggtgatatatcactccagtccattgattttggctcatggaaatgagtgaagatagcagcatattaataaagagcaaaatcaagactcaggaggcttaaatcaccaatgagctttgtgtactctgatgaagtcagatagttagaagctgtctactctgggactaaaatcagtgattgtgcagatggtatcttggaaaaatcaaaatgggagcccgatttgtttgttggaggacatttggtttgccttgatactggctttgatgatcaagttcatactcttgagttgactcgttttctagagatgctggtagtgtccaagtttgtgggttgctttacggtcctgtttggatgctcaggctcttccagacttctacagtttcttctcttctccaccactatgaccaccaacctcctctaatgtgatgaatattgctacaatcatcacctccggcttccactccaccgacccaattatgatctcctccttagaatgccgaatagcaatactcgatgaatactattttttactaacagttatacaattaatttatactatgtggtgaaaattttaattttgtttataaatgtgtcaattttaaagtttgtgtatttatatgacatttcttatgttggattattttctgcactatagttttgtactacttaacaccatatttacattatttatttatttgttgttgagggtatttttattatttatcttacttaattgattttttttttttcctatttttttagatgaaaatgcatattatattaaatcaagagttcataatacaataagaatttaggagaggaggtatagcctccaaccaagtacaaatagattctactgaaaaagcatactttgtaaatgagcagtagtattagcagatctaaatacataaaaaatttgcactctagggaagttgaacactaagagagaggtatttgttaacatacaataaaaatcagaaacaaaagcttgagaggattgcaatcctttaaccactaaaagagaatcggtctcaacatagtgaactagtaattgaagatctttaagccatttcagaccatacactaaagccatagcttccattacttcaggtctaaaggtacttgggaaaggcatcgacatagcagtgacaatatcaccactacaccaaaaccagaggaattagtcatgttgttaactgcagcatcagtgttcaatttcagtctaccagaaggtggattcatccaaggtgaatctttgtagacaacacagagtggagaagaagaaatagaagattttgcattcgtgagctgtctgacagtttgaaattcatcaagataaaaaatagcaaagtataagagaatatcatgtatgtggttttggtttcttgctatgcttttctttatttctctcactctaaatactccaaaaggattgtggcaaattgctctaattttaagtgagtccatgttgcagaaacgtggagcagcagttcattaagattcattagcccagtaagatgattaccaagagaaaaggaaaaagcttttcaaacacgcttaggacgggtacaaaaaaacagagcatgttgaattgtttcattaccatggtggcacaaagaacacaaaggagaatcagctatgtgccttgtatgtaatgtaacagcaggcgtgaatggctcgtcaaagaaatattcgaacctttgatggaaatgtcagagcccaaaaaattttccaccattgttgagtttgcaatcgacttacactaggatgttgttcctgcaaatggatagccaaataataacctgatttgacagtataaattccattagattcatagtgacagatttgttgagcgtttgaggatgataatgtcaaagaaatactttgaatcttttgaacatccgaattaagaaatagggtttgcaagattggtaaattccattgacgtgatttagagattatgctagagactctcatattgagatcaacacctttgtaaattaatggtcgaaaatcggagatctcaggcagccaaggatccgtgccacatatgattttatgaccatcaccaactttccatcgtaagcctttagctagcaactctttaccccaaataatctcctgccatgttaggacgaatatgaacctggtccaacatctaagaaagacatgtttttgaagtatcttggcttaagaattcgactcagtagcgatgtaggatttgagacgatacgccaagcttgtttggccaataaagcctgattgaagtgaacaaaactcttaaaacccaatccgccttcaactttagaatggcaaagtgcagaccaagttttccaattaatacctgagcccgaagagttccaatcccaccaaaaattgttcatcataacttcaatttggttgattagagatttagagagacggaagcagctcattgcatatgttggaatggattgagcaacaactctatgaagaatttccttatcaccaatcgaaaataattgctcttggtaggcagaaaatgattccaaaaattttcttttatctccctaaataaaactttttttatctcttcctgagtaagatggaagtcccaggtagtgttcatggcttggctggatgggcatgagaagtatttattgcaaattagcttgaattgatggtagtgtaattggtgaaaaggacaatacaga

SEQ ID NO: 188433 - DNA, 1585 bp, Cannabis indica
ctgttttgaacttggcaacctctatactcaggaaatttcattcctggaatcctgttaccatttccctgtatgagtttaggaccttgttccttacatatctagatcaggaaagtgcaatgtaatagatcaaggtaccattgtatcaactacacatgtaatattcttctcagaatgtaatatttctaaagattagtgaggaagagcattaaactgaaatcgtactccaaataacaatttttgtttttttgcaagttttgctattaagttacaagctcatgcctttaaaggataataatggatgaaatttgttatatgcaaattctgaatatgtatcctttattttttgcagtttctcggttgtacctgcttagtaaaatatcatggtacaaagatttcaatcgtcacaagcttggatttcctttattcactggggtttactggatttcctttcataattagtagttttaataagtgcttgtaatgaaagctgctgctagtagtcctcatccttcaaaagaacaaaacccacaattagctttggagtttggagagtcagagattaccatgtttaatcctgtgaacacacataatagggaatcttaacatcatgataaaatgaatgaccatgggaatctaggttgatattttttctttttctttttccagcaatggaatcttggttgattatatctctcaaaaagcgcatgtcgtcatgcctgtcgtcatgttcttggtactgcaacttgcatccaaattatctatcgtgaataaagataaggaagttgccttgtgtggacataatgtcgtagcatatattgttcgaggttcctttggccactttattcttcactgaggtttttgattaagatgcaatggccccaagtaccacttcttctcgtatccatttgggttgaaagaacctatatggaacaaaacaagaggttgtggatgtggttatgccactcatgccagaatcaaaggtataccctttctttataccattctctctatgcacgtgtgaacccacccaagatgttgggaactaactataaataggagtatcataacacactatgagcaagcaaaagaggtcttgtggcctaacaaagaggtctttagctcactcactaaaagagctggagagacttagcagcaatagtagctagtttttgttctattatgatatctcatctatggtagccgtcttatcactctccccttaaggcttctaaattttggctatcgtaaaagcttggaagccttatagggggagtggctagattggtgccatgacctctctaacccaaggacatcagagcatagtacataggcatgttttagccatcgtctgttatattgtttttattaaccatttttgcttattgttgtgcttaaaggtctcctttcttgtagcaaaagaactacttatttcatgaaaatttgagggataatttgtcaatagtgagatgtcagaacatcactctactaccacctccacctaagtatacaaatataaatatgatttttattattttattttactttctgaagagttttgtttctgattattttttttttttttttt

SEQ ID NO: 188434 - DNA, 1086 bp, Cannabis indica
taaaattaaaaaataaaagtgtaaccaatagcgtcatctaaattaaaaaatatatatatattttttgacaatttaattgtcgaggaagttaagatatcatattcatgaatatatttttattaaggtgaatcatctacctaactaatttttagtgtttgtcattttacatatgtttagtgaaatgaaggaacaagtaaaataaaacaacaaaaaataagtataaagtcaactcttattagaaatacaatgacagcagcatacataacataggtggtcaaccagtatttaaaagatttataaagttgataaatattgttcatctcataattttcataatcaaagagataaaataagatgaatgattatgatgatcgaagtgtgatgataaagaaaagctactttgaagtgttggggctgtgttgtgcatcagaagtttcactgattgagaaaattgttagggctcttaatggagtcaaacacatctctgtcatcgtcccaaccaaaacactcattgtttttcatgattcccttctcctttccgattctcaaattggtatgtccaactttcttttttctttcttcttattaaatttttatttagtttttgttttgctcaactaagtgatattcttcaatatattagtttcttgatgatttgcttaaattatccttcaataaataacaatcgagtaatttatgtatgtttaagatattcgactacatctacaaacaaaaattaaataaatatgtacatagggaaacataggatattaaatggctattaaatatttgttaagaaaaatgataagagggtcataaccaaaaaaagtagtatatttttgttagtttatttttaataatgtgttttacacattttaatttaataaataatgtagaaaattatcaattaattatgagatatgtacataacattggtatggtattagatacttaatgctcatttgttaaagattaataagtccaggatctagtaaataatgttgtgttgtgaaaatattttcgatccatatatcaacaatttttttccactttacataatgttaccaacgggattcttattaaacc

SEQ ID NO: 188435 - DNA, 516 bp, Cannabis indica
aaacatgctcaatatcatttgataccgtaaaattataattaaaaagaataaaaaaaaccataaaactgaaaaattgaacagtataaaagtaaaaaatggtgtaaaaatcccttctttaaagggtgtcagatttgagatgataccagccaaatgggtcaaatgcaagtctgtttgcctctgtcatgttccaaagctcaccaaagctcaatttgtcagggactgtaagtgcatatttgctaaatgcattttctagattaattggcatgtacctgaaaaaaaaacccattaaaagaaaaatggtaagtaaatgatttctcattagattggtcaatattcatgcattaattttgtagagttgaattaattatgcaccttccttctgtgtcatatgttccagaatcactaccatgcttggctttgtgaatgttgtgaatatatattggaaggaaaggagatgggaaccatcccttcaaatcaacaaaaataataatttagaccataattagctctaacatt

SEQ ID NO: 188436 - DNA, 3131 bp, Cannabis indica
aataatataatattatctaataagtttatatggttcatgtcgtgataatttatatcattttgttataattgtgcccaaacttatatatattttttatacggtcgtgctagtgtcgatttggtacaacactacagtcgggtcctggcccgttcttattgacctctatctctaactgtagcctgtgctgtaaaacgacacgtaatagaaagaaatgtgaataaggcataaacaaaacgacagcctcaatcttaaagctttgtttttgagtagcaaagcaaagacgaagtggcctcactcaaagacatgcttctgctgagcagcagagctcctcctgaaccagacttctcttcctcccttctccctctcaccctcccttcctctaaccctaaaactctcctcccatctcttcctatgcgcgcctcccatttctcctctctcctcttcctccgctctcttgccctcacccaccgccgccatgcttcctgcttcagccaccgctttgttcgaccaatctccacttccccactcttctgcgtcaccatgccccgtcaattcccctcggtttcttcttccagtacttatgtcgaacacttggagaacgaaccaacggaggaagaggatggtgggggtttcggtagtttccctgaaagtgacccatttgactccgaagaaaagttctcatcagttgatatgaagcacctttcggcgcccgttctggagatgaaggagctcgatgaactgccggagcagtggcgaaggtcgaagctggcgtggctgtgtaaggagttgcccgcgcataagacggggacgttggttcggatactgaatgcgcagaagaagtggctgactcaagaagacacaacttacttagcggtccattgtatgaggattcgagagaatgaaactgggttcaaggtattactttggttgtcatgagtgtccatttccatgctctctttctgtcttatcttatggttagttaggattaccttcttcttttggttcttagcagaagccaaatgttagtccagtggattcggattcaagataaccatgtgtgtgttatactgttccttagttgcactcggatggtaggaaagcgtgtgtgtgtgtgttaggttgcaatttattctataatggcatgagtgtataaagaagggtgattgcgtttgtagggatcctggctttttctattaatgtttcaatgtttagggaacttctgttctgaattaatcattataacaggttaatcaatctcttttggttcatcaaaatggtttccctctatcatgtgatcacaacccgttttgtttgcttatcttgggttaacaagaatgactacatttcgaattaattgctgttttgtaattcagtttaatttttataggtgtacaaatggatgatgcaacaacactggtatagatttgattttgctcttgccaccaaactagctgattacatgggcaaggaacggaagttctcaaaatgtcgggagatatttgatgatataatcaagcaggggcgagttcctagtgagtctacatttcacatattggttgttgcttatcttagtgctcccgttcaaggttgcttagaagaagcatgtagcatctacaatcgaatgattcaattaggaggttaccagccgcgacttggcttacacaattctctattcaaatctattgttaacaaacctggaagctctgcaaaacattatttgaagcaagctgaatttatttttcacaatttggtaacaactggttttgaggtacataaggatatatatgctggcttaatttggctacatagttatcaggacaccatcgataaagaaaggataacagcgttaaggaaagagatgcatcaagcaggtattgaggagggaagagaagtgcttgtgtccatcttgagggcttgctcaaaggatggggatgtggaggaagcagaaaagacttggtccaaagttctcaatcttggtggtgctattccgtctcaggcttttgtgtatatgatggaaatttatggaaatattggagatcctacagaatcattgaatatattcagagagatgaaggagcatttgggttcaaacaatgtcgcaccatatcataaaatcatagagatcttatgtaaagctcaagaaattgaacttgcagaatccctcatgacggagttcatgggcagcggtttgaagcctgttgttccatctttcatttatataatgaatatgtactataatttaggcttccatgacaaagtagagttagccttcacgcagtgccttgagagatgtcaacctagctgtactgtttatagtatatacctggattctttggtcaaagttggtaacctaggcaaagctgaggaaatcttttgtgagatgcagaatgatgttgctattggtgttaatgctcggtcgtgcaacaccatattatgcggatacctttcatccggtgatcatgtgaaggcagagaagatatatgatttgatgtgccaaaaaaaatatgacattgaatcatcgttgatggaaaagattgattttgtcctcagcttgaccagaaaaaatattaaaagaccagtaagcataaagctaagcaaagaacaacgagagatcttggtgggtctgctgctaggagggttgcaaattgattcagatgaagatagaaagaatcacataatccgctttgagttcagggagaattctggcccacattatcttttgaagaggcatattcattacctatatcacgagtggttgcatccttcgtgccagaccaataatggtaatgaggatgtaccatatagatttgtcaccatctcacactcttactttggtttttatgcggaccagttttggccaaaggggagacgaacaattccaaacttgatccatcggtggctgtctccatgtgttctggcatactggtatatgtatgggggacataggacctcatcaggagacattgtgttaaagctcaagggcaatgaggatggtgttgagaaggttattaaaagcttgaaagcaaggtccctggagtgtcgagtgaagaggaaggggagtgtttattggattggtttcctgggaagcaactcaacctggttctggaaactagtagaaccgtatattttag

SEQ ID NO: 188437 - DNA, 3969 bp, Cannabis indica
gttcttatcaacgttgaatctgcgtacaaaagaacgagttttaagattgtaaacccccgaatctaaaggtccatcatcatcaaacctaccagtagtattcttgtcatggaggaagtatatgcaattactatcgcattctgtagaattagccgatgaaactttaacagataatgattcattatcacccaaaaacaaagcttcgtcttccaattcttccacctcaacccattttgatcgatcattgttcaatttgaaaactctaaattttatggtcacttgttctctttcagctttattgtatttgacatacttttgaacttgtaaaagttgatctttatatgactccacaagatatttcttataacaaaaagacttcttatctcttggaatagaaggaccaacaagtaattttaagctttgttgggtggttgaatcgtaagtaatgtcaaaagaaacaagcctaccatttttataaagaagggcataaagtgtatccttgtagtataaaacatcctcaaaagtctctatagagggagtaggagacgatgatgatgatgaaaataatgaaggtatacgaatccatttattgtgtttagaaggtctaatataagccaactgtaaaaaactaccatatataactaccatgatgaaatcctttggatttgatattggatttggtttaaatattgtaaacctatagatatgctcagcccaataagggtggctgcttgtatgcattcttggaggaaatagtgggggaaggattattatgatacttttattattattatttgattgtggcttatggagtgttacagcaaatttgttatcaagtgtggctaaccaacctaaggatgagcctgcaaaaggtttattataggaaggaagcaataacaagttagattttttaatgtactttttcttcttaatactgtgttgttctgatgatgatgatgagtttattgtactataaactttccataaattattgtctctttcttttttatagttgggtatcaaaagtttgggtggagccttcaatttgatgaccttatttttattattattattattattcttagctaccacataccaatttaacaaacaaataacaccacatgtcaaaccatctttcaatgtcaaaccatctaattttctataaaccaactcaagaaggttcttgggaattagataagcgcaacctgaaaaaaaaaaaaaaattattaattatttacaacactttccatcatgtgatatatatagaattatatagtatatatatatgtatatatattacctgaatctgaatccatactaattgaaaatttcgaagaataattaatatggtttcgaaacttattgggagatatagagaatgagagagtaaatggatttatttatatagaatttctaacctacccaatcaaatcctaatcctacccaatttaggattaccgttttgtcttttaaaaattaaaatctaacaaaatatcttaaaatatatacatgtaatagaatttcattaaatctaaaatatctttcatcaacctgctttatcttccaatatatatataccacattttgtaaatttttgcaaaaataccataatcataagagagaaccgttgtctgcttaattctattttctacagaaacacttgtgcttctctgttaagagtataggatagttaggatagttagtttctttgacagttattaatatagctaggtatgaatttcgtcctaattattaatatatagattgaattatgaataatttatttaactaattataaataaataaaaactattaaagattaatttatagcataaatatttaagtaacttaccgttacagataaatatttaattttaattttttatggtaataatacttaagttatattttcgtaacttctataagtacgtgactgttaagtgtcaaatcaataaccacatgacaattcctaattgatataaatcattaaatttttatttttatttaaaaattaatttaaatatattaataaaaaaataatatgtgaataatgatttgacatttaatgactaagtatctaaaaaagttctaaaaatataagttaattattattacaatctaaaattaaatttaagtatttatctacaatcgagagttaaatttaagtattaattacgcctgaaattattcataactaattatactataatttagagagagaaaatcgaaagttttaaactatttttttaatatactttagaacaaacacaatgaattgtttggtttgttaaaattgttgtcgttttattaaaaaaaatgatatttttttttattaaggccaagatcaaaactttattcaaatatgttcaaatctatataacctatataaaagtgagaatgctcattttggccttctaatattattaaattacaaaaatatatctttgattttcctttaattaccataaaatcctcctacaatttaatcataagaacactcacatacttttattcaaatatcatttttttttatattaaatgaaaaaggttgtgtgaccatatattagattaactaatttgttggagaattattataaaatagaaattataaagtaagatgaataagttttttgatagattaaatattattttggtgtgattaaatcaatcaaaaaaattatgtgtttatcccacattgttcattgctcatatgtgagtgatttgtgggatttatattacaccaagtaaccatgatgattaatcatcataattatcatggttacttattattatccttattgcgaaaataatcctccaccacaatttgaagttgaagaagttaatggagataaaggaaatcaatatttaatttttaaacttaatatttattatttgcgtcttcattcaggatcgaattaatctgactatatagaaattactcctcataactatttttttttatcattcctccatcctttcggggcatttagttatggctgaatattatgggttagacttgagcaagaataaatactacgactaggatttatggtgtgtgtgggtgttgcttggttttttattttttaaaggatgtgtacttaatgtatttttttttcttcaatttttcaattttatgttttagttgaaagggctttataaatgtaatttttattgaatttagagaatttttcttttaattttagtgggtttaattaattctaaattttcaaaaagttagagaattcataaactcaacaataattgatgtttacaatctaatattttgaccgttcaagaaaaaaatacttataataattacataaccacaaatgtctctattattttctcaaaatttataataaataaataattaagccattcttttgttttatttgcattcgtacatttcaataaaatgtaatctttacataagcatataatacctaattaactataataatttgtgcatataataagataatattattatgaaattaaattatatctcaaaactaagtaaataaatgtcctcattttcaaatatttagtaaaatgctctaaccgttaaaaatttgactatgaatatacaattataaccataaagcttaatttactcaagttattataagtttttttatatgtaattatgctttagtgtaattttaatacatgtttttgtttctatttccgcatatacatgctttagtgtaattatgtttttgaaacttccccccaaggtgttaaatttcttatggagagtctctacaaacggtctaccaacaaagttccaactttcaacgaaaaatatgccaattgatcattggtgtcccttctgtttggcggcaccagaaacaattttgcctgctcttgttcggtgtagctttgctcaaagttgttggagccgatgtcatgtaccatctgttgcaccaggtgcgatggattttacaacctggtttgaggtttgtttgaaga

SEQ ID NO: 188438 - DNA, 1647 bp, Cannabis indica
tttttattattattattttcattaggagacatgtaattgttcctgtatacaaaatagaatgaaattattgaagcaagttgcagtagtagcagagcaaacactttctagattgtatgttataccaaacaaagagtaactttactctttttcattgttgttatttaagtacttcattctaatacttattacgactataataaaggtaaccgtacaagaccaaaaaatacttgcacggtacaaaataactccctagtgcacctttgtaacaaaatgagagcaatgctacacattgcaactcacacctattatagtacaaacaaactatctatccaatcaaaattaagaaattagaagttacactctttatacagcttagacacaacaataaagagaaaataaatctaaactgaatagctccacaatgacacgtcagcacaaacatccacgtcatcgctactataatagtgttgatccatatagtgaggtggagacaaaagcatcgcctccgccatatttgtcagcagccccggcatcccaaacacctcatcatccaaacagaacacattttccggcgtcgtttctgaggtcgccgtcgttgccgttcttttctttttcacactctcctccgccaaccccactggccggaatgcctcggcggcctctgacgccgccttttgaatatcctttgggtccagagaaaccggagacggaagcttccaagcagagtcggcaaaattaagacaagccgagcgacccctcaatgcaatcgccgccacgtcatgggcacgcgccgccatctcagcagtgggaaatgtgcctaaccaaatcctagtcttcttgttaggctcccttacctcgcagacccacttgccagaattcctcctccttacgccgcggtacaccggatgacgtgtctccttaaatttcttccgaccagctcgcttcttgggattactcgaagccaaaagaagctcttcgtcggagaaattcatcggacgactactgctgaaactgtcggagggtgacatggtttcggttgatccttcgaatgaccacacatctgaagttgcagagtagaaatgatccatagtagtagtaggctagtatagtagagtttaattgagtaggaaattgtagtactagttagtttttagttattataactatattgaaatgatgatttggtagttgtgtatatatacatttaataaataataggattatatgtaggtttacatttcagaatgaataattatattttaaggaagaaaaaaaaacacggagtttggatggatgataagaagccaggctgggaaatactgtcccacgctttggacaaagagttaacgttagtgagtgtgatggggaagagcctcttacatacttggccagctggatggagccaactagccaactatatgtttgcttaagctgtgggctttagacacgtgtgttagttgacaatatttgtatcttgggaaggttttgactgactcaaactgatagagtaaaaggagaaatccatgaatctctgtgcacgtacagcaagtataggtcaaaggtcggtctcactttctgtcatttcttatatattttattgagaaccttctaaactcaacacaagggactttctctttatcaatatga

SEQ ID NO: 188439 - DNA, 3524 bp, Cannabis indica
ttcatgagccaagacatgatgagagcatcacatctgacccaatgatcgtaatcaggattgagagttcgagtgacgggattgatcgttggtgggcgaggcatagtaccaagaaggatacctttaaggccatgtgcacgaatcgaggggagaacaagggatctccagtaggcataattggttcgaccgagtcgaatattgagcaaaagcagattattggaaatctgaaactgtggtggtggattctcaggagcttgatgttgacgacgaggtggggtggaattttcggcatagtggccaaggtcattttccatcgatgatactatgttgagattgtgaaaagtaagaaacagaagcaagaaaagaaaaagagagaatagaatcaagctcaacctcaaactgaggaagagaggctttgtttatattaatcaagaggaaattacaagaggcagagttagttaaaactaactaacgaaaaaactgttaaaacagttacaagaaagataaaacaattaaactgatacagacaaaggacaaaaaggtgctaacacggttcaaaaaaaaattattactttgagcaaaacaaattgaaaattgcattaacagcattaaaagttacattctatttaagtaacagaatacttttctttgattattatatattatattgcagacaagtaggtagcttactatactaagtgtagaatataatagccaaagtcttctgatagaatcatataataggtatattaagacaacaacatggtgtgttattctcacattttggatggcaacttggactgccgctcttggaatcttgctttggccttgaaaagaattttatgaacttcatcaaaatgaggacttgttgcacttttagtactctcaatacattgctgaactttcttgtaagggccgagtatgcgaatccgatccttttcgtccaatacctgcatagaacaaactcagttgtgccataagttaacattttgacgcagctaccaaaacttagcatagctacaatgcatgaaacacaaaatgcatacaaaagcttgattaataaatctacagttggttcggtaccccaataatcatgtgttttctttttcttcacaacaaaatattttatgaaacagactcctagcctaatcctataatatttgagaaaccaaaaaagaaggaaactgcaaaatcagctgtttgggatacctgtcttgtgtttgtttcacaacattttgagaaaaacatatagtccttactcaccaaaacttttttttttattaaaagaaaaagaagaagaagaatcaaattatattagtaagatttagtgctgtgtgattacctcaagttgcataatttcacaaaccaggcttagatctgctatggatggttgaaggccacctagcaagtactggcctttccccttgagccaaatggtctctagttttgacaaagaggatgaaagaattttctctgcttcagcagctgcttgtggattcggctgaatgccaagtgcaggcccaagaacagtgtataaaacatactttgctgaagcagaagcatcattgagaaaagattaaccctccaaaacagcaccagaataacaacatgtaacagttttcaagtatatgggatgtgtatatagtgtgttgaatggaatacaaatcaacaaagtcagaaaacttcaattaaagcgaagtgcaaaaacaccacttgacaaatagaaaaatcaaaggtagatgagtctaaagcacctgcaccaacacgtaagttcgaatgatgccaatccaatactgaattaattttagctctcctgaaaagatcagcaggatacctgaaataatgaacatggaagaatcagaaatgggttgactacgataaaattaatagggaaaaaatgtcacaacttttacaaaagatatatcattcagagatacacaatctgagaaagaaagatgtcattaataaatgaatgttatagtttctgaacttttgttatgcctgtctaaaggtatagcatcagttggacagtgtaatttttaaaaaatgtaaagaaaaccaagaaaataaacacgcatccctttattttctatactacatctatttcgattattccactttaattaaattcacaagacttagattttatattttttggtcaacaagtatccacacagcaacagctacaccaagaatccataggcaagtaatctcattcggtaattcaactttgctatggacaattttaaacacttcttttgaaaacaacaaaaaaggaagaatagcagatattaccagtgatctgggacaccaggatatacacaagcaagatagatgagaattgcatgactgcaaaagaaatggaaaatggaacagtgttaagcagcaaactgcaaatgtgatgaaatgatgtaaggaacagcaatttgaatatatttatattgaacactgaagaaaaaaatgcaacaaaatagagcagaaattaactattcatgttctaaacatggttttaaacatttgtaaggaattcacatataaattatctgtggagtatattaatagcaacaaacatgagtcctcagtcaccatgttcatgtaaatataatgtcaaatcaaacctttttacaagttttttaaaagagaaaaactgaaaatcaaactgtagttaaatcaaacaatataatttagtacaagaaggaactacctttcaaacagcttaaatcttccgtcaacaatagcaggaacttgtcccaaaggatttatttctgaaataagcaaaacacaaaagcttgtaaattatagtggaaaagcagcccaagtatcatttatatccaaatttttaactagataaaactacaacgcaatatagtgaaatagattcaactaactacaaaaggtagatatgattattccactacgaaaagaaaatctctactttcagacaattgggtctcccaattccaaatatacataatatatatacctttgaactcgggagtttgatgctggcgcttggataaatccactttgatttcctcgaagtcaatcccatttactctgtacaaataaaaagaaaacacatataaatcataaaaatcataaaaacagagagtttaatttcgaaaaagaagaaatttacttgcagaagattagaatagcacgggatggttgggacattctatcggaatatactttgagcgtcatttttgcttcaatgaattcttttttttttttttgacttgtttttatctatcgttctgtctgctaaggacagaaatcgttggagatcagagaaaaaccgattgctctacttttcttattgcggcaatgtggaccagacataaccttgggcccaattgtatcgagaactttacaaaaatataataaagaaagggataattttacaaatacacaaatacaataaaaaaaattacaaaaatacggttttgcagaattttaaatatttttacgaattttttaattttatttacacaaaatacagtctttttatgttgtattcatgttaa

SEQ ID NO: 188440 - DNA, 7736 bp, Cannabis indica
aaaaaaaaaaaaaaagaaatcaagattccaatacaataatacaataaaacaagatgtgattgataaattaagttacaattttacagttgtaaataaataaataaaaaaaatgtgaaatgttgtagatgattagaataaaattacaaataaaataagtacaatatcataatttgtgaccatgccatttaatttataaaaatgaacaaaatataacagaaagaacaataattttgtcacacaaatagttcatttttaaatgttcatttctaaatcccacgaatcctatgaaattaaagaaagaaaattgggaatatacataaagttcaccaacattattcaaagcattataaaatgctaaaaacatgaatctcatgtttggctcatgttgcccactaataatttcaactttggtccaataacatcaaatctctccccatgccaattttttaacttccaacaacttactattatttggaaattaaaatagcatctctaacattcatcaatggcacatgaaaattaaattcaaagtatgtaacaaaaaataatacacattgataagacattaataatttaattttattaggagaaattgtatagaatattattcatattattattggtgtaattaaatatcaggtcttgtatattttaatttaatatacaattattttgaaaattcgttaactaataactactgacaaagtaccacctcgtggaggtgttggacgccacttagggatggacgtagtgctgtaaatacttgttgaacattttgatacggtacgagcacgattaggtacgaaaaaatatgagcttggacatgacacgagaaacacgaaaggcgcgacacgtaaatacgaatagattagcccaaaaaatatgacacccaacaagcccaaaaaatatggtataatccattagaaaaccctaaaatttattattgttattcaataataatagatatatatttattaattataaataatttaaaataataataataaaacttaagtataatactaaatattataattttataattaaaactattagaaaatgtaaaattaaaattatatatcaatttatttatagagtttgatataaaatttgattatttataatattaataatttttgtatatgattcttgtgtgtgaaatattgttgcaaagttatataaatataactaaaattataaaatatatatataatttagtaattgtaaaaaaatatgaaaaaataaagcacaaatttgagtccagatctaaaaacaggctggcctgtttaagaaatggggtggtctagcacgaacaaagcacaatatgaatccgagtacggtgcaaaaatactgggcctacaagccgagctgggcctatcttttaaaaatattagcacggcatggtacgactcatatttttttatagcacggcacgacacgacccatattttgaaaaatacatacaaatatgggtcagactaacacgacacgtacgaatttacaacactaaatgaaggcaatcctcaactattggagaggcctacgtgcacaaaaaaaaaaattataaaaatttaagggggtaaatataatttttttaaaagcaaaccaataaaaattatgaaaattacactatttaatttctttataaataaaatttttgaaaaggacttaatagcaatcctctttagtaggacttacaaatttgtaattagatttgtacacttcttgtttttttatttctattttacatttaagttttatttatattttaaatatgaatatatttatctaattaaatataaaaattgattttaaattatgtgtttcgtaatcattaggattaaatctcaataaataataataaaagaaaacacacatctaagaaaacaaagactacaattaatattcaacatacaaaaagatattgttaatataataaaataataaattaattaataatgataattatatattattggtgagttggtcacatcacatggctatctattcataacatatctgtacaatttttttgacagatactacaaaaatccacataaagacttcatcacataattatgattagataatatatatatttttttgaaaacatgattagattatattaaatcatattaaattaaattaaaataaatatttcgtttataaaaatattatattattactactcaaatctatatacattccctcacacattttataaaccatgcactaaattaaatgtgtagcatataatcttaaatatttatttatttatttttggctaattaagatttttttttcctgaactttgacgtttactaaatcatgttctctaagtttttttagccgttaaaaattatccctaaactatcgagattattaaatttgaaaacttttgtctaaaaagcatataatcttaaatccatattttataaacatttcctcacacattttactttaatatataaatccactagtaataattaagtagacaaaaatttggtgaatatgtcacaaaagacaatcacataaaacattttttcaatctaataattgatgatcaccatgttcaaatatattaattatttaaactttataatagtcaaatatatcattttttttcatttatattaacatttactacaaatcaaatcacacattgataatcacattatcaatgttacaaacttgttaaactcgttgtctatatgatattgtggatcaattgaaattgccttcattatatattgaattacattttatgaatgagaattgttcaaaagtattagtagtattgagtatcattaaacaattgtatttattattactgaaattaatcatatatttaccttttctagatagtttaattatcgtgacatcaatattattataggatgttcgagctaaaattttaaaagctaaaaagattccgagcatatgtcaagtaaaaataactttattttctacatgaattgagacttgaggatgaaaccataatagaaggtgtacccgagccttgcagaggtataataaaactcgggtatggaccacatgtcaagaagatttaggctccaatatgggagccacaatgtaaagcatactcaagtatgtgtcaaggaagtttggctccatcatgaaagctacaaaaagaactaatatggatggagcataagtcatgttgtaccagagtctggtatttcttggtatagggttcgaggtaccaagatgattgtttgaaccatacccgatgaatcgaacgtatgttggagcttattttgaggaatttggtttaaaccatacccgagccaaagaatgagaagtctagctcgggcatggagcaacaaaatgaagcatttatgacccaatacccgaaccaagtattccttggtgtgaggttcgggtacaaggaggagaaatatggtatttgggaagcgtttgaagaccaaatatgatattagtaattgaactaagtattccttggagccaattcatgttgtaaaatgaagttggtacccaaaccatgcatttcttggtgttgggtttgggtaagccttaattccaaaaatgaagaaaagcacttagctcatcgtagatggcatggccgacgctgcaaactgcaaacaactaagaacattttcttgagactttttagtctgtttttattgaaactattggccattaaaagtgatgtacaagttatttgccctttgttgatgagatatagacaagcatagttggttagtatcaaattcatgcctagacccacaaaccaagttaatcatatttaaccaagctttgaaatattacttctatgcaagtactcacttatagctcaattaaagaaatgctagaaagagtgtttagtaccaatcagaagatgacacctcatgataatactagtgcctattaacaatgctatttcaattaagggtatttttcctatgtttattgaaagaaagtccaagaaatttcaaggctggaaaagataaactagcaaaatactcatctttttctatagttgaaattagttcaaagtggtcattgtaaaacaaatccaaaaaagaaaaaactactttgtaaaaacacactactaatagggcttgaggataataagttcattcaaaactcatagtgcaagtaccataaacacctgaaattcaacttaacaagtagaagaagaatctgaataattcatgatatcacactctttctttctacaaactcaaaattaaaatgtcttcaaaagtcttaactgagaaaactacatattggctcaaaactggaaaagtccaatcaaccttacttaactcaaggtggtctctccttagttgtcccattgaagaatcacaacaattgccattttcgaaaatgggacttgcaccaaatatagaaagcttacagccttctacctcttctaccaccctttctacgggtactgtcagttgggatgggagtgacatcctctgaaacacaaatacatcaccatgttagtaagaaaaagttaaggcttatgattattaagaggagaatcgagagtaagaagatccgtaccaatacggccaattctcattcctgaacgagcaagagctcggagtgcagactgggcacctggaccaggtgtcttggttttgttaccaccagtagcacggagcttaatgtgaagggcggaaacacccaactcctgcattattacaatatcttagaaagctacaaacatgaactatgtcgagtcacttggtaacttagaaagagagcacaaaagatgagtaaatagacattgttatgatcaaccaatccaaaccttgcatctctgtgcaacatcctgagcagcaagcatagcagcataaggagaagattcatctctgtcggctttcaccttcattccacctgtattgcaaatcgtaaatattttcgtatggaaactttcttttatctgaatttggtatggaaaccttaccaaacagtaattgcaaacaaaggccaaggtttgattaataggtttcacacatgatgcaattcacattgaaagtgacaaacatgtcgcaattaaccgaacacttcaatacaaaatcatacatataacaatacttaaagatctttcatctttccttgaataaaaatctccaagaaaacaaattcaaatcattgaaactaatatcgaatcaaacttacttagaaatcatgaaaataaacagaacataagcccatgtttcatcattgagaaaattaaacataggataaaacaacacaataaataaatttaacagtacaaatacaaaccactagaagaaaaacaattccttaccggtgatacgaacaagggtttctctcccggaaagatcagtcacatgctgcatcaaatcaaaccaaaaacgaaaatcactagcaagaatcattgacagtaattacatcaagtgaaaattgaagtagacttacaatgaaagtgtcgttgaatgaagcaaaaatgtgagccacaccaaaaacatgctctccttctctaacagctgggccaagagtgacattctcttcctttggctctctgttcttcctctttgaagcctgtaaaaaacatatcataacaaaattaacaaacaaacaaaaaaatctataatgtgaaaattgtacttattcaatctataagaacctcattcatacctgtaaacagtctaaaattatacacttaacaacccccacaaagctacaacagaaatttcttacaacatcaaagaaaagttcttatttttcaatgtactcttaagaaaagaaaattataaattaagaacaaattcaaaaattagattttgtgtaccaaaacatgtttcaaaacccacaaattcagatgaacatttacatagactgtcaacatacaaagtaaaaaaataaccccaacattcagacacataaaattccaaatcaaaatcatatttttaagaatgctatggttctggatctgcgattaaacaaaactagtctaaaaatctgtacaaacaaaaacatcgatttcgagataaagattgaatttttaaggaaagatcttgagaaagaactaaattagttgatcaaaacagcgtagtggaatagaattaccatgttttggaaggtagaagacagatactgagaggatcgctagggtttggaggaagtggtttgaaggtgtagtggtagtcgcctgaagaaaaccctaactcgattagaagaagttgatattgacatgaatgacttaaaaactagggttttgtgatgatatcaattttacgaatttatgaatatgaccctatattttttgtatattatgattattcaccaaattttattgtattgtattatttttcccttatgccctcttaaatttcatttacactttttctttagaaaaaaaaaaagaaaaaaaaaaagcataattttttcattgttagatatatgagtctaaggtgaagtatcatagaatttgagctaagttataaatatttattatttacaatacacttaattttgtttaaataaaaatttaatgaaattttttatttttattttgccctccgaaaagtgtgggagcctatcctaaggtcagccctgattatagggatgcacattttttttcacgtgaatggggatcatattttgtcctgaaatgttaaatggggctgggacgagcatgacactccccaccctgatggggacttgtttaatattttatagtttatagtttacatttatacttttttagtatattaatattatttttataaatttttaagttgtgtttaaagtaataaataatatattaaatgagaaatagtgtgtaatattttaattattatctattttaataatttttatatatttaatttttaatatatataaacttaaattttatagtaggggattcccatcctgttcttgatgtggaataagcgagaatgaggcaaggatggaattaaaatttttaacggggatggggacgagaagagcactccctgccctgtgtgcattcctaatagaggatgtaaatatttaactttgttttaaggtaattagggtcgggcctggactaaaacagactagttctgcgcctagggttaacctaagcaagagcctcaaaaaaaaaatattttccctttaaaaaatatatatatatttttttttcagtaattttcaaaaatactacatatttttcaaataaaaggcattaaattttatttttttaaagtccatcaaatctcagggccgcccttaaggtaattcaatatttaattttatgaacaaaaagtaattatgaacatagtttaatacttctatatttttcatgagtggaggacataaattctcctttaaaaaatagtaacataaatatgttatggattttttagttggaaaactcgtaaaatacaaattgtgtagtattgggtaaaaaaaatatgttctatatcatgttgttctgacaattttataagtattcaaaaaaaaaaaaaaaaaaaaaaaaacaaaatttaataagtaggctcgacatgaccataggcttgatatttttgttggtgtattcaaatttgaacaaattagcctattttcttatttggattcatgttccactattttatattattattactaattaatgagtctaattactaaattatatattatttttataattcaatctactttatattaatttttaacatagttacccacacctatataacaaattataattattaatatgaatatttgct

SEQ ID NO: 188441 - DNA, 3753 bp, Cannabis indica
caaaggccacaaggatgttatctgtaattaaccggttcggtagaaaggcactttgtgtctccgaaatgacaagtaggagaacttccttgaatctagccacaagcattttggtaacaagctttgaaatgacgttgcacaagctaattgggcggtaatccttgattcgttgaggttttttcattttcgggatgagggtgatgagggttcggttgatagcagtaggattagccccatcattaagaataccaagaacagcccgaacaactagatcaccaactatggaccaattctactgataaaacatcgccgacatgccgtcaatcccaggactcctatcagaacccattgtttgcaaggcctctttgacttcagcccccgtaaaaggtttggtgagattaagattatgttcatctgaaaccataggagggatacaatccagagtggatgctagagcaatatcatcaatatctgaggctgcgaagatatcatgaaaataatcttgaatgaccgaagcaatatcatccttggagaacactttttggcccatatcattgagaaggaatttgattttattgttggacttacgagcattggcctttgcatgaaaaaattttgtattacgatccccacatgctaaccattccactctagaacgctgctgccaataaatctcttcttgctcaagaagatcatcaagaatagattcagcttgttgagtctcattaatttggttgggagtgcgggcaacaacgttgttcagattttcaacttttgtctgatagtgcttgatttgtttcttcattttaccaaacttttttgaatgccaaacttgtaaagaatcagcacacaccttaatattagagcagacagcagtaatcgggtctgaaccatgcgagggaagccaattagaggagattatttcactgcattcaggatcggacagccaaagcttttcaaaacaaaaccggcttttccttttttcattgctggaagaaaaatcttgggagcaaacggttgctgcaatggcacgatgatctgatttgaagaaatctagatggtgtagttgtggcttcggaaaaatattttcccaatgattgttaacaaagcaccaatccaaacgttctttaatagtttcaacattgtgtcggcacttaaaccaagtgaaatgatcaccatcataaggagtttcaaaaaggcagcagcggtccaaagtgtttctaaaggcatccatttgagtttcattccgaagagcaccccccgatttgtcattattggagagtatttcattgaaatcgccaatgacgagccatggcctaaggggagcaacatccgcaagccttttaagcaaagtgtgggtcccttcaaaggtcaagttacaatcaaaaaaagttgggccaaagttgatgagtgcaatatcaacatcatccttccataaaagcataattccaccaccaagacccgatcgaggagattctaagccattattgaatttgagagagcattgaacacgagagattgaatgaacagaaaatttagtttccattagaaacaaaacttggggcgattgttgttggacaagcaatcggagttttctaaatgcactcgggttccccaaaccccgtgcattccagctgaggattttcatggtgattggcggggctgctcagcaacctctgcttgcaagtcaaaggagagactagaatccttaaggtcagaaactagtaactcaacatcatttcctcctgacaattgagaagatgatgatccaggggtgttacgacatcgcttcaagaattttctcatggataaagattcatttggccttttaaaggttgtgtttggggactggttttctttgtcaatggtcataatggcaggcgagtaagtgggatgagctagagtggaatgggggtgtaaagcagattgcacgggtttggtattagagagggggccaacatctggtgggtatgtagtaaaagtatgatgtgaaagtgtaggtatgtagatatgtgaaaggtctgaaatggtttgacttggcttgggagtaacaggggagggtatcggctgcttagaagtggcattgttggtaagtgtgggtgaggaggcgttagagttaatgctgggagtgcaattgaatatggcttcagaacaggggatagatgggttaattggtggctgagggtgagtggaaaaagaagtaagaggagtggagtgagccgtgtagtgtagggggaagtggttactgagagaagagggtgggccaagagtaacactactatggtgactacaggggttaagagaatggtgattatggaaggaattagtgtttgaatggacaaaagtggatggtgtaaatatagaactgttaccgtgagtggaaggctaagatgaagtcaatggcagagttgaattatgtagaataagtggttgcttagaacactccccttcaaaaatagtcgaaggttggggctgacttctcaaggacaaggctggcaaagaggaagtgagtgtggtacgtgccaactgagtaagtaaaggccaagcattgcctttagggaaatccgatctatgacgatcataattattggtgggcagtttggcccctttcatccatggcccatattgaaggtcatcatcatttccattatccatacgctccataaaggccacacatcgctcaaaagggtggcctaggcgaccacattcaaaacaaaattcagggagcctttcatatcgaaaatctatccagaattcatccttaatctgaggaagtttaatcatttggccccgcaacaaaagcttagaaacacagagtttgacacggatacgaaggaagggaccccatccttcatttgtggaatcatcatacacttccatgaactctccaatgatgttaccaagcgcttcagccaacactttagacttactcaagaaaggtaagcggtaaacttgaacccaaaagggggtgaacatcagattttccattgagacattttgcagaacatctggcgcgaaaaggataatgaggtggttctgaaaatgccatggctttttattaaggacccgatgtttgtttccttcacaaccgaacttaacatggaacaagccatcttcacctttgtaatcagtaattacaacttgaaaacgtctgcgctaatggccagacatctgttccacacaaccaggtctatacagatgttgtgtagacaaaactcgggctaagagactgtggggattatgtggaatgggatcaggactgtaatcggggatggtaaaggtaaatttctcctcatcagtgagggaaagagtagcatttaaatccttaagtaaaggatccatgaatgcaatgatgtagacaccagaaggataggcaggggagaagtcgacggtggcaaacagaggggaaggaaacacgaacagaggaaggagggaacggttagcaagcaaggaaatttgaaaagaggaacaagatgaaggtagttagggatgaaaagtagttagaaaccaataactgatacagaccctaagaagggcactttttatatcaaaaaaaaaaaaactaatttaataactaactataaaaaaaatatcttttatatctttttctcaagaaaagctacgataaaagtttatatatttaaacaaatttgagagagaggaagttacccatttttctctgtggcagttattccttacgattgttaacgatgtttgtgtccggcttcgtcctgtagaatatcggtgggcgtccac

SEQ ID NO: 188442 - DNA, 1061 bp, Cannabis indica
atttattattaaaagagatatatacatatgcaggttagaaatgcgactgcgcgcaaagcatccgtttaaatttgaaaaaatgaaaagccaaataatcataagttttcttttcagttatttaaactttgttttagttgataattgtaattagaaagtgaaaaaaaatacttgtatatgaaagtatttgaaaaaaaaaaaggagaaatgagaaaagtgatcatgacgaaactataacacctaacacatttcatcactaaagagtaagaggtacgtagtgaaccatatatatgatgcaatatcttctctgactgctgatcaattatgacatttggaaaacgtgagaaggaatttggattactgaattttacctaactaattaactaaactaaatttatatatatttgttaaggagtattgtggccatgattaaataaagcttttcaattttgattagtattgcgttttgaaagtggccgatcactttctatacattaatggaaaagtatatggttaatatcttgcttaaaaactttattatggtcaaagtagtatgagcttaattaattaatctccagtccatacatatataattaatttcctgtcatttatggctctggctatttttaacatttatgttcataatttttttttttttgaatgatttcttaattatatattacgaacttgtttgtagttatcaaattaattgggtcatgaactcgcatgtgatatgatatacacatatctattttcattgatttagtaaattttttatattattattattttcaacattacttttataatagaatggaattccattccaacacgcaagatatcaaagatagagactgatgttcaatgaacttttatcctgatcaattagtcgctttttgttcctttgcttttttttctttaatggtccaattaaaattgtccttgatcatgatacgcaattatgcattatggtactacataattttatatataaaatttgattatttaatgaaatataagaatattttattcaatttaactgtgttagttttataaatatatat

SEQ ID NO: 188443 - DNA, 2559 bp, Cannabis indica
caaaataagtatggagtaataatatccacagcactaatgttctgctaccatcttcattgctaaatggccttgatatcaataaatatcatctcagattactaaaatgattagatttaagctggactcaatattataatgacaaccttacctttggtggcttgatataagtagaaagttgactctgctaattcagggcgcaagggataatatttttcagtagggtgcaacatttgatggtctaataaatacctgcatggttttaaaagtagtattaggaactgtttttcttctttcttcttagattaagtgttaccatagctgaacagtttcttgaatatagagttcacagcaaaaacaaaggaacgctacctctcaggaagcactccgaactttttccaaacgtaaaagaactcccgatgtgatgaatttgctgctgcaacatccccaacaagaacctgatgatcaaatttttatataaagattagaatattcgttctgaggtttcaaatcttcaatatgtatagcacaggtctctactacttgcctgtaggccaggccaaaacgcttgaaggctagtaagctgccaataagttgcttttcctgtcctcatatcagcttcgtggtacctaatttgttgttacaatcgttacactataaaagagcttttatattggagagaaagcttggcaagtaaaggataatattcagtaaagatggaaatgaatggagtaccatggaccatgtctaaaatatttctgcacagcgacataagcagagtgaaacattttccaaaactcttcctttccgaaaacaatgtgagccttgaatagatactcataaaaagaatcaactcctgtatgataacacataattgaatatcagagacttaccacatttatccaggtccatttaaaaattgaaaggttctgggacagaatactctgacccatccacacacctttccttcttccacccactatatatttgagctaattttaatatattgaaactgcatattcaggtccgcaacgaagcacaaccagttatccaaaaattaattaaattataaataaagagatcgatgtccaagtaagacataccagccccaataccggatgaatgttcaatccattccccagttatcacatccagtgttgttccaaataaatttaatgagcttctcatactccacagcttgcggagagcacgtaaagcagcagattcatatctggggttaccggttaaccttgataatgctcccatttcaagaattaaagaacctaaatcgacaacaaaaatcagtacatctcaggaaagcatatcagagaatgtcctcatcttaaaactcaaaggataagcctctcaccacaccctgaagtgcttgtctcagtggtctcattctccatcactccatactgtccacagaatttcgcattgatgcagagagtcatatatccttcttacaaacaaaacaaccaaacgtttttatacatttggaatttatgaaatcttttgtttgagaagaacaaaaaagatgaaataacgcaaacatagtttttagtgtcagatttctctgtgtatatactgaacagacacaagacaatttgaccatgcattagcttatgtgctccatgaaagatacttactgcaacaaaattatattgccgtttagtcaaattcagcagttaatacatcctcccataaaaattcaacttctattccactcaaacaataggcatcaagtatgatgcaaattacagtcaatcagtggccattggtaaatttcattagacacatgctatttgaaccggtaatctatcacaaacataaaagaacaactagaaactaaatttatgatatggctctactgagggaagtcatgaaagttaactcattttcttacaaatagatggcacataacaggacaagtgtctcccaatccaatacgatccttttgcaaattagacgtagcaaagtcgtgttcaatggtgtgtgtatccaaatgtcagaataaaatttggatcatgataaacaaaaatgacaaactataattgggtagtacctttaagttgatccatgcatacggcaatcctgttggtgtatcgaaagctggtagcaaacgtttccctagatcttcagccaaaatgagtagttgattcttataagctccttgaaccaacctgtttgtagaatcagttgcaagcatatgagcagatacaagtcctccaagaactcttatgttgcactacaagtagaccaagtgacaagagcatcattaaacacttcaaacataacttgcttgctcacttgcacaaaaaataaaataaactacaattattgtcacacttgccatggtttgaacaatcctaaatgaatttttctgtttgggatcaaccagatcaaagcctttttagaaaactctatgattaaatacctcaaaaagatttatccttgcatcaacgttgaatttcagatttccagacagccaaataatagccctttcgaattctgtattgtttcccataataacaaggctgtcaaagaatttgtttacatcag

SEQ ID NO: 188444 - DNA, 4285 bp, Cannabis indica
  modified_base (70)..(70): a, c, t, g, unknown or other
  modified_base (83)..(83): a, c, t, g, unknown or other
cttcatcccagtcaccatgtaataattaaaggatacttcttttcttattatttattttcccattccacanacccccccctttntacttactttcatactatcaagaagacggcttgttcccatctttattctgaaacattatcatttactctttaactctattgtcttctctgtctgtaataaaagtagcatttctaccactgctaagaaatatcttgcagttttcctttatagcatagccagagagaatcatgcatattcaataaattgaagaagcgtgtcacatcattgagaatgcaaccatatactgttaaggcaagtcctaatgacaaatcatacaggaaacagatatctaattagaagacaattatacccctatgctaatccaaaataatgaaactgtaacaatttaaagctctacacttcattttgttacaggttatgtcactgcattatgtttatcaacttgcgtattattatatcatccaaagtccccaagacagaaacactgttctctccaaaataatgagactaacaatttaaagttctacacttcattttgttacaggttatgtcattgcattatgttatcaaattgtgtgtatcatccaaagtccccaagacagaaacactgttctctccatgtaaacattactagttcaagcaaatgatctgggtctagactctagacatgtacgtagagttaaataacatgcaaaccaaaaattaatacagcttaccatggatggggatgctatatctggccgctctgcagttaaagcagttattagctccttaagaatcatggcaatcgacctcttaggtggaccacctgctgctaactcctcatcttcttgactagtcagttccttcaatttttgttgcagaagggcagctatagaatctcctttgaaaggagattgattttgaaaagattcctttaactcatcattaatggtcttctcctccgattccaatgaactaccaggcttttgcctaatgggggaattaaagttgaaagaaacaacattattatcgatgcttttagcagctccattaccctctcttggaccaactaatctacttctactgcaatttcggttcaatggatgagcattcaatcccaacccctttcctgtcgatgaatcacattgaatagtccttgattttgtagcagttgaactaacaaactccctactttcaacttgactattaaagttaattatccttctcttccgtactgagcctcttaattgagataaattaccttcctctcgcccattaaaagctttcctctctggaacaaacttttcagtctcttcttttggagttacccttggtctggcacgaccactcatgcttcggttcaaggcaacaaaatcttttgtatttctcacagcatttgcagctgatgacactcttctagtatccaaattgtgttttgaccttggtggaattctatccctgcctaaaggcatctgttcctgtatctgatcccgacgcttcaagtcaaaagaagatgattcatctttccgaaaattacaaggctggcccattgactgccatggagcttgaccttcacgaagcagaggctttctttcagttatgggcctagtattaataggttgtgtgctatttatttcttccttcttttgacaagcaaggttgtcccaacttctatgaaaaactgcatcattatcttgcttgaaggaggaaactggtaaccttggtttacttcttcctgctacttcaggaagtgagccattggcgaaactcgaaccaaatgaggcaaaatcagatgaaacttgatccacattcggcctgcagttaataacatcaagcaaattaccacaatttttacaagaactctgccccatcaaagacttagacacattgccactaaaacaagatggtttaggttgctcctctgagttaaccatcgttctctctattacagcctcgtgattaggaggataatgaactgaacttgttgtatatgtaatacattttgctttgctagaagactgcaacccaggttccaaaatcttagtggcagcatcaaacagcctagaggtccgagaaacattcttcccagaaggagtcctggggcttttaaccggagatacaaacttagggtggtggttatgctttcttgaacgtgataaaacactcttgatttgaagtgcgtcagctccaagcctagtcattgctttcctctcagactgctctgtcttctgaagtttctgaggccgagattcaacctgcttcatgcttcctctctccatatccataccctctttaccagacccaccagaaaaaccattcacaaatttattcacttcattatcacaacaagtatcagaaaaggaagccttcttgggcttctcacgaatggcaggcatggattctagacccataagcctagccaccaaacccggagaccgggtatcatgcttatgctctgaatcaacacttcgagagccctgtttcttcatgttggggaaactacccttgttttcatcagcaatctgttgtttccaaaccaccaagactactatcaaataaagtaacgaaaaatgaaaaactaaatgaagagccaatatccattaatgcataccaagtgatgcttaggcatcctgtcatcgcctttaaacttgttagaagcctgctttgatcgaactggtacggtacatcaaagcaataaaacaaaagttaaaaccatgttttgttcatataatgtatacgtgtttaagatacataaatacatatatatatatagagagagagagagagagagagtgtggttggatttcacgaacgaataggactaaccaggaggcagcaatttcttggagaaaagcttcttcttggcgaaccttcggttccaatcaaagagctggaagaaaatgccaacacaccctccgcttctatgagtcgacttcttctctgtaattgccagagacgacgacgtcgttgccttcgccaaatcatcacccatttctccaaaacggcccagagacacccacaccttggaaatgctaaaacttttcgaaaccaaatctctctcttgcgtttctaacccaaaatctccatgaaatcctactacaacagcttcaaatctatgaaacccagttcagcattgtcaaaatacgacacctataacccatatttcggccaaatcaaaatatcaccaaaaagtacaaaggagtggagtccaatatcccaaaagtaagaagaatccaagaatttttctttttaaaaaaaaatggtacaagattacaggaaaatacggtacaatactactgttgggtatatggaaaaactgaagaaaccgaaagaaaaaagccagccataaccaaaataacagcagctcagctcagctctctctttctctctctgctgcagagccgaaagctactcctcagtccatggctctgccaaaacgacgacgcagagacggactacgacatctgcacaagcaaaagcaaatcctattggctactacaaaataatacaaccagaaaaatccaaaaacaaaagctggagtgggtctgaactctgagcgaaaattggagaatgggattctgattaagaaatcgaatccagaattatgaaaagctctgaaaggttatagaaccaaacgacttgacgtatataaaaaaaatgaacacgaataccaagagattgttccaatgtagctcgtctcctcttccctgcctgccttgcccaacctcaaaagcttcactctttctttctagcattactgtttgactgtttgtattgcactctatgaaagagcctattcaatcagtgagactgttagggtgtcaggggtgcgtaggataacaaaataaaacctatcttaatttgtctccacctcacgcgctcagacattaaataaaagtgagtcaaacatcaaagaggagtgcgtgcgcaactaactttaagctatttaattaattaattttttaaaaaacaataattaatttctgtttggagcaaagtaattaaaaatattagttaataaaattggggagtttgggaagaaaaactaggaaatggggacaaaattggaaagtgggagaatggagagtgcgtgcagtaggtggatgatgaggtgtcgtcgggtctctgtaggagcgtgttctttcaacttcccaatatcgagctttgaattatctcacgactcacgagctcatactattctattctttccttggaacatgccaccaatctactcaggggcggagtaaaaatttaggggcaaactatattatatattaag

SEQ ID NO: 188445 - DNA, 2634 bp, Cannabis indica
aagagtttggattactgtcctgataacttgctttaaacccccaaattttatgttatttcagctgattcttaagtaattttaatcaaaaatgcatttagaagatatgagagccagaaaatttcatatatatcacatgtgttgatacaaaccttcaaactagaccaaaaattcacccataaataacaaaagagataactggctagatgatcatggtttagacatagaaagactccgtactcaagttcatcatatatgcgtttatataccatctttgggtgcataagaaagatggtatataaatatatatatataatatatacttctggataaactgaactgaaacatgactagctgcaaactgaaaaactcaacaaaaggtcaaagtaaactcaagctgctggaagtggtactggtggtggtagtggagacagagaaacatcagagttcagaaacctcaaaaatatgtacaataaaatttcggtttggtgtctctaacatcatgttaaagcttttaaactcgcacaaaatatatacataacataagggtataccaacactaggccagccgatgcattcctctaaatacctctacacactagctgtacatgagatttttcttcacttgagttgacttgacaatctttgtttgttgaataagcctatcaccaaaagcaagtagagtcttcttcagacattaaaggagtcctgcaaagagggcatgtggtgttccaatagtccagccacttctccaagcatacttggtgaaaaagatggccacaagccaagtgatttatctcagattcaggttcaaactgactgagacaaactgagcagtcatgccctgcttctgcctccttgcagccgctcatagaatcatatcttatggccggaactcggcttcgaaactcctcaatgtaagtgtatgacggattgcggctgtattcaaatgattctgaatgattttccctgtaatctgctgatgagggtggtgatgacaatgaaggcggtggtggcggtgaagatgaagaggaaaagaggaagatactaactatttgaaggaaggttctaacaaggcctttaaaaatggagagggaaagtgatgtgtttactaaaattacacacagaactccttcggatggagctggtagacttgagagacccatgtttgattaaaagagaagctatttggtaaatgcaatgcaattcaagtttgactgagaaaaagagatggtgtttatatgatgtttagaaagaaagaataagcggtgttgaagaaagttgtttctgtttatgttgatttgatcaatcataactgagaccaacagctatgaggtgttatcgatttcttcttgacatcatttgatctgaaaaacatccaaagaggagattagaaaaactaaattaagaacaatgaacgaggaccaagaaaccagatattaaagcataaaaagtaaaagcaagcaaagctaagttgagagcttgaactttcatgtgatcacaaacgcagaagtgaaaaagtacacatatggaaggaaaaaagacgattctttttccaccaatcccaaacctctttaactcaaacacattttaggcctgtctcccatagagaaattaagtataggtatatataggtacaaaattaaaaggccaaacatcaaatttccacaaatccaattagttttatcaaaacaggcttgaagaaaaacgtgtagagaaacaacaaagctgaagatagatacagaacccaaggaagatttttatacaataaacaggactcagcagttacatttcactacactacataatttccaaatccggcaagagatcaatgccaaaaattgaaagaggaaaaaagtaaagagaacacaactgaagcctcctctatcgtcaggatctagcataaaaagaaaatgagacatctaacatatttccaaataatccaaaacaagaggagatcgaatagcacaccaaacaaaaatagggcaacttgatattatgaatttcataaaaggaaccgaactttcttaacccaacaaaatgcatcaaaaacccatatgagatctaccattctataagcgaaaaaaccaaaccatcaagaaaagtcactttttgaaacgaaatgaacaacatttttctctttttagaggctgagagaggaagaaacttacagaatagctatggagaatttaagatttgggtacagacaaaaattataacaagatgagctgggttcagaggtttcgtgtgtgtatatatatatatgtatagactatagatgtgtacgcatatatcttggggtttgatatggctgttaagctcaatctctgtgctttaatatttatatagtgaacgagaccaagaccaaccagctctcaagctttggacaacaacaattatctgcacccaattgcttaaccgtggttcccaaccatggttagcctccaccctttccggacttaatcacaactctaaaccatggttaactaactatggtgctaggcagcaagtagtaggctttaaacactttcttgtcttcttgctttcaattttttaagctttgttgaaatagttacacgtgtccacactaccgtgtacactattacatttctagtagattttttctttttatttttt

SEQ ID NO: 188446 - DNA, 2513 bp, Cannabis indica
tccgccgcgaagcgcgggatgttgactagtcttaacaataatatgaaataaaattaatttagaatttataccttaataacttacaaaaagctacttatgtttattatttctaatatcttgtgtttattatttttaatttttcactacaaaattttttacttttagagtcacaataaaacttataactaaaagtaacaaaattataactaattataaatcatttatttttatgttgtgactaaaaagttcgcgcttaaaactgtttcacaaaaattacaatattattaggactaaatgtgttgttagtcataatatttattgtaactaaatctataatattagaaacaacttctatctaaatactatgttataataaaaaaaaaaaattgttactaaaagtcatatttaatcataaaaatttatgttttgactaaagtattatcattgcatataaactttttttttcagtattgtgagagaatggtatataaaaataattatatatatttatatagacgggacaattaatgaaagagccaagaaattccttcaaacttttattttcaaaccctaaactctcatcaattccgttttcattattcctagaaaatttcgatcatgacacctaaatgagaaaggtccccttattcagaatagaagaaacgaaaacgaaaggtaaacgacgaaacgtagacccaaatcttcaacaaactcattcaaatttgcaattaaatctcaacttgcattatatagtaataaaaataaatcaatatttatattcattaattaatcaattatttttactagaaaaggaccatataatacacacaccaaacttattagaatatactatatacttgttaaaaaatctgcttctactttgaaaaaaaataaacttgctcacaaatacgcgtagtgtagatctaaatttggagagagttggagtatatacatgaaacgcgttattaatgattcttaattggcaataaatatatttagagaaaaagcttttttattaatttctaaaattattattattagatgttaaagattcttaattaagcctccttctatttccaccacgtaatatagactcttctctctttcctctttcttctttactatatataagtccaaaccttgccaacgtttttgtaccatccaacaacaaacactaattttctctctttctcttcatctctctctctctcaatctatatatttatatatattttcttaaaagagtttttatttatttgggactcaaaattcaaatatggctttctcaaaactcccattggctctcttcatgtcaaccctattcttccaagcagccctaggtacgtataatttcaattatatattttttgagcttttgaatttatgcatgcatgcatgcatggtacatatctaaattattatgcaattgttttttttttcttttaggtgagattgtatgtgaggaattgccattggacgtttgtgcatttgcggtagcctcctcggggaagaggtgtctcttggagacgtctacgacggtctccaaggacgggggagttgagtaccaatgtcggacatcagaagtggttgttgagaggttggccgaacacattgaaacagagaaatgtgtgaaggcttgtggggttgataggaagtctgttgggatttcttctgattacctaatggaacctcaattcactgccaagctttgtgctcaagattgctaccaaaactgccccaacattgttgacctttacttcaatttggctgccggagaaggttaattttatatcataattcatttaattaatcattatttaattataacttatgttatttatttcaccaatgattgaaaagaaaattaatgttattggttattatgactgtaactgttttgggaagaaaattctttcatttttctttttcagtttataattattttattcttttcaaattaagcaacttgtgaaacaggccttccactttgtaatataagaattggtaaaaccttctggaaccagaaccatttcaataaatataaatataaaaaaaaaaaatttgctggccccaccaaaaaaaaaatgaaccttaaagactctttaattgactttttctctttgttttctgggagaaatttctctttctgattaccatatataagacccatcatgatattataccaaatttgttatggatttgcttctaaataaatcaaagctatatggtgcataagattattactttttgtagaatataattaagccattttgtcacaatacatgtgcatattatttgactatatatatatatatatgtgcaggagtgtttttgcctgacctgtgtgagaagcaaaggtacaacccacacagagccatggtggagctgatgagctctggtgcagcccctggcccagtagcaccatttgtggcaggactcgtagccacacctgcagctgcaccctctaattaattaaaatcatttattatcatatatgattttattatatatat

SEQ ID NO: 188447 - DNA, 7092 bp, Cannabis indica
gaagagcaaatggactttcttcgtttcatacagcaagaattgacactcaaattgcgagatgattccatttccagcattgtgctgcttgtgctcatattagtgttcttctgaggtgtatttatagtgaaacacttggatttcgaagagtgtttgctatgattagtcaaggaagagggatgagaagataattgaccttgattaccagatgagtcataatatatggttgaagctgaagtctcgtacttggaaaatgaccacggacttccatccaaacatggggtttccttgacaattgataattcttgatcatcatgagaaaattccatggacaaagctatagggtgcctgcaatttagctctcaatttttagtataagctataacagtttactgaattcaaatagttttgtaaaaacgtctctcccaatagaaagattataaaatgcttaaccatcaaagccattttcaatagaatgttgtcaaaccaatttgaacttttttgtccaaattgaaatacccccatcattaggtccaatgcccaaacactacgagacatacaaacttacctcgactctttctgaggactagagagatcaacaacttccaggttgttgtcagcatcttcattcatttgtgcagatacctgatgtttgacatcatccttagacttaaaagagtgaaaaaaagtactatacttcgtcaaattagtctttctctgttcaaagtgatcaaatttatctgatttctgatcttgcttccttgtagagcctttactttgaactgcagaaggcatattttccaaaccagtatcagaattctctgaaacattgaccatactcttgctcactcgttcctgcaaagaagcaaatcagttaagaacattcacatccatttggaaaaaaaaagggaaacaaagttataataaggctaaaaatgggaacatgtatccaccttggcatcaccaaaaaggatcttaatccttccaaagacgaaccaaaattgtcatactctctgaaagatttcctcagccattttgacatggatgctgtattcctttctctctgataacgttcatctatttacacagtgaaagaattacttgatgaatcaaagatgtgaagcatacataattcaaacaacgtcaagattccaaagtgtaaaatctcaaagaaaaatgtttagacatttagtagggtatagctagataaaagtgacagcataaagttgaaaagacattctgaacttgaatatgcagctggtaaattttcccagaagttgtttattcataaatgtatggcccaaggagtcggttgaccttttcagaagtaactacctacgtttctcattaataatatcccacagacaccccaataataatattctagaatggagaaacttgtcaagaggaactctcaattattcaaaaaaaaatattgtcaggttcgatacatttacctaagaagataatggcaccataatcaaatcggtggcggatacaacgtcctaaacaaaagaaagaaagaaaaaacaagatagataattagcatcacaaactcagcagccatttcacacaccaaaaaaaatcacattgctgcaagcttctgttaatgctatgatagtttggtgtacctgctgcttgatttaaagctctgaatgcttggtggctgtaccagtcactaccactcaaaaggttcttggatgatttatatgcatcattatatttcatttttagcccaacttgaatatcatttctgacaaaaaatgatgacaatcagcaaatgtatttttgcataatctttccaaaaaagacgagaaaaagaaaagccttacatgttaggaaatggaatgcccacaattatctaaagattagttaagttaattacttaatctcagatcatattatttaactcccaaaataggcagttctaattgaaattcatacatttataagtataattaaatgaccaaacagcatcaataccaactggtttcaatgaatgacaaaaatcccattttatcactctatactttgaattgccaaaaaattccactgcattttgcaaatgagatcaacactaaaattggtttgctattatcaatactaggcttctgtcaaaagcattattgaactcctaacccaaaagcataactaacagctacataagagaatgcaaaaaaaaaaaaaaaaaaaacaaggatacaacagctcgagcattgtcatctgagaaatcaattccttctgaaacctgcaccaatgtcaaagcacttgagaaaatgtacacacattagatcttaattttccaataaaaaaatgtacgccatttccaatttattctcatttgtttttccccctttctccacttttctggcgagggaggctgtggaactccaatttagtgagtcagaattttgacctacaggtgaataattttttatgtactttgttcccctgttttaccaattattttatatggacacacatttcacctaaaaagacatgtttgagactatgttgactgcatcatagttcattaaacactaaacaggaggggcatatgcatgtttttttttaactgtctaaagattataggataaaatatatagacctttccacggcacactgccaagagagcagctccttccctattagcattgtctgcactccggattgcactgaagcttttagaatccaatttcttaggtcttttctttctcccagaaataggtttagatgcaccatgaattgcatcatagtaacctttcaagacagactcaaaatcctcttggcttcctcctcttggctctgcacaaccaatacgcagtccagctaagctagattaggttaccgcaatgcaaaagcaagtttggcataaataattgtgatgaattaaaatcctataatcgtgataaataaagttgaaactgaattatatcccttttacaaaaagcacatatccaacactcatttaggctagcactttttaaaattccttaatgaaaacttctcaaaggaacagtctcctgcatgatttaacattagtgtggagaaaaacattacccataaagagagtcttttttgcatttaattgagaccattggcccgtttcacaccaacgcttacgtagcttctccaaaagcttataactcgggaaaaacacaagacagccgcccggcaccactttaaaaatttcctctaaggatttaccaagttcatccttcaaaatattgtacaaaatttaatacagggaagaaatgatccaactatttagcaaaagaaaactgaagaaatacctggaaaacacatccatctgcagttttataacttgcattcaatgggaatttacttggaccactagctattatagcagaccaaacctaagcaatagagtacttgtgtaagtagaacattcaaatacgtaaacaatgtaaacaaagaaactataaacagtgtacctgtgattcaatattaactacatgtgaagcttctagactagctccaaactgaagtccaagctcagatgaaaatgaattcattggtgacagtgtcctaaacacaaaagatacaaggcaaaatgaaggaaataataaaaaaacaacaacaacaacaacaaagttggatgctcaactagtagccttaacaaatcagcatgctatacttaccctgatgtcaagatgacggataaagaaagatcagtaatgtctctgaaaacaacagctggattcaagcaccataaacttaatgtatatgtccagtcacccaaagctttccctaagaaacaccagcaagacaattatcccattgaagatttaacaaacagtttaaaattaatgagtgaaacaacaaagatataaacataatgcagttgaaacttttacgatcattaattaatcgcctacttgcacttactactaaattaaatggaaaactagagagagaagattaaaccccaatgtctattgtctacagtaaacatactatgataggaattctaaaacttgaaaaaaggtcttaccaaaaattcattgacatgggttaaacccaggattaacacaataatggaaagcgaaagaaataactagaataactcaattatatatagcattacgtgacccaaaaaaaactttattgattgcttaccagcatctcttttcacatatttttgtaaggcaagttgaaaatcagacatatgagacccggatcttgagaaaaaataagtcaaagaagagaacaatcctgtatgtatggcataagaaattatataaattagattggaacatcaaagaaaaataaggtcactgaacagattgaaataagaccctttttaccttctaaagtaatcacagacatgccagataaatgttctatatcgctttttgtatctgttgcgtctctaattgcctgcaacaaaatatagaagttgacaccatgcaactgaaaagaaaaagtatatctagaaattctatactaaaaatacctttgtggcaaattcaagcaaggttggaaaagattgttgagaaatattagcttcttggagctctctcattgccttgtcaccagtccaactattgcacataatgaccgcagattccagccagcagagaaaaaaaatgaaaaggaaagggaagtattgagaatacaattgttacaattttcccactaaaatatctcatagtagtaaaatagcacttctgtcttcaggatatatgtcatttagaagaaaaaaaaaatagatgagtcggcgacataggaaggctggcagaacccaaaaaaaactattggtattatttagatgcttacaagaataaagggaaacttgaacttatacatgaaattgcaaaacagaaaaagaaaccaacccacgacaattcaagtaatcaaacaagacattcactataacatatttgcacacaattgtgttttgcagcttggagagcaaacagttcgtgagttcaagataattaaagactacatacccagtttcatatagattgacatcaatatgaatgtatatgtttgtgtgtgtgtgtgtgtgtgtgtgtctgtgtgtgtgtgacagagagagcttaattattacttctgaaaataaggctttaaatattttaaaaagaactaatgccttgagagcaattcaacttcaagaaaggggatgcccatgatcatttctaataacaataaacaatagtaccatgaattgactgtatataatcagaatatattatatagaaccaagtaatgatggttgaaaatctacaactaaccaggagaaataatgttgaaattcacgcttttccaatgtatctttcttgtggccgatccaacttaagaggtcctacgccttatttgcatcagttaatgatatataaatactttacagaagataatagtgcttaaaatctgtggaacaatacctgtgtcatttcatacaaaggttggtacaccaaggcattagcttggcagaggtctcccaattctgccttcaattctttatagaagtagagtgactatgtaagaatcataaacttcataactgaaaagcagaatcagtatctagtaacttactatgcaaagcttcttcgtcaatatccacactaccagcatcacgagcaatatcctccatattgctgtaaacaagtgaaagaaattttgataacataattttggaaggaaaagaaatctcttcaaataaaatcttctatgcatacaatagctttgtgtgcacatgtacaatgttttatatgaatataagttctcagaacatgatccattgatccctcactttgattctcgcagtaaaaggaaattaatgtattaaattgaaaaccttccaaaaagatattgaagtctattttaattttaaaacagcttcacatgttagtgataaaattaaattataaatttttgtgccatataaatggaaacaactttaactaccaaaattgatgtaaaatatatataaaaatacttggactcaatttgttatattttttaccccacaaactttttcccaaaaaaaaaaaataaaaaaatacacagttttaaattaaaaatgaaaacagatgaagttgtgtaaacatactgagcctcgatcaagaactaaaatggctcctttgatatctacgtccattgcacctcgaataaccggattgataatgtaattatacggacaaaaaaccaactctgcggaatctgccatggcacgtgctgcataataggagcaacctaggaaataaaagatgaaaattatagcaaaagtacgtggatgtgatggatttaaaactatctagagaaacagagtgaatggagactaaaggcaaacctttcacaacctgcccaactttgacaagatcttcaatgtcatgagcctcatgacaacctcctttttgaagggatggatggaattgtacttttttctcattcctgtttacaagataaactaattgtttatgcttactaattatataaataagacaattagaaccaagcaaaagaaaaaaaaaaactcacagaaattccgggcatcctgtgcctccatttcccaaaagcagcttgctgaaaattcaaattagcataccaaacattagagaagggagataataaaagaaataatgaaattttgagtgtaaaaaggataccattcttcatcaagattatcctttccacgcatgtacggattagtgcagtaatgctttcgtgatgcctgcatcatcaataactacaataatcaagatactaaagagtacatgcacaactaataaccattagataattaagcaaacgttcagcacaattaagtagctttttatcatttatttttcccactataagccaagtgtaaatttgggcaaatatgttcttggttagctgtagggtatataaatctgattgtgagcatcagttagtcgacctcttctatgcattttttctttctccgcaaatttttagaaatatatcttaaagttagattaaataatagaaaaaagcaaagagcttaccaaaacagccattggcactcggtaaccagttttcttgtattctcggatcacttgagaaatttgtgaatgtgtcctccttttcaagacaaaaaaaaaaaaa

SEQ ID NO: 188448 - DNA, 1097 bp, Cannabis indica
aaggaatggaactctataatgatcatagttgagacttgagagagtgataaaaattactaagactaacttagcagtgaaaaaggaataaaagaaaaaggagaatacatgagttagaattcaaaacccctaaaatattagtaaaattgtaaatactgaaagaaaaataattgagagggacagattctattactctttgaaaattatttatattatgttactaaaataagctaataattgagcatcacaactcacacggtcacgcaatggaatccattgatcaaagattcaaaacaaaccttaaaaaaataattaaatgaaataataaaataagggctaaaaagacacgtaggattgatgtcatgagacttgatctcttgctcaaaatctcaatcaatttatcttctcgtttgtggttatataaaatctcaactaatattcattatacaagcaagtacatccaaatgtataactacaaatttctcgccctatataaactcccaatactgctctctatttctgtacagaaataaatttttatatgtaatactttcttttattctactaagaaagaaagagagtagagctggtttagcctttttttctctctttcatttcattcatttggtcaaactttctcgccccattttctttccggtaattataataaaggcaacacaacacgtacgattcactttatatcttcattttttactctgttttgagctcgaaatttttttgtgatttgctttggttttgacgctgtgtgatctgaacttgaggtttgtttttttgttagttaatcgagattcagatcaaaatggacgtggctggagtgaagcgtggtttgagatcgatgtcgaaatccatgttgatgatgatgcttaatttcttattagctttcgtgtttgcttcggcggaaagaggtatgaaaatggaggttttaaagtctaatggaactgatagctctgaatccagctttttatttagagctgtgaatttcttatggcagtcagatgcatctggatatcaccatttctggccggtaatttccgacacctatgctttctcttatcttttttttttttttttgtttagtt

SEQ ID NO: 188449 - DNA, 2012 bp, Cannabis indica
ttacatttggttgcaaaactgtgaagtattattaggcatgattatgtatccttgaacctcatacatagataggaaacatcaaattgcagcaaaagtaaatacaagttggttttaaagatttgaagagcttcctatttctcattgacatagagcagtagaattattaatgtcctacaggacaaaccgatagcagataagtttctgatagatatggaagaaaacaaacatcaaatgttgaaactaggattagctacattaacatgcttgtggtatatttgtttgaaatctaaaaaagaaaaaaaaatctaaaactagtccttgattgtgtaccttaaatcataaattatttgatcttttataatatgatgactagagatattcagttgtttgttggagcagtgtctggttggaagttgattattaggtcacttcgagtctgtcaagtggaagtggttgtgtgtgtgtgtgtaaaaggtaatttgtcgcttgagtctgtcaagtggaagtagttgagtgggtgtgttgtgagtaaaaggcttatagttcaaaccccattctaggctacttaatatcaaatgacaaacaacaagtaacattttcgtttcttttctcctcatctaaccacttcttgatataattttgatatgtagttatgggctaatatggatctccacgacattggtatttgtacttgcttcccttggaaactgtgcaacctacctcatgcaaaagaacactgacaacactactacttggagctttaatgttagctatgtaaatgtagcagccggatcaatttatggctatgcagctgtggtgccattgttattttatttccttcttcagtacatgggttccaatcctagtctcattaagttttggtgcatgtggggatactctctcttcatttttgttctggcttctgtaagtagctgctttctcttaatgctctttttttcattgtgttgtctcatttccccgtagagagtaaagaagaagaaggccacattttaactctcaacacgttctttgttgaactaattgaattctactaattaagcaaaaaatatgtttattcttggcttagtgagcaaaaaactgtagtcaataaacttttatgggaaaattttgcaattgagaaagcttagcaattgtcatttgctcattatttgcaaacttgcacaatatgttccttcaaagccatctaatatataatttgatggaaaattttcagtttctgctggtaataccggtcgagtttctccgctggttgattatcattctcactggtgctgcctcagcttgttttgttgccacgaatctgaagtcctatatagagggaagtgatcttaagatagtggttgttgcagcatttgccttgcaattagctttgggtgttttcatcaaggtctggttctttccatgaggttaaattgccacacctaaatttcaagcaattgtatctgggttatgcgaaattgaaaagaaaagaaaagtactagaagaaatttgtgtgggatatttggtttggttaatcagagttaaatttgtccggaaaagacacattttgctgtattttagaatcactgacttgtttacactataaatgggcatcattatgctagtgaggtgggcttttttatttgcagctcactatttcgttttttttgggagtttttttttccccttggaggactcttttggggttttcatttgtaatttacagccatggactatttcgttgcttgtatgtggtgcaagtacagtttgccttacaaaaatatttcaccttcatatcattctgtcctcttcccttcattgaaacgaagtcatctttgtactatctaaaagtaataagaaaggttgtatttttaaatttttgactgttttttcccctatactcatcaaatataaagacattactttttacgagttaatctccatgcaaatttatttttaatatatttcagaacgaacaagtaaaggatttcattttattttttgaaggacac

SEQ ID NO: 188450 - DNA, 1649 bp, Cannabis indica
acccttaagttaatgtaaattatttgctacacttaagtaaaaagtaactgtatattacttactcctaaaagtatgtgtattttaataaaatataatatgaagatatttttgattaatgaatacaacaaaaaaaatattcctcaacttatcccacttttttttcacccaaatttggtcccatttggattgtgtaggtgtgtcatatgtgtaatagtggatgttggtgtgcatgtagaagaaatgtttccccagttgattgtctattctatactttggtgtaactgtaacctgtatgacagttttgtgaagaatgagagtttaaattattatatctttgtatcaatccatatatcatccatttttccaacaaaaccccgttttgattctcgtttaaagtgtaaaacatattttctagaaacaaagtaagtaataaagtaaaattcatcacttatcacaacaagggatgataaagattgtaatgtaacagtaaatttcgatcgactgcctacatgatccaatgcaaggccattaccacaacccctccaaaaatggctttccatgcacacttctcttgaccagtgcttgaatgtaatcctttgccttgctcgtttatggaaccaccagctataccaggaatcaaaagtcatctttagtaagtcattagtgtgtgtatatatatacatatatgatatataaatttatatatttatacaacttttactgggctatcaataaatgtcttggcgccatagaatatctctagatttaagtattgttttttcatcttttttatgaaaatgtttattgtagttataatatatccttgcgaaatttgaaaaaattccgatactatattgtgattaaattgatatacaattttttaaaatcacaatttagatacgataaattatctaaaaatttataaaaaattaatagatggtcaactataactataatcaatataataaaaatagaagtgactcagtttaaacacagtttccatatcagtagaattttgaaagcaaagtgcatgcatagtaccagtaggacttggagcaggaccattggcagttttagtagagttcttgccttccaactgatagaacacttgagcttcagatgaatgaggatccatgttcagaagctctgctttcatccaagaataaaatacattattttaaatgtaattagtaataatcataattagtaacaaatcgtatttcatggaactgtataggggttatttttcaaagtatcctctgtttatttttctctttcctatctcccctatgtttctcctacctcaatagatttttcaaacaattcatctcgctaaagaatactaaacaaggcagtatatagtacaaaagtaaagtaagaataaaaaataatgttaaataggctggagaataggtaccggggcatttggagacattagcaggggcattacaaactgatggcaaagtcaaagcaagtgtaacattgatctcaaggcccaagtttgggtcattacgatctctaatgatgacacacaagcacttcttcttgatcttcagaacctgttttagaccactgcagcagtcaggagttggggacttggcttgcccactaacgtaagacaaacaagtggccagcccagtcaactgatc

SEQ ID NO: 188451 - DNA, 3914 bp, Cannabis indica
gaaatgcttatgcgtggacaggtgatgaccaatgcttaaacctgtctctgcagttggctatgatattttccttattaaattattgtgagcatgcttgttgtgtaactatcacttcattcataagaattactaatcacatatagtgtttggctctgttagagtgttagttatttgagaatccttgtccagccactcttagaacatgtatttattgtgttgcttatctgtatagtatttattgtgttgcttatctgtataagctttaatcaagtgtataattaaaaaaaaattaagaacttagaaagtaactaattttttaattacaatttcacttgttaaagaccataaattttatgttgatctttctatataacatggtactgctatgaaaagttgattttttttaatatattattggttcatccatgtaaatatgctgtcttgtttttctctttttaatctaatatataatatgtatttattgttttacgttattcaaaatagcatttactttgttctgatgataccttttgttcttctgtaggttgaacatgttaaagctgagagaaatttgctggctgaagttggtagccattgcatagtgaagctttactattcgttccaggatgctgaatacctgtatttgattatggaatatctgcctggtggggacatgatgactttgctgatgagggaagataccttacccgaagacgtggctagattttacattgcgcagagtgtgcttgccatagaatctattcacaagcacaactatattcataggtccaaattattccattttgtctcaaaacatagctttagatagaagattttgtggttattttggttgatatttgttacataccaggtatttaatctgtctcactagttcaaagtttgctgcctttccagagacatcaaacccgacaaccttcttctggataaatatggtcacatgaaactctcagattttggcctgtgtaaacctcttgattgtacaactttgcctgcactgcatgaaaatagaactatgggtgatgaaaatatgacagaagcaatggatatcgatggaactgaggcggataataggaaaagctggaggagccctcgtgaacaacttcagcattggcagatgaacaggaggaaattggtatggtatcttcactgactcgtcaatttagtacattcaacttgatttggaagtagttctctacattatctttaagcgcactttctaatggcttcaaaaattccaccttttttattattatttattataccttcttctagtttttatttttaatgaaaaagttacctttatataagttagctaaatgttttcaacggttaggatatagaactctcattatttttgtatttgaaatagtcctgagccataatatctttggtgtcacacatctttttacttttgttttcctcagccaagtgtaatgtgtggagttcccatatcaactgttttggttgaattgactatttgttttgcatttctaaaacaattgtgtaaagagttttgttcagccagctggataaatattaattaaaatttacattaactttatagtctatgtatttttttaaaggctaactcgcttaaacaaatatggcattttttccgatagacttaatagagaataaatagcatgtatagaatagctcatgtttgattggacatttattaacccataaagtatgaaggatttgtctatgtgcaccttaaacttgttcattatgccatatgatatcacaatgtcttgtggtgtacctgattcacgcattaccgtaattatttgtacctttgacaccttttcactttttctctttttaataattattatgaaggcattttcaactgtgggaactccagactacattgctcctgaagtactattgaagaaaggatacggaatggagtgtgactggttagtttctttttcattttgtatattctctgagttctttcaatctctacactcatttagaatatctttttttggataacatcgttaattttggacacatttcttacagtgctataaccgtgttgctcttagtttctagttttattaatcattttagagagtagttagtattgggttttttctttattcaagtttgatgttacctgctctcttcatccgctaactagtctgttcctgatttgttataatggactttgttttgcttatcttttcaatgtatttatgcttttgggactcaatgtaggtggtcactgggagcaattatgtacgaaatgcttgttggttatcctccattttattcagatgaaccaatagctacgtgcagaaaggtaacatgcctaactcgcttagagagaaccagctatactttatagaaaattcacctttccataatcaccttaccttttctttcatgtaaactatgtagaaatcaactgaaaatggaaatggtttccaaaacggaatcataattatagtaatattaacattaatatctcattttcacttaaaattaataaatattgaaagcctcttaggcaacccggggttgggctttcagtcaatttagctccacatcttttggcatttcttcacctcctggttatcatgtctatttaacttgatagatatgcatgaatgctttgtatctttatttttttctcctatttctgtcagattgttcattggagaacccacctgcaattcccagaagatgcaaagttgacacctgaggctaaggatctgatttgtaggttgctctgtgatgtcgatcataggctaggtactggaggggcacaccaaattaaggtatggtgttttttttttctcttcataatttgaaaaggtttctaaagattccttcttcatttcgttattaaagtaataacacattactctattgtaccagtctcacccttggttcaatggcgtcatgtgggataaactctatgaaatggaagcagcttttaaaccagaagtcaatggagagcttgatacccagaacttcatgaagtttgatgaagtatttatgcagtctctatgctattgtatttctttattttcctcattattgttgcttgtttctttattgtgcttactaataataacattattgttttgcttttataatcagttggatgctccaactccctcaagaagtggctctggaccctcccgaaaggttcgcaacattatttcagttatttatttttagattctataattttccttggaaatgtctctttaaattgctttctaatgatataaattgaatagaattatgcacatcgttttctaagaattctttatgctcttatggagtcgatttttctgctgttaagacagttaattaatgccatagatttctactctctttattaatttctttttgcctcttgttctttctataacacattatgaccttttactacatacatcttataatttcatggcagttgctcttaactcctaaagatttaagctttgttggctatacatacaagaatttcgatgctgtaaaagggcttcgccaatctctcggtatgcatttccaacttctatgctttttcattttatttaataattcaatgaatcaaaacataaactcattctttattctgtttcatttcaaaatctgcaggcgaggcacgcagagagcatgtaacaaaacaggcacaggaggaaatcgaaatacaaatgcttgcatcaacaggtgatcccatgttaccttaatttaagtaatcatgagatcaaaaccccgaaaacagaagattgaatcgaagatgcatactataataataggttaaaaaagtgcttatatatgttgtggaccaaccaaccatataagtgtacagtagtagttttcgaggagcttcataaaaaaaaaaaaaaaaaagaaagaaagaagaaaga

SEQ ID NO: 188452 - DNA, 2348 bp, Cannabis indica
aggtactttacctaagatccttcaaattctaatacatatgcacataatatgtcttcaaaaaatctgatagtcctttcagactgtctatctgtctgagaatgaaatgttgtgcttaagtttaactgtgtacccatagctcgatgtagactccctgtgaacttcggatctctgtcagatactatagaatttggagcaccatgaagaagaattatttttctaacatataattcagcatattaatcaatggagaagtttgttcaaacaggtaagaaatgagctaactttgtatacatgtcaattattaccacatagaatcatatttccccatagtcataggtaatttcaccacgaagtccagggttctatcttcctattccaatttcagaagatttaacaattgtaacaatctcgtagggctctgatggtctgcttttacttatatattgacatgtcagacaccgtgaaacatataatactatatatcatttttcatacatggctaccaatagatggattttaattttagtacatcttagtcatacctggatgtacaaagtaaggagtgatatgggattcatccaaaatctctttcttgatatcatcatccatataggaacacatactcggttcataaaccataacataccactttcatccacgataaaatcctcagtcttaccagttaaaactttattctgaatctccatgctgagaatttactgattctttctattaatgtgaattgcaaagtaatgttggctaattatcccacaaccaactcaagattggcttttgtcatttcatctcctagttgctttgaaatttgtttcatgttacatacttgtccttggccttttttgcgcagggcatctattatcacattggcctatctaggatgataaaggattttaaaatcataatcattcaccaactcaagccatcatctctgtctcatatcctgatccttctaagtgaagaaatacttcaagcttttatgatcggtgtataattcacattttttcccatataggtaatgccgccaaatttttaatgcaaataccattgcagcatgttacagattatgagtagggtacctatgtccatactctttcagctattgagaagcataggctattaccttttcaacttgcattaatacacagcttagacctagtctgaaagcatcacaatatacaacaaatttttccttatcagaaggaagaattagtactggaacagtgaccagtcgttgctttaactcttagaaactttcctcgcaccgatcagtccaagtaaattttagatttttccttgtcaatttcattaaaggtgtcccaatatgtaccttagtcaataaaaaactaacattatctccccataaaagacataaaaaaaaacgtatttggtagttattagtggaattaatggttttggatttctcttccttttgattttgtttactatataagtaggacgttggtgtattgttgccaaaactatcgacacgtaaagtccttttaaaagtagtaagaattcaacatgtgggttaggttgatgagtgatgaaatttgaaacaatttatgtttaattatcaattaaattccgtcgtacagcggattttgacatgataataaatagtcagcgaacacataaatatatatattttttatttattggcatcgaaagaaccccaacgaaccaaaaataattgagaggtgtttggttaattaactgaaaaaagtggtcaaataatcgacttgttgtgttaagttagttgtttatttgtctttcattagtagctagctagctaaaatatcttgcctaattcatatgtgttacactacatgtgtacaatatatattaattattgtttgagcagttttgactttggaacaatcaaaatcagttataaaagcacatatctatacattattaaggtttcaaaatgttttcttttatatttaattcagtgtcaaaccatttcatcaatatttcaatttcagcaaattagacttaatataaatgtgaaacagataaacttttagtaagtaaaaagatacaatctatccaatatatgtgtacgtacacctacccatagttaggttatattggaagatatattattaatgctttggtgaatgatctaatccatgaagcaagcaaggcttaaagttattattttattagtttagcaagttgatttcacgcatgtctttctgaatggagaagaaattgagagatagaacgtctatgttgtattgatcaatattgctacttaacgaaatacattatacaaagttagtttatatattgtagcactatatatacactataagaagatagtttgt

SEQ ID NO: 188453 - DNA, 2634 bp, Cannabis indica
gaagaagaagaagaagaaataaacggcacggcagagatcaagatcggcaaataaaagtcaaagaaaagctaattaagcaacaaacctttctctctcaataaacaatggaacaatgttgatagactatcataatacactgaaaatttattgattcggttgctactacactcaacctaatatttattttatttatattataactgttatatataccacttccaagatcagaagtttcgcatatttctttcttcctaagcataagaaacaaaatataactattaaataattgataatcaacgatggtgacagatataagaccaataaataattaaatacaggttgtttatggcttcatatcaagacaaaaagctagtttacagtatcaattagcaaaaaaatggaattaaaaaaattgatcacagaagttttaggacaacaattcaatcaaagaactaatttgaatcttgatgattaattgtctcccaaaaccaattagaaatttaccaaagaatttaaaaccctaaaaacaggaacttactttgagagatcatctaaaatctcaaaatctgtctacaagtaccgtaattcttccattaataatttgaaattgctaaaaaattacagaaaatttagagaagaaggtgaagaattgcaatgagcaagaaccgtttagaaatgtaattcgtgtccgacctgtgaagagcttgtaagttgtgagttgaaactcaaaactgagagtgtaagagagagccacagccgtgtatatgtaatttcatgtcagtttccttcggataatcataagaaataacgttatataagcggccatcacgctttacattggtctggttgttttggacggtttatcctatatattttgacaaatttacatagattactaaatttttccattttcttataactatactgtgacacgcggatattaacttttttactattttttttattcggcagtatactcccttggttcaaagtttgtattatgggtttgtggcttacacgtttcttcatgggattgtgccacatttttattaaaagtaaatttatttaaaaagtttggatttgatggtatatgtcgctcaatatggattgagcgttgtctgccctttatgtcgctctatggcagttttttccgttttttctttttaactgttccatcacctatcttcatcactaacttctactaaactgttcccacccatcttctacctttgaaatttcctctagtcttttctcctgtaactcctcctctgcttcttttcgttgtgttccatcttactatccatggataatttcgttcctaacatgtctaatgctctgtctgaaagagaaagtgaagtcatcaacctgtccaatattagcattcctcccccaaggccagtagtcaatcgtcttctctgtcgagttttttctaagagagggtacaatcctaagcagttcaagaacttcatctcaacacaatgggttggtcgattcgaagtatctatctcgaattatgactccaacactaactcttacacaatttcatttggctgtgaaggcgatttacgacgagtcctttttaaggaaccttgacacttccataattagcacttgatcttatgccctccaagtgttcttcaaaatgcttcaatggacacttataccatcactccattttggatacaagtttatcgtatgccattccttagtaaatccgaagctttggcgaaaattcttggtaatatgattggaactttcttggaagttcatgatgactcgcttaatgaaggttgggggccttttctaagaatgcgagttggcatagatgtttctaagcctttgctccgtggtcaacttgtgtcctttccttggatggatgatgaactgtggctagacttccgttatgaaagattgccagaattctgttatgaatgtggtataattgggcacgtttttgataaatgtcccattttttttagaaaaattggatgaaggactgcacccagatctcccatatggcccttggatggaaggatctgctcttccaaagacaagttatgatagataccgacaggatttttctaaggaaggtccgtggactttcattacgcgtttgtctcgtaatactacaaacccaatcctctctcattccagacagttacctgcaattcctactcatgtcaccaatgctgaaaaaggcaaaggaataatggagtctattgataacattaacattgctaatcacgatctacatcatctgcaattaaaccgttcccaaaaaagaagtctgttggttttttggcttcggattttgcttcttcgtctggttctaaggataagaacattgataaacatattaccaatggataccatgaactctcccgtgacatgcctcctgttcaatcacattctccggatgttaattctctgtccaaccagtcccctgctactcctccctcaactcacaaacacaatgctatttcacattctaatcctactaaagtcgccactaccaccatccctattgctcattatccaccaacctctttgccaattgcaaaaaaatctgtggctattcttatggatactccccctgcctacatgcacattaactgtaatatcctaagattaaga

SEQ ID NO: 188454 - DNA, 987 bp, Cannabis indica
gcctgtaaagaaggattctgaagaggttagaggccttttattggcctagatggatgcttcttgaaagggtattgtaaaggaatgttgctaacaacaattggaattgatgggagcaacaatatgttcccaatagcttatgcaatttgtgaaaaagaagatacatatacatggacttggttttttcatctattgaaggaagatctatatgttgacaaccctgccatgttcacaatgatgagtgacaaacaaaaaggcctagaaaaagccattgcagaaatatgggagggagccaaagctcgaaattgtgttagacatttgcacagtaacttcaagaaagagtttcctgggttattaatgaaacaattaccatgggcggctgcaaggcaaccactcctcaagaattcaaaaggaggatgcaagaaattaaggaagttaatcccactgcatttgcttggttgtctggtaagttaccaactcagtggacaaagtcttatttttgagaaggtgtgaaatgtgacatgttggttaatagtacttgtgaaagtttcaatgctgttatattgtgtgctcgagataagcctctagtgtcattgttagagaagattaggtactggatgatgtgtaggttcaatgataagagagtaagtatatcaaagtggaagcacccagtgccggtggcaaatagaattatgcagattatagagaaacttaaaaaaattactaagaattgttatcctcaaagggcagatgcaaacaagttttaagtgcattaaccagggaataatgtgatctgtgtggtggatattgtatacagaacatgtacttgcagaaagtttcaattggctggaattccttgtgaacatgctttggcatgtatttggagcatcagagcaactggttatgattttatccatgaatattacaagaaagaacggtttgtaactgcttatgaattagttgttgagccaatgccaagtccagatgaat

SEQ ID NO: 188455 - DNA, 3946 bp, Cannabis indica
ctcgtcggtgctggtgaagatttggtggttttagcttctgggtattcgttttttttgtgatttgtttctatgtctagggttttggttatagacattgttgatttctgtgttgtgagtggaatttaaactctgttttgtaatggagtacggacgggaaagcgtggttcaggtgattggtactgagaattggtcaggagaccaagctatttgggctactgaagacgattatagagcttggaacaacaacagtgatacatctggagatacattttcgaactcgaattatgagcagagacaatcccagtctcgatcaggtagcgaaccacccaacaagaaatcgaagaattcgcaagatgtaacttcatcaaacaggtctaaagctattggaaaaatgtttttcaagaccaaactttgctgtaaattcagagctgggacttgtccttatatctcaaactgtaactttgctcatagtattgaagagcttagaaggccaccacctaattggcaagagattgtggctgctcatgaggaagaaaagggtgtatcttcagaaccaagggaagagtttcagattccttcagttgggtcttcaacttttgttgttgagacaccaaggtcttataaaggaagacattgtaagaagttttatactgaagaagggtgtccttatggtgatagttgcacatttcttcatgatgagcagtccaagaatagggagagtgtggctataagtttggggcctggagggtatggtggtgcgccgagtggaacgaacaacgctacgaacaatagcaatagcaacaacaccaccaccaccaccaacaacaacaacaacaacagcaacaacaacaacaacaataacaacaacaacaatagcaacagcaacaacaagccctccaactggaaaaccaggatttgcaataagtgggagttgactggttattgcccatttggaagcaaatgtcattttgctcatggttccgcaggtataattacactcacttacattttatttttgttctcaagatttgttgttttagagttggtctatgaagttaatttttaagttcttttcccatgctgtttttacaagtaaaatttataaaattcatcactaaagttctgcagttccctcagctcttgtaataaaattgtacaaaactttctctattgttaaaattaggagatagtatttttattaaggcaaagaaaaaaaaacatatgaagctcttgttttccaaactttttttatgatatggaataacatcttatatctaagcatctaataagtgttatcacatgaatggttaaccttgcaagtccaggatattttagaaatccttttttaagatatggaaaggttaagctattgagttttaatctaattgtactgtttcttttcttggtatggtgaagtgtatatatatttatatatatatatatatatatgtcttaccatttgtgaaaacctttatcttgcttgaatatcttattctggggttgtcgtgtgggggcataggtttcttataggtaccctggtggtccatgctttggtgaattgtagtattaccttttttcttcactgtatatgttttttcaagtgtaggaagaaactcaattttgatattatcttccctcttctatgtttttatttgtcatagtcaaatgatttgtatttactgaagttgttagttagactaatctaaaaattaattagtcttaaaaggcctacctaaaagagaagtctggaaaagggcctacacctatgaaacttgtaaataatatccaaatgtactcagaggacccttttccccaaagtagctgttcttctttcacttgttttccatatttgattatacttgataaatatatgccaaagtagatacttgatatataattagtcatttgatcattttaattgtgactaactcacttttagatgtaagcttatctttgttatctgattttgtccttctttgagataaagctatatttagatactgacacgatatcattagacatgtaccaaattgtgccatttgaatttccgtccagacatccatgttagacaccctttggaaaattgaatggaagtttgaatccaacaatctcaatagtttgagggaattttttaacggcttaaaaattttgggagtgcgatttgatcaaatagttgcccaatcaaaatcattgctgcaacatctgtttttgaaattctattattgctgtggaattgttctgtttttgactaaagtagttttgattttcttggctacagagttacaccgttatggcggcggcctagtggagacagacgcgagagacccttcttcggttcctacagaaaataaacaacagggtggtggagtgactccaaaagctgcagcagatactgtggttgcatcatcagttccttcggttcctcattcggatgtcttccacttaggagttccgtcacaacgatcatctatagtaaatcagaggccagggcatagagctcatcaaaaatggaaaggtcctgacaaaattagtagaatatatggcgattggattgatgatattgaataaaaattagaattttcgctgacccgcaaatgtcgaaacaaactataataaccccccgaatcgaatttcgcataaactaaattacctctgtacgatattaatttgatcatgtaactctgtaacttatgatttgaagaagtagttttcatcttacttcaaatgcttgattgttcatgttagagctccataattatgtgcaaatctttgttgtattttaggctcattataatatggtcttctgatgatcttcaaattaccattttgccccgttagagtatcttttgtgtgacgcagtgtcaattttattacaagccattattattaaatcacaagagtagtggaaatagtttattccttctcatttcagcatttgaaataaaaatatatattttttttttcaggcaaataatttgcttctacttagtgacacactctttggtgtccaaaataatgttgttgtttctatataagatttcttaattaaaatttgattaggctattttgaaattttaccttaaattattataattattaaatgagcttttctcagttttaactaaaaaaaaggtaacaatattacaaatacttctaattggccaaataaacatgtattatggtctagaaactaagtctaagattggttctcacctaggcacatttcctaaactgtccttctttagtctaatttcttttctggttttagttaggacagttaagttagttatacctataaataaacatagcagtttattgcatagggggtatggttcagtttcactaattcgagattaagagcctttgtattggttgacagcctaatcagaagagagtcttgtggcataagagaggagagtacattagtgtacttggggtgataattgtttgcattattgtaatcattctttgcataattgaataaagggaagtgcctcaatggctgaactttgattccattttcaagtttaagaaaaagaaactacactgactaaagctacagtacaccaatatttattttctattttttgaaaaaaaaaaactttcgaatccaattttttttttattattttttttaaaaaaaactttactccaaaatagctctacaattacatattatatatataatagtaataacaacctaatataaatcacattcctccctaaattaattatagtcgctccaatattgttattcttcgataaggagtgtcatccaatctaatcctattttggtcatagtacatccgatctgtactaagtgcggattttatttttttggtatccaatccaatccgcaaaagtgcggattggatcgattattttggatttggttactttttaatattaaattatttaatatttatgaaaaatatttttttactat

SEQ ID NO: 188456 - DNA, 3774 bp, Cannabis indica
agagagagagagagagagagagagagagagaagaaatcaagactgaatcttgaactacagtcacacatgtaccttgtgatcgcgcataggttgcaagtggaacaagttccaaaacttctttccttcatgtcaagaaatcacaacagtcaataataacagaagaaaagaaaaagtaaatctggaaagctacaaagaaatagtataaacatataagcttcacacaggtaagctatagtttcttaaaaaaaaatataaactacagaaataaattaaatggaaagaaaaagtatatggcatatttgaaccatcaagaaacagctctttactaaccactcttagtataattgatcagctgaacagtaatttcccgctgttccctaatagcatcccttatctttgagacagttgcttgatccgtttcaggtccttgaagaaacctacaaagtggaagatacaccaataactaatcacaaaaatgctgaatgaagttttattgagcttgtgaaaacttttatcctataaagaggataataccgatatcatttctctctctctttgatatcagatactttgttattggataatactttacggatgccctaattgaagcaaatctcacactctcactagaatatagactgttgcaaaaaagaaaaaacaaacaataacaaagatagcagttttactaaccgacaatttgtacccagaatttcttctcgggtatattctgtcaattctaaaaagctgtcagatgcaaatatctgctcagaaagaaaaaaaaaacagtcacaacacatcttaagtgtcagtttaggtaagtaaaaatcaaatttcatatgagatgaatccaacgaattaatagattttctttcagaaaatttaaataccaatgataattaaacagttaaaaaataaactcctcaatttaagaaagtgaatcataaacaaaccaaacattggctctggaaatgaacaaaaatgcaagaaatttgaataaaaaggtgctctattagcactggttgtaggtctgagatataagttgcataaagttcaatgtggtaaggtttatcatgaaatgaatatagtttatgagaatgataaaaaagaaaaaaggttctgggttgttgagactatagttctgcattaaaagtaatgagaatgtacattatgtaacatatcttacaattgggttatcaggaagtctaggatcagtaatcacaaaattcttttcaatgcgttccaatgtggtcgcaaggtcaaacccttggcgtgcatgcctttctctttcagcaatctcccaactatcagtcctctctacgggcatcaaattttcttgttcaagatttggtttttcgtcaagctcctttgctgagctcatagattttccctttggcctagaggagaacatcaatcattcagtttgaataatcaagagaccaaattcaaccaaacatttacattacgaaactcaactcaaatctacatacagtgaaagtaacctaggaatcctgtttttaacatcactcttattatagcaaaagaataaaccttgtaactaaaaatctcaccccaataacgacgtgcgtcctgattttctagatctcttgcttgaatcttgagtactcttgcgagacaaatcatttatgggatctaactggggagtttttctaccaggagtgccattactcttggtttcaactgattcaggaacatcattaaggttgaatttatctagctcatcagacttgaagttaacgtcataactaatactccgtgtgtgagatcgtggatccttcactgtttggacaacctcagtcatggaatctagagccttcgccttctgacgagcttatgcatgaagataaaattattagagctgactatagtgacattatcattcaccaatgtgaagaaaataagcttaccatcataacgaattagcgattgaggcagtccattaggccgcaatgtcttgtccacaattccttcagtatatttgctaacctcaacctgcattctgcatagcagcattgaagacaatatcatgacataaaattcccacaaccaaaatatttcatcagtcccgaaattttccattcagagcaaatgttacaaagcatcaacttaagaaacaaacccaagaaaacccaaatccctaaaatacatccttaaagtgcccaaattccaaattctactacatccgtctaagaatgccttctttcaaatccattatacaacatttagaaagcggatatcaaagcaagcatgttcaatcagccatattagcaatcaattaactaagaaaacaaacacaacacaattaaaatcactgtgaaaaggaagtactaacccaataaacttaatggtgtttccttgatcatcttttataggtgtaacagtaagaagattccagaaaggcgtaccatccttcttatagttcaacaacctaccacaataacttctcccatacctcacggcttctcgtattttatccacttctttctggtccgtttccggtccctgaagaaatcgactgcaaccaaaaaaatcgagcaattactttccataaagctccttcgttttctatctccgatcaaattcttcctcttaagacctaaaaccctaactgagaccaaagcaaattctccaaaacggaggcagcaatacacagtgccgccatttacgaacataaattaggagttagggttaagtaattcaaagaaaatgcagaaccagaaacctaaaactagtcgaaaatgtagccggtgatcgatttggcgctttcaaatcggtttagcgcgctttaccgttatctggtaaagactgaacctatttataggcacgtataatcataaaatttgcataatgccacttttcattttttttttcaaaattaaattaccatttttcaaattgaaatatgcagatttcagccataaattacaccataatgcattaaaatataatgttccactgttttaaaatatactcgttaattatttcattttttaggaaaaggtaagggcaggaccgggtttgggctaaagcgggttaggcccgcctaaggcgggttcaaaataaatatttttctagtattttctgtaaataccacatattttttaaataaatgatctaataattttatttgtcctaagacccacccaattttagggtcaggagcgataatttattcaaattatttaaagataacatttgctatcgaccgatcttcgatacaaatagaatttcttgtccactaaatcatattattgttgtcaaaatatgagcaataatattacaagacctattacaatgaacaatactaataactttgagcttattacaaatcaatttttatggacgatttaaactgtatgtttggaagttgaattttagtaaaaaaaaatagaaaataaaaaaaaaatatcattttggtatggaataaaaaattgtatagaaaaaatacttgatttaataaaattttacataccaaacatatatttttttttctttacattttccttttataatcaacagtaaaatctttgtgcaaaaatatagcttttttttttttgtaaatgttattttatagaaaaattgaaaaaaaaaaaggttaaaaaattataagaaaatcatataagagtaactaggtactcttatggtaaccaattaccataaagaagtaaccaaacatcttatgttgttttttttttctataaatttttaactttttttcctaaaaattttctagtaaaataactctttcaaaaaact

SEQ ID NO: 188457 - DNA, 2700 bp, Cannabis indica
atatatttgtacatatgcaaaagtcatgggttaattccctaccatccaagctgtctttcagaaaaaatacccctcctaggaaacaaatggtgtgcaattatagaatgggtgtacattacatgatgtattcatatatcataccaacttgtttaattttatggagccaagattctattatctgtgtggaatgactacaattccatggcaaggcacaacttttgttctcctataatgtatattatatttgtaagagtaatatgatatcacattcaaattaacatgtacatattaatttgtacactctaattataaattataatgtgtattttgtaaggatcctatatccaacaaataagaaaagaaaataataatagaagaagagaaactgtttgtattattgaattgaaaagagtattataactttatatacagtgtttaataacgaaaagagaataatagaattataaccaaccaaaccattttaactgatctaactaacttgatgattgagctgttttagttttactatcaggccccctcaaatttagggtggttgagcaaaccactccaagtttatctttaagaaaaggaaacttaaagttagaaataggtttggtaagagtatctactaactagtgttcaacatgaacatgatgtattacgatttccttgttgagcactttgtctcgaacaaagtagaaattaatctttatatgcttcgtttgagcatgcaagactggatttgcagcaagcataacggtactaatgttgtcacaccaaatggttggagtggtgactggaacattaggctcagatagaaatgattggatccaattaatcttagagacaatagaggtaagaattcgaaattatgcttttgttgaggatcaagatatggtttgttgcttcttagactgccaccctagcacattatcaccccagaagatgcaaaaatcagaagttgaatgcctgtcatctgggtcaacaacctagtctacatcacaataggcttgaatatagaagtgagttattgatttgagctgtaggccatagtctatagtgccagaaaggtacctcaatactctttttactgtaacaaggtgagattgtagagggttatgcatgaattgacaaactttattaacactgaatgcaatgtcaggtctagtgatggtacatattgaaaagctccaacaatagatctatattcagagacattgatcattgggtaacttccatagttagataatcttaggccattgttcattggtgagctttgagttttgacaccttgtatttcagtcttgcaaaggaggtcttgagtatatttcttctaagagagtgtcacaccatttgatgtaggtagaacttgaatttccaaaaaatagttgacattgcctaagtctttgagagaaaactttgcacttaatgtagatatcagtgaggaaacttgagtgttattgctacctgtaattaggatgtcaaatacataaataagaatatgtagatgcaagattaaggtgttatttaaacaaataaagatgaatcagtcttggcagaggtgaaaccaagactaatgagagcaatagagagcttctcaaaccaggttcttggagcttgtcttacaccatacaatgccttgttaactttgcacacttttttaagagcaaaagcatcagcaaagccaggtggtcgtgtcatataaatctcctcatgtaaattcccattgagaaatgtattgttgacatctagctgcctcacaagccacccttttgtaacagccagagagagtacaattcgaatggtaatatgcttaatcataggactaaaggtctcattgaaatcaaatccttcttgttgatgaaaacttttggccacaagtcttgctttgaatcgaataacactacaattttcattttccttaatcctataaacccacttacatccaattaaagttctgtttggaggcagtaacaccaaatcctatgttttatttctcttcaaagatgtgttttctgtgtccatagcagcaagccactttggatcttgtagagaagatttgagagatttcagagttagagaggccatgagtactttaggctttctaatacctggctttgctctagttttcatgggatgagtgttgagttgaggatgaatagatgttgtgttatttagtgaaacaacaacagacttagaagtgacttctgttgtagcattaagaatagcagaaggagcagtagtagtaatatttggagctgtattgaggtgcgaaggcagttctacaggtggtcgatcaaaatcttatcatttgaaattagagagacacctgcattgtaattgttagtagccaaaccatgaagtggatttgcattagtaataatgagttggctagtgtcagattgagatgacacactaagtatgacttgatgagttggaattaagtcaggagcttctatagtagctggataatgggtatttgaatgtgttataataggtggagaagctctagtgttgggaaaagacactgaattatcattagagaaggatatagttgaagaaaaagggaaaacactttcacaaaagagaacatctctagagatgtataacttgccatctttggataatcacttataacctttgtgtgagagactatagcctataaatgtgcatggttgggatagtattgtaatttatttt

SEQ ID NO: 188458 - DNA, 2688 bp, Cannabis indica
tggatcacattagaaactcaatgcaagcatagaaggctactaactaacctaggatatatatgacttaaagattagagtaacataattaaaaaaaaatattaatactaagaaattaaatactaatgatgattgagtagaaaagatatttcaacacaatttaagttttttggtcatgtgtataatattttaagatactatttagtctcaagaagaggatcttcatgaattcttgatacatatatatatatagtataataattaattttatttaaaaaattgtcatcattgatctttttctttttcttcttttttttaatatattaataaatgaataataattcattcttattttcatttattagtatttgtcttcatttaaataaagagccggcctctcaatagggaagacttgaagaattggttaaattaatgctatattactctttaacaaaataagcaatttaaatttatttatttattattattataattatggataaaacaattgaaaggaatggttattaatccatcaaaattggtttttactcaaatcatttttttaattctaacgttttaaagtactattaaacaaataaatgtaataaaaatgaattttattttatttcattaccttaattatatgttcatagtttagtgattccacgtttcttacgagtaagttgcagaaagtaagtttttagttcaacgtggaaaaagaaatcatgtgttttaaaatttgtaatttttctatttaagagagagagagagagtgaattgacataaatataaataatagtttgtaaccatttattatttagtttgtaattaatgatgttataaacttgtaaactttagtaaaaaatagtattgttacaaatttgtaagttttagttatagaaaaataaactttgtatttagatcccttcatatattagtaaattttttcaaattctgtatttttctataaagtattttttttttcagtatttttggtatttctttccttcaaatttttagatggtagttaggaatttagagttagagaaaatacaatacataactttgaaaattgaggatatatttcttagtcaaatgcagagccctctcaaggggccatatggggcctaggcccaaaactcccccctttgatcatttttttgggattttatttatttatttatttaaaataatatctattttcacagaaagaaaaaaatatcaaattttatatttctaagtatatcttctttttatcaatttataatttttgacaaagtcccaaaatagttgagacggccgtggtaataaactaaaaatgattatgcatataatatagcaattatagttttcattaatttaattaaaaaacaaaattcatttgacatatatttattttctgagtttgtgtttaagtttcttataattttttgggccttgcatgctcttatcctttgtagccaagattttttctattggttttatgttctctttcacttagtgattctattagtataactcattgtttaaatagattcaatctaaacattggattaaaactttgttgatgaaaaatttaaacttgaaaatgaaatatactcagctaataaatttgtagccaaaaaaggattgaatcaattttcaactttgataaaagtacatagcaaatcctataaaatgtggtttgccatgaccaacatctaatctatatatatatatatacaactaatataaagttatatacatttttttacttagtaatgatgttaagtaaagacactctattttggaccaaacatctaaacatagtattcaatccaaccacaatggcttcactactagaatcaagatccaacaacatcctttgactcatttccacttcattactttgtatgttcttcattagagaatgaagaaaaaggtcaacactttccaccaaattcacatcttcttgttcttcttctcttctttttgatcattatatgacaaagatttcatctttaccacttttgaaagcaatgaccatccatttgttgttgttggaatagccaaaataaacttgagaagagtcttcaaaatggagatggtgattgaggttgtttctcttagtgttttttcaactatagatagatcttctaagccttgttgttgtgaagcaatggatttggtttccattctctttaaccctccaagacatttggcaatgtctttctttgccttctttctaaaacaaagataagtttgaatacttgtttcaatgcttgaatctctcccttttcgacgaaaagctgattgaagactctgaacttgttccttcattgttaccattaagtctcttgctatgttggttgtgtcaagcaatgtgattgaactttccaaggcttgttcaaccactttgccatgttttgttggggccaagagagcttgttgggtgctcggcgaggcgattagttcctctacacaactatacaactctgctaaaccaaccaagctagcttgaatggtttcaaatccattaaatggtgaagattggtatgatttgaggtggtttaataaggcttctattcttacacaacaagggtgttccctagatggtaaacttatggaccttaaaggttgatttgccatcttttacttctttttttctttgttgttttgaagagtgctttgaaatttggttatgaaaaatat

SEQ ID NO: 188459 - DNA, 3853 bp, Cannabis indica
aggatcgtttactgaatttctttgatgacgatgttatttctgctattcttgttgttcctattggtgaatcttctcttgaggacagtcatatgggagcatcactcctctggttcttttactctaagttcggcttatcatttagttagctactcattttttgcctcacttgatagtcattccatgatttgctggtgaaaagttctctagaatcttaaaatgcccgagaaaataaataaatctattgtagagtttttattaaagaaaaaaaaattggattgtgcacaagacctaagatttaagttgaaggggcgatatttttttatataagtgaggggggcgtcttttttttcctacattgtataacatgttaaaaattaatgcataataaaaatattaagttcaataattaagatactaaatgtaaatcttactagtagagattcaaaaaagtaaaatgcaactactaaactaaacatgcttgaaattagaactcatgactttttttacatgcttgaaatagctttaccattatactaaacttgttttatgttcgtaaatatcacttttatttataaatatatatagtaactagttaaaatgcatatttttttttcttcgattttttttttaggtagggtcgactgccccaccttgctcctatgtggatccgccatggctgtgcagctttagattttagttgtatgctgaaataaattcataattcatttgtaaaatgtatgctgaaaaaaaaaaaaccgatactaacgaaattgttcaaaacgtaaaatgttaatggtgtcaagcaatctctttccaacaaataaataaataataacaacaggaaacattaataattttctcctgttattcaactttaatttatagattatacaaaaaaggatccttgatacacaactcgaagaccagaagacagattttctactaagaattaaaccaaaacaagatatgagcaaaattacattactcaaatgtgacagtgagagtgacaaatatggtattacatgttgctaaaaccttagtttagtattagtaatcacagcaaacagctcttaaaaccactctctagttcttttgcatctaagttcttacctataaaaactatcttgttaactcttggttcatctgtgccccataaccgatcaggtgaaccttggaatatgtcgtgaacaccctgaagtttcaaacagaaaattacatgcaacatattaagaacaaattattggtataaccaatttcggaaacagagaatttcaggtatgtgctacttcctggcattacacaggaaagttatcatgtacaaaagaagatagcccacctggaaaacaaatctctcatccattccctgaacagatagaagacctttcatccggtatatgtcttcgcttcgttccatcaataatgtaccaagccacatattagcctgaaaataattcagcaatggaattgttacaactgttgtaactttaaacttttggcattcttctaaaatacaaggtaagatcaaaggcataaatccttcaagttccattattgaattattctaggtggttagtgtatgtgttattctttaagcattatacagaactcaccttctcaagatctaagctcccttcacaaactatactgacggaagaaacacctggatcatgagtatggtcatgggcgtggtgatcatggtgatgttctgcatataagtgttaaatgcgaggtattagattatacctttacgaggagaagaaaaaagtagcatagttaagaataaaagatacgcggttatctaacaaagacagcagaaagtatgtgcctgtgcacgtgtattgtaatatttattgttcatgtatgaccatatacgcagatcaaattaccatgttcatgatcatggtgatgatgatcatgcccatgatcatgctcgtgatgatgatcatgcccatgttcatgatgatcttcctttgcaccttcagtctcaatggcactctctatcctggcaagtacaaagcaaaggtcagcagagtatcatcggaaacatccagaaccacgaataaattaaaccagaaggaaagggtataaggacacacctctccaaatcaaaacccccaacaccaagtacataatctaagtctacttgtccaaattttgttcgcttgagttcagccaagctattgattttctacattgaagtccaaaatcaaagttaaaaaaaattaataaaaataaattgaaacatgtacataagaagagaaaagggacaacagaaggaggtgccaacccgaactcgttgaaccaatgatgcaatttctggctctcccacaagatcagtctgcaagaaaaacaggatatgggcatcagatgggtatagcaacattagaagatataatatataaatatcataatattctcctccatagtaattcttcatctatatctagaaagctggttgggttgctaccataacattatcccatttggaagctgcaacaggtctccgaaacagttgggtttgaaatccataaaagaacacaacatattgtggacagctctgataactcatttcaagtagacaacattcttattcttgggaaaataatgaaaataatctttaactaccttattcacaataatacgatcagcataagcaatttgctctattgcttcattaactactcctttcggcttgatttcatccaaatgaaatccagcgtgtttggcatcgaccaaagtgacaacaccatctaacttgacatcattaaaaatcttatcttcagcataaaatgtctgaatgatcggtgctggattcgccaaccctgccataaattgaaaaagccaactgtataagccaccacagttgtataaaatagcaggcataaacaaaaccaatcaacaacaataatcactgccaaaaataagagagcacttattcatatactttaaaattaaattcagtatctaatcatctagaaaatgactaaatttcctacctgtagtctcaatcacaatatgatcaaatttccctttcttcctctccaccaactctgatatcatccttacaagatcaccctcacagtgcagcaaaggcaaccgttattcaacataacaatatcttcagccccagtagtttttgcagcgactaaagaaccatcaatgtctacctcaccaaactgcaaaaccaatgaaatttgacacattctaattcacccttaaacatctactaccaccacaaaaaccagattggatcaacctcttacctcattctcaataactgcaattttcttcccatgttccttagtcaatatatgattaagcaatgttgtctgtaaaatttcacacaataaccgtattactgataatgccaaaactttcaatatttgggtagaaattaagaaattttcctgctttaagacaagaaaaagaccatatacctttccagagcccaagaaaccggtgattatggtggccgggatcctattatcgggtggaattttcgtagtgacgtcggaggtatcgctctcctgcgaggtggttgcggcagaagaagccacagtgcggcttctagagccgagcctcggcttggcgaagtcgagggcaaggagtcctgagcgaaaagacgaagtggagaagcttaccgcgggtttgcataggagagggaaatggactgcggttcgaagccggtaaagtgaggccggtgacggagtccgagaagtgagggcgattatggcggtggctaagccaaggtccgctgataacgaagccatggtagctctctctggtctctggtcgatggtttgtttgtggtaaagggctttttggggtttctttctaaaagggtttatcactc

SEQ ID NO: 188460 - DNA, 1787 bp, Cannabis indica
atgatttggtacatgtctaagtttaggagacaaaaaccttaattaattgtccaaaagcaaaggtagaacttaatatttgattttcttttttgaataaattaataatatatgattactatatactcaaatgtataatttatttacgtacgaaatctgtacttgttaaatatattgatatgtaccttttttaaaacacaaatctatcatatgctttgtaaatgcacgtacgtgtagattcatgtatggcttgattatcatatacttttgttctttcctccgcgcgcgacctaataaatgaaatctatacatgcatctcctaggctttattatatacatcttatctttcttttatgttctttctttataacaaaataatccttctatttctacatagtacagacacgtaactatatagtaatatttcacctatggtatgtggaagatggtcttggactattaaagaaaacgacaataaatggagaaggtgaagtgaaggtaaacaattattggttgtaaaataaaagtaaagcgcctattgggaattggcctttttgcaccacaatactttcttccattgtttcaaaaagcttttagtttaaagtaataagctaaaacagaaccacatgcataccctaaagcaaagagaacacaatgtttttttaaaaaaaaaaggtaggccgcccctccctctctactttaatctttttagagactttatgaaatacacatatatctatatttgtatataatattaacttgaaaacaaaagacatcatattatgttatagtaacctctctatctctaccgtttaaacttttatccacaaaagttgtgaagttgcattgcatttgcatggggaccataaagcttctattccaaagtaaaatataactctatctccatttcaatataaatatatatatatatatatatatgtatatatatataaataagctattgggagtcccactgtatacactctcctactcccaccaatttccattagtcaatttttaaaatttgtatcccatcaaaaaccaaattgagcatactcttgcatgttgctatttgtttaagtatttatcacttcattataaaaatctaagtaactttaatcttactacgtaacaatacttgatctttgtatttttttttttcttttaatttggttttacattcaaatggctgtagtggcgaaaccaattataatctctttcgaagtgataacattaacaaagtataatgaacaaattaattaccttgacaacataaaagtaacactatatatatacttattattattcgatcgacaaaggaatttaatagagacaaaactaataaaaattaactattaagttggagtcgcctccctttggctccaatattgatcgctatattttttttttatatttaccctactttaccatataaaatactaaatagtgatatgtctttaagaagcatatgtcttttctgctatatatccattaaaagaaaaatgattttaatggattgattagcatatataatcacccattctcatcaaacatttgctaaagtagttctatcctaaaatgactccaatattgctcaagttatttgtatagtgatttcacttatttttttttctttttgtatcttctcttcttccttcttcgagcatcatttcactgtcctatatataaaaatctgcacatgtaatttctatggttagctaaccaaagcgtgagggacgacatggcgaaagtgttagaaataataaaagagagattacaatagaagaata

SEQ ID NO: 188461 - DNA, 798 bp, Cannabis indica
atattaagctgggatttgttatgccgtcccaaggctatgggtggactggggtttaggaagatggagcatatgaacttagctttattagccaagttagcgtggaaaatggcgtctgattctgataccccatgggtgaactgctttaaggctaagtattgcaggaggaactccttttggagtgtcgagagtaagagccatgattcaactacttggaaagggattctttctgcccgagagatccttaggaagggcagcattacccttgtggggagtggagcgaatgtcgacatatggaagcaaccatggatcccatggttgaactatgcggagttcttaagtctaatgcaggaggtgagaggtcgatcccctctgctaaggtcgattgcagatatctccttcccaaatggccaatggaatagacagcgagtccaggagatttttggtaatgatatgggcgccagaatttgtgacattcagagactaccaactctcaattcagatatgctgttttggaaatatgctgaggatggggaattctctgtcaaaagggctcttaatgtctgttccaattcaaatagccttaatgttgcacatggccataatgctgacattgatagcaaactatggaaattagtttggaacgataaggtccattttcgactttcggtattgatttggcgagtcttagttggttgtctcccaaccaaggataagttgcattttgtgagggagaaaacctgtcttctgtgtgactctgcattggagacaagttcccatcttttctgggagtgttctttt

SEQ ID NO: 188462 - DNA, 1887 bp, Cannabis indica
atatttttttttctttttcaaatcaggctgagttggtctcaatgatgctgaggtggctccctgaagatattactgttcacaatgaagatttagaaggtttaacgtgaaactcatgtttttgttttccctttaattagagttgatttattatattctcttttatgtactatcgtcctatggatatatgtgaacatggatttaatcctgattaatgctaataataggtgatcggcgacgactattactacgtggtcttactcattctttgtctgaaattttgcctctactgtatactgtatgcatctttctccctctttaactttcagaagctgttaaaatttgaccatcaatttaatgtttaagttgcttgtgcctcaagttgcttgaaaggcactttggagctgcaataagcgaagctggaaaacagcaaatggatgctgcaaaacaacatgcagctacggtgacagccactttaaatgctgtcaatgcatatgctgaatgggctccattacctgatcttgctaaatatggtataattcatgggtatgatttccttcttagaaggttttggaggttggcaaacatataattcatagacaattatatgtttcttatcctctctcccttttttaatgcttctcaacaggtgtggtttcttactttcatctcctgactttcgccttcatgcttgtgtaatttttaaacttgtctccctaggtaagcattatacttttcatatttggttccatgatgctttcactaaatatgcactattgatttacttagtaatgtgcacgtgccaattgcattttcattattgtattttgcagaagaagaccaactgatgaatcaacttctgaatttgatgctgcaatggctagtatccttaacatactgatgaatgtatccaaagaattcttacacaaatctgcctctggttctggcgttgttgatgaaagtgagattaactttgctgaatgcatatgtgagagtatggtgtctttgggctcttcaaatttgcaatgtgttgctggtgatagcagcgtgctaccttttttcttgcaacaggtagtaccaactaatactatcagggaaaatgtttctaatatcttcacaaatattattattattaatatgaaataaaatacaatccaagagactgaggagagaaataaataatttctcttatttatcctgtgcagatgctgggtttctttcagcattttaagctggcagttcattttcaatctctgctcttctggctggtatggttttttttgttgcttaaatgtttgaaaaaagcaatgtcgcacgatcttctatgctcttactatttaaggtttgcatgcttgtataggctcttatgagagacttaatgtcgaagccaaaggctgcaggatctggccctacccaggttgatgttgaaaagaaaaagatcttaagttttgtgaatgatgatacatgtagtgctatccttgatacatctttccagcacatgcttaagagagaaaaggttcttcctgcaatggcacattctttggggtcattagagttgtggagtgatgatattgagggaaagggagattttggccagtatcgatcgaaactggtatgaaactcactttatcccaaatttccttatgaaatgagattagttatatgactttctattaaaaaggctttttttttgttgctaagcttaatgttctataaaaggtgtttgcggtgcggacggtgtgatttttgcctattttttcaaaccaaaccgcatatttagtttttattattttccaaactgcaaccgcactgcaaaacctcaaaaccacaaaaatgcggtgcggttcggtgtgagcagttgacactattgccaaataatttattattaaa

SEQ ID NO: 188463 - DNA, 1290 bp, Cannabis indica
atatttattattctaaaaaagaagcatggatgtttttcaagaaaaaaacaaaaaggaaatctagtcgaaacggcaacggatcaaaatcaaattttggacacccttttttaaaaaaaattaaataattaaataattggacttaaacagccgataaaagtaataatggaacatttgaggggcacatctgcaatcaaaatacattgctctcccgctcgttctctctttttcgaattcgctctactctaccagttctagggtttggtcagaactcgattcaggaaacctagaatgagaaaatggtgaccggtgaactggcctccgatcttgttgatccgcttcaggaatactcaggttttgctctcttctcccataactttgattttttaccagaatcttccgagccatacaacttcgaccgcgaacttcaagtcatccacaacaacctcaattccgcggtactcctctcactttctagattttaagctttctagggttcttttcaatgtcattactttacttgcgtatttggtttggtgaccgagaaaatcgatgtaactttccgcgcttcattttcttgtgcgggtagctgactaattgtgtacagttttgtgattaaaacgactttgggtttgtttgattttagtaaaaacgaagaatttatgttttaaagctcatcaatttgattataagatattgattgttgttcatctcaaacaatgttattcaggcattacggagtccccataagttaagagaccaggcaaaggtcattgttgatggtacttccaaatctttgaactctaaagttgcgatggacagtaataacatcgttcctggcatggctgagggtaatccccgagaaagaaggccagctttgggtcgtaaacgagcccggttttcgttgaagcccaattccaggtaaaattttgattccatattatttcgtggagtctttcttcaataaccatttgattaatgctctatactcatttacagtcagcctgctaagagtcttgagcaaccaaagttggacttaaagaacctgaaagacccagaagagtttttcatggcttatgaaagacatgaaagtaagtctcaggtttatcttatcttgacttttccctaacatggttttaccaagttagttttaactgtgttttgactcttgcgtagatgccaaaaagaaatacgtaagcagatggggagcactcagtcagactcagatgaggagaatccatctaagattgggcgatcacgtcgaccagggatgctcaggtatagaaatgattt

SEQ ID NO: 188464 - DNA, 1585 bp, Cannabis indica
attatattattaattagtgaacttattaatttgaaaatttatgtatctaaactttctctctctttttcttttgaatatgtttcgtaatttttttttcttgaacaataaactttcaatgaaaaaaaagcgtttagtatattataaacaaaagatagaaaattctccatcaaaattagctcattatttactctaactccaggcatgaccgaccctagactaaagcaggttaagcccgtgcctagaaaccactaatctagagacccaaataaagaaaaagttctttaaaaaatgcacatgttttttaatgattttataaaataccatctatttatataataagggcttcaaaaaaatttacttttcataaggcctaatacaactcaagatcgactctaagtacatgcacaattaatcaatatgcgtgcacccatattgaccgaacaatgtatatgtatcatgaatgtcttaagaaaattagacaatagactagaaatatctttttattttaaggaaaatagtttatagatagaaaaaaattagaccttacagtcattacaaataatatttgtcgggatgattgacgggtaaatcatgccaattacattgttggcgtaagcctacttagtcacattatgggttgtaaagttataaaatctgacaataaaagaaaaattacaacttaaaaataaattaaagagcatattacattggtgaatatagttactaataccccaactcaaactggttccattcaactcattgataactatctccgagtcactctcaattaacgcaaatggcgtttcaaagcatggttttctctatagtcaactgaaaagtcgcagcttcttcaatttggggatcaactaaatttaaacttgttagtcgaccacccacaaaataaaacttgtgtaatccttaacgaaagtcactccacactaaaaatatcatctaaaaaatctagatcattctaaactcattatgatacataccattacctagaaaacaaaacatgtaaaaaagttaagaagttttagtgttttacaattctaacctaaaatataaaataattacaaaaatatttctaactaacctatttataataataccagtatcatatcagcctaaaatactagaatctaaaataattaatattagaatttgagaaaaatttgaaaaatctcacttcccgaactttaaaatttttctagatagaaaaataagctgctaaaataccaattaattactttttttattaaaaaaaaaaaaagaaaaaaaaatcaacttaaaagaaaaatctcaaatacaatttgtctggttagccttttatggtaactggttacccctctgattaccataagagtatcaggttacccttacttgattttcccatattcttcaacttttttttttttaatttttccatactaaataactttttcgaaaaacgaaaaaaaaaaaaaaaacctaaactattttagtcacaaaaacgtaaataaaaccaaactaaatttaaatatttacgtcctttgtatcctacctatttgtctctacgcctctaactgaagtaagcctagtcaaatac

SEQ ID NO: 188465 - DNA, 2374 bp, Cannabis indica
cggaccagttgggaagcactcagaaagagttatagaatattttgaggtcagttttagttttggattttatttaggaattctagtatggtccaaccacaaacatgagaacatgaatattttttttaacttaatccttttgtttttgacagggtattcccaaagttgcaaatattaagaataactataatccagcaacatggatgttagaagtcacctctacatctgcagaagctgaacttggtgtagactttgctcaaatatacagagaatcttctatatacgagtgagtactatcaaggataataatatcagtattttacagtttcattggtattaaagaggctaaattttatgtaatgtaggagcaacaaaaatcttgtaaagcaattgagtacaccacaaactggttcaagtgatcttcacttccccactcgcttttcacaaaatgcatggggacaattcaaattttgtctatggaaactaaacttgtcttattggaggagtcctgactacaacttgatgcgtctcatgcatacctttatatcagctgttttctttggtgcactgttttgggaccaaggaaaggaaatgtaaaaaatctcttcttctttcctattcattcgatcaaattaaagtgtttccaaaactctaatttttctttattcaattttatctcttccccatcttttcagaacaaaccagcagagcttattcaatgtatttggttcaatgtacacttctgtgatctttttgggaattaataactgcacaactgtcttacaacatgtagcaacagagagaaccgttatgtatcgcgaacaattcgcaggaatgtactcatcatgggcttattctcttgctcaggtacattttccttagaagttgctcgagtctcctgcttatgatcaagcctcttattcttgaactattacataacctttctccaacttcattttgtaggtggttgttgaaatcccatatcttttcacagaggcagtgatttttctgataataacatatccaatgattgggtactatgtgacagcatataagattttctggtacttctatggaattttctgttcattgatgtacttcaactacctcggaatgatgctcgtttctttaacacccaacttcaacattgctgccattttagcttcagttttctacatgttgttcaatctatttgcaggatttcttattcctaaaaaggtacatatacatatactacaaattcaaagttgagaaatcttagaactagtttcggtgtgtgtagaaactaatactattttgtattgtttatgtgtgtgtgtgtatatatgcagcatattccaaaatggtggatttggttatactatctaattccaacatcttggtcactaaatggtatgctaacttcacaatatggagacatagaaaaggaaattgaaatctatggtgaagtgaaggcagtgtctgccttcataaaagattactttggatttcaccatgaccaattgcctcttgtggcagttgttctcattgcctttccccttgtttacgcatctctctttacttattgtattggaaaattaaattaccagagaagataattagatggagtgattagattgtacatatatatatatatattatattgtattggtattatagtaaattttcttcttttttttttttggtttgcataatgtgagagagaatcttactaagatctggtattttcagtcattgtttattttcaaaaaaagtggagctagaggtattgtaatatgatcttacaaaaactcttattattcagtaacaatgagaattttattgaaagtaatcatagtgtaatgcatcctgaattaaaaataaataaataaaaaatcatctaatgacctgccctatcacaagaaagtattgaaatagaaatgtctaaaataaaatatttaaatactagttatacaatgaaacaagtaaaaattattttgttccatccagaaaaaaaaaagtaaaaatgactttgagtaataattaaagtcttctcagaatatggaagcaaatgaattgagtatatttcatttcaaaattaacaatgagaagagtagattatgtatttttttttatcaagaaggaagaacaattcattaatcaacaaacgagaatacacaagattacaagatcaagccattcaactccaaagcagaaaaaccagaaaaaatagccctctaattacaattaaatcttgccaaataatttgtctctattctattcatctttctatacactttgaatttactatattttttatttctttaacaatgttagcagctattttagaatatccctaaaaaaaatatttgttctatttaaccaaagacagtagcaa

SEQ ID NO: 188466 - DNA, 1803 bp, Cannabis indica
gatcgtgggcttattgatcaatttagtattcttttcttttcccagctctatgttgttaaattttcaattacactttgttaaaagtttccctgctttttttaaagttattacattatttttctggcataaaggtacaagctttggttctattgaatgcaagaaaagcgatggggtgttgtttgttgaatgaaatagaatatgacttgaattaaatggaattgttatgctcacagcattacacattcaaaaatggagaaaccttatttcttttttctattgaaattgcaataggttctgatgctaaagacgttttaaacactatttgggaaattctccaaacaatacgtgttgagataaaacagcatctgaaattgtgtttacaagttccgaagtgtcaacactacagttaagtttgtcactcatgtggcctttatatattctgtttaataagaatcttaaggcagaagaggaagcagcattatcaaagagagaacgttcaagtttcttagaatcctacccacatgagaagttatctaccaatggaaaatgctctgtttctgttttgcctagttcgtatattgttgatgtgagtaccagtgattctgcctttatctttctgaatgataccctgtatagtggctattaactttttcttgttcaatattatggaatgttaatatggattgtaacacatgttttaattgagtaaggtgctatgctgcttataggttccgcatgtaaatcagttatattcttgggattgtgggctcgcttgtgttctgatggttttcagaacctttagcatcaatgttcacagcatcgagtcgttggcagagctatgttgcacaacaaggtgttgtttcctttctattttgaacttcatttcaataaataagttctaatatagctggttgattttccagagttgggtaagccagaaattggtggaggaagtatgtgtagaaaccttaaaactcagttctctggtctgttagtcaaaaatccttaattcatgattgtgttgctaactgaatattttttattgttggatatagttttctacttaacttctaattttggcatatgtactgaaacttttaaaccgttttgaaaggtttgagacttggaggatagaagcttttattaacttatcttacttcatcagtatttatgtttcttatcctatggatgtatcgttagttatcctcagtatagacattgttataattatattacatgttatagacaatagatactccagtttaaattagactgcttctttcaaagtagaaaatgtaagttctttgtaattgatttgatgatggaaagcgtaggttatatatctcgtttctgtgttgagatctctctccctctctgtttatatacatatgtacttatgtatgtttaaatgtccacttgtctatagctgacagcctaacacctatcattgccatttcccaattgctgtcttccatcatggcataacatgagtctagattcttctatgaagtgggtttaaaggtaggatcaccttgaatattgggaattttttataagttaaaggtccttaaaagtaaattttgcattagaagcatgtcatagcttatgcatgttgtgtgagttagctccagaactatttagcgagcaaaaagactagggaacaacaataagcttgttttatttcttgcttctcaagtagattgaatgcaattttttttttttttgagtgtgtttagatattcactgacctattgatcggttttagatagagctggtatcaacaagttctcgcagatctcatta

SEQ ID NO: 188467 - DNA, 2284 bp, Cannabis indica
gtacattgtttttgagcatttctgttcactctagtattttgcagaactggaaaactatgttgaagtttgggaagaagaagaagatgaatacttggcacgtgcagtttatgagcatatgcaactgaacgagaaacaggtatgttgtgaaatatatgagagagcttatgtttgtaaaagaactaaccgtcattggaactatcaatctagtttgcagattttaatttttatttgtaaatctagctttttttaccaatagatgtttaattggttaaagtgtaggttggcatttgcgtttttctttctttagctagattggtaagtgctttaacttatgtaaaagattaacttcagttgtattgtgaggaaaatttattgatgcttgcgtgtttgcttaattgtaattaaaaatgttgtgagctgggaatagtgtgataagctctataaccaaattgttgtgtaaaaataagtttgtttagttaacattttaaaatacgtatttaaaaaaaaaacattttaaaatatccatcattatatgctacaacaataactttttagaaggaaattgaaatatttattttaaaatatatgtataatttaattaaacaatttataggttcatagttctttatttaaaataatggacattttaaatattctaagtaatatcaattaaatatataaataattataaattctcttctaaaataaaatttgaagttgggttgtgccagatgtatatgtttcactttagcttaataattattttttcctccaagtgaagtttaataagctgttatttacctgtttaataaacagtttaatccagaattcctacttaagcagcttttagtttttttttctctttctagaaagtaacttatccaatttggttgcttgtgtaagagattttaggctggacaatctaagtatgctagtgttgttttttaatgaattattggtttaaaattttcggtatgtgttatcatgttatttccttacttgaagtttgtatcttgggtttctaggctttctttcaagtacatcaatgaattcttttagtgggataatgtctgcttgctattaaaatgctttattagctcaaatctacaatgagcaacataatgagatgactaattgactgcgcatacaatgtgctgggtcagcatctgcctttctgtgtactttttatcttcaatgttgataattcttcgtaaagattataaggaaattagaaatgctttaaagtttgaagttgggtgacttattcaatcaaatgggcttcatgtcccttagagacactaatgatgtacaccatggcttcatgctagttttcatcaaggttgctagaccattgctcttcttctgtactatacacacctattgtatgttttaccaccttaatgatagtggtactatttttgtgctgctatagtgctatttgctccctgtatatctttggctctttttaaataaaattatgtttatatcctcatatgtctaatgaacagaagatatcattttatttaaatgctttttagggtttatcaaatgattggtgtgtaatttttttttctttggattctgtaacattatgctaggtgcacgaaactatttggtgcccaatatgtaagcaaggagaactgcgagagaatagtcatcttatatactgcactttatgtgatctacagctgaagaaaggcgaggaggtactgcaatcctctttgatgttataaatgattataatttcccatgttaattttggttgctgtcatgttcttccattttttttatttatttttaaatgtggtaatgtattatatagtctattatcatagacacctcctctaacattcttgaatctgaccttatgttttgttgagcaaacacacacacacacacaccctgattacagaaacttttaaattaaactggcttttcgtactacaattttcctttttattttattgaaatttgatacactaatttttttttatttttcaaaatgagtaatgagtatattcggctaagggaataaatttccatggaagaacttttaatcttttatatctttctttgttcactcccattatgcatctatttctccatatatgttcccatattgatttttgatcaaatattctggttactatcaatctttactatttcaggttaatttggagctactaagagccaggctagcagatgtacatgctgaacatcttgatcacggttgtatactgaggcctagtttttgcattataaccaggtttgatataactgcatt

SEQ ID NO: 188468 - DNA, 2194 bp, Cannabis indica
aaaaaaatacacatatttgagatatatctacgaagaagacaaaaatgaccgaaagatatctaaagcaggcaaaagtgaaaccacatagtctgatatgaaagaaagcctttcctcgcgagggcacaaagaattatctcatatgtgatgtttgttttccctgcttcccaaactctccaaccacccttcttccccacccacttcaattaccttgctcctcataactgtcaaaaactgccaatttgttccttatccttacagcattctgtctctactgccaaacacagtggtgataagaacaagttgattcagtctctttgtaaacagggcaaccttaaacaagcccttcaactccttcctcacgagccaaacccaacccaactcacctacgagctcttaatcttctcctgcatacgccgtaattctctctctgatgggctcgtcgtttatcgccacctcctcgatgatgggtcggaccaagatcctttccttgccaccaaacttatcaatatgtactcggaattggactccatagatactgcgcgccaggtgtttgataatactaagaagagaactatctatgtatggaatgcaattttcagagctctgactttggcaggttatgggatagaagttttcgacttgtaccgtcagatgaattggtctggcactcgctctgataggtttacttatacgtatatattgaaagcttgtgttgcttcagagtgttcggtttctctgcttcagagaggtaaggagattcatggtcatattcttcgtcatgggtttgagtcttatgttcatattatgactactttagtggacgtgtatgctagatttgggtgtgtttcatatgcaagttacgtgtttggtgaaatgtcaactagaaatgttgtgacttggagtgctatgattgcttgttatgtgaaaaatgaaagaccttttgaagctttggagctttttagagaaatgatagccgagactggtgattcatttcccaattcagtcacaatggttagcattctgcaagcttgtggtgcgcttgctgctcttgagcaagggaagttgatccatggatacatacttagaaggggacttgattctatcatgccagttatgagcacccttctttctatgtatgcaagatgtggtaagcttgaacttgggcaacatgttttcaatcaaatggataagcgggatattgtttcctggaattcgttgatctcaagttatgggatccatggacatgggcaaaaggcaattcaagttttcaaggatatgatctcccatggagtatcaccaaatcatatatcatttattagtgttttgggggcttgtagtcatgctggtcttgttatggagggcaagaaactatttgactccatggttagagaacacgggatgtatcctagtatggagcactatgcttgtttggttgatcttcttggccgagccaatctactagatgaagcagccaaagttatagaggatatgcgaatagagccggggccaaaagtttggggtgctcttcttggctcttgcaagattcattgtaatgttgaacttgcagagagagcatgtaaaaggctatttgagttggagcctagaaatgctgggaattatgtgcttctagctgatatatatgctgaagcaggtatgtgggatgaagtaaaagagtaaagcggctttcagaagttagaaagctacaaaggtcccaggttgttgttgggtggagttaaaaaaaaagtctactcattcatgtctgttgatgagtttaacccgcagagcgaactggttcatgctttgttggtgaatttgtcatcagaggtgaaggagatgggatatgtgcctcaaactcaaatcgtgctgtatgatcttgaggaggaagagaaagagcgtattctattaggccatagtgaaaaattagctgttgcatttggactaatcaatactaacagtaacagagaaactattagaatctccaagaacttgaggctatgtgaagactgtcattcttttacaaagatcatttccaagtttgcagaccgagagattgttgtccgagacgtgaatcgtttccaccattttcgagatggggcttgttcatgtggggactactggtagttctatgtttagttgttgttcaaacttgtaattatgtccttgtttaaagaaaaaaaaaaatgaaacaagacag

SEQ ID NO: 188469 - DNA, 1457 bp, Cannabis indica
accaaacataaaatagtagggaaagagttttgcatagtcaaaacaaatcactactatgcacccttattataccccttttgcagtccattcaaatctctggtgaccaccccaatgggcgccgccattgtcaaagctatgctggtaattgcctccaccatcattcctagccccccaactgctcctttcatactctctttccttcattctcactgctcctccagatgggacgcacacctcttcaaaggcctcaaactcggcctttttcatggaattttccctatcaaacatggcagcattcgaaaaatgagaggagttattgtaagaatgagtatcgaattccttagacattcgtttcccaaatccagcaccaaccgagccatgatggactctgccagtttggtggctgtgccatccatcatgacgcttggcaccatagcctcctccctctaccctgacttggtttttatgtaactgaggctgtgaatcgatgaagcaggcttctggtggcatgtgaccactccccaaaacatggccctgatattcgctgttcgagttccaacctagctgctgctgctgctgcgtgcatagcgtaggagctctggtgctgagactcctgctgcatggcataggagttttggtgatgttgatatccataaccaccacgtttcaacatgttatgttactttagttttttcttacttagatgtctaagaaaacttggcttatgttatgtctctctgttctttcccaaggttccattttataaggcctttgatagcatctagataagaatgcatcttagaaaaatgcatgaaattttagccatttgtaacgctaactttattccctgctttgaagattgatagtgtgccataccaccaaaatctaaatataaatgccattttgctaagataattactttgattagacacacaaaaatgtattatgtggttcattttagaccgaggtttttatttattcatttttttctggtgtaaaacgaatcataagttacaattaatatcattaaattattataaataatcaataaaggtccctcaatattaaaataaggaatgctgcttcagtttatgcccatttcatcattaacaacagaaacgatataactaatttaacaggagataagagaaatcagaaggaacctttctctgaatttgttgtccaaaggcatcgaattctcaaccaccacacaactagtcttttgcattataatatagttttcttcacgttgttacacatggctatccccacccaaattcattatttattccaactatttagagcttatactatacatataaatatatatattttatttccctattggtgaggagggaggtgctgtggtccaattactttcttattcttatatcttacaataacatggagaagagattacctttattttctctcattgagagagaaagagagagaga

SEQ ID NO: 188470 - DNA, 1748 bp, Cannabis indica
cgattttagtaaagtataaataaattcaatagggtaaaattaagatatactcttagctatcctcttaattgcatgatttgcttaagattcatttcattttgatgtatttagaattttaataattaattattaaatccaactaataatttaaaggagcaaaatttaaaccaataattatgtttattactttaaaacattaatttttgtcttaatcgccgtttttatagtagtttttatcaatataattcttctaacaattttaaataattccattcatctcatgataaataaatgataaacaatttaaaattaaatataaaaaaaaaaaaatcaaatttacattccttatcaatattattatatacatttaagaacaaatcttaaatattcttaacactaaaatataatttaacccaaaataaaaaaaaaaaaaagtacaaaataataaattaataaaaaaaataaattctaaaatattattaaaaatttctatttgctctttacttttcaccttattctaaattttatttttagctaacaatcactataaacagatgaatctaattgagaagaacaaatttgtttcataataatagaattaataacttcacgatcattattactattaccacgttgcaacaaagagaccgagttatgaccgagttgagcgagtgaactcatctcaggtaccgagtcaaccgatttaatcaacttcacattcacattattaagtaaaaactcgttcccaacgagttggttaagaatcgccgactcagtgagtgaactcttcttcttcttgtgttcttgactcgtcgtcaccgccctaacgatctccgtcaacattgcattcgataaccgccgaattccccttgctccgccgaccaagacggcggagttaacggaatttttgttcttgttgtgtttggaaaaatccgatttcgagaacagaaatactgactcggggctccggttcttaaccaggccgagtgtatctccgaacaagatcaaaatattctcatccactaacattatgtgcttgaaatggcgacgaactcgtcccaataacatcggataacatgcccatcttctcatatttatcggaacgtggtctaagaaaccggcgagcgagttttccgggtcgagttcagaagcttcgaaacccagcaccgatccgtaactcaactgagtcgactcgttcgagttactgttgttaatgttacggtttttcttaccccaaaaagtctccgcagtttctttctttccgggtttgaactgagtcaagtcgaaactcgaactgagtcggcgactcgttttgttcaagtgtttgtggttttgaacgagttttaaaaacgagtcgttttcttcttgaatcactgagtcgaacttagacgagttggattcgaataacaaaacgacgtcgcttcgtgctgtgagtcctgacctgtgaagagttctgagaaataagcgaagctcgctcagttttaaatcgtcggagatatggccgacggtgagatctgccattgctctggttcctcttcgataaagagttcctaatccttgaagagctgacgggaatcgatgattcttcgagctcaatttgggtttctgcttccacattttgcccaaccatggagacgatgagaagagaaaatcgcggtcgccgccgccgccgccaccgacatttctgggtttattgtgtttggggaaattttcagggttttgagaaaggaatcttcttggttgttgtt

SEQ ID NO: 188471 - DNA, 1404 bp, Cannabis indica
agatgggccatgtgcccaacctcaagctccagcatcacaaggtttctcggccctctctactcaacaacaacaatttattgattttcctaaggcgctcaaccatgttcttccaatcacgcttgattactccaactttcttttatggcatactcacatggagaatgttattcttgcaaatggcatagatgattttctcgatggcacaattattgctccggatcttactcgcctccggccttcatccgtgatccattcttccatggatcattagatgaaacagttaacactttgaaacccttatgaccgtctgaaacaatctccggaactactctcggtcattttaatgtagagattgtctcttataagtgatttttgatcaaaccaattacataacttcttttgttgtcatttggacctagattgtgacgtccatctcttcttatcatgagaatttccctttccaaatctaccacctcacatttagcattggttggaagtaatgaaatgaaatagaatgaaaaaaaaaccatttttattccactcatttgtttgtttcagactattaatttccctattctattcttattctcactcctattcttaggttttcatttcttccaaacgccacattaatccattcgccttgagatcaagctctttttttatatgtggcacctccgcacctgtaagttcttccaagataagtgcattcttaccatgcttcatagcgtctcacaattgatcaaagtcatggattgaggaagataatttatgggagggtcccaccccaagtgccttaggcaagtcatcatctacatctctacaccctccacaaattcattcatctagtcaaactttgtcaacctcaaatcttgcagaccaagattttgcaagaaccaccttcaacctttttgttttgttcatcattttatttacgaccttgaacctactctgatatcaatgtgttgggtccctttcctgtagaaaatcatgcggtgtcgagccaagattgtaatctatcaagggtatattcaattcaaacactgcactgaattaaaccagccaattctggatgagttggaagaaattattcccaactatattgtttgatttcatgtcctaataatcaatccatttataatttttcttgcaggagatcacgtaatctcatggattgatccatccagtgtgcattgaatagaaattatataaataatattcgatggacattggttgcttccttgagcaagaatagactgtgaatggggtaccatcttaaaattaattggcaatgggatgagtagcccattcatcttatatatcacaatttatttctacacattagcaatgtgggactaactcttaatacaatgagttaaactttttttcaaaatagagaagaga

SEQ ID NO: 188472 - DNA, 1151 bp, Cannabis indica
ttttatttttttttattttctactgcaatgattttttgttctttctagcatttaattaaatctccccagtttgaaggtgtagcctaaaataaatatctttctacttcttcctcccaaactcctagtcactctctaccatgaaaagtgaagcttggtttcttccaaattgaaacgaaattcgcaatatatatcacagctctaaaccacgatcaaatcatatatcgcaatctcagcctctttttttctcttcctttgagtcattctctcttctctatgattgttcgagaccaccacgtgaagtttccattaattctcaaaatgaaatcgaagtcgcaactgatattgcaaccctaatcatcattaaaccatgtaataatctcaaccacacccaatcgcaatctaaatcacaagaccactacatgaagcttcaattgatttcctaaacaaaacaaaaatagtcgcaactgatattccaacacaaatcgcaactgctattgcaactcaaatcgcaaccctaaatctccattaaaccatattacaatcttagtcatgctcaatcataatcgatattgtaacccaaatcgcaaccctaaatcttcattaaaccatattgcaatctcagtcatgacgatattgtaacccaaatcaaaatcctaaattacctttaaatcatattgtaatctctgtcatgctcagtcgcaacgtaaattacaatcctaaatcaccattaaaccatattgtaatctctactcaattacaatccaaatcgcaaccctgaataaccattaaaccatattgcaatctcaactatgtcctattcgcaacctaaatcgtaactcttctttttcctcccagtaattctcctgagccaaaggtcaataactccgatcataattgtcaaaaatttgttagagtcaaaagagatgattccataggtgaagtttcataacacttttttttttttgttggaatcataacatttggatatgatgtgtaatatgaaaaaaaaaaattactatatttgtacaaaaaagtttagttgtagtagcataaattaaaaaacttcaaaatattgtaattgtttaacactcttataacatgaagtattataattaatttgcaattttctattatttttattaaattaaaat

SEQ ID NO: 188473 - DNA, 1928 bp, Cannabis indica
aagactaactttctctagattaattgtgatgtatgaaagtggggagtgggttgatgtgttccgtagcgttggctcgagactatgcgggaactgtgttgtggattgcttccgagtcttttccctactctgatcccttcattgggggaaacagaggcttgtgtcctagcgctttagatagtaactgcgtggagggagatttttgttatcattgagagcgattcagaaattattatcaaagctttaattggggattgatcaaactggcgcattgataattttgttcttatttgtaatagactatcgcataattttttgggttgtaattttatttttatctcgagattatgtaattttgttgctcacaatgttgctaggtgggttttttctaagaatcttacaggcatggttgatgtgtcaactatttttgaaaatattatatgtaataactacgagatctaatttctttgtttaatgaatatccttctttaaaaaaaatgagaaaatctaccacaaatgtattctgaatattttgaataacttttctatctataggaacattttggctccaaagaacatcatttctaccaattcatataatatatacaacaacattaagtaagtatggaaatatagacttgcttttctaaattttgaagccttacaattcttgcatgatccaattctctttttaattttgtattcggtgaagccaatgatgccattagtccaagtaaccataaaatatcaaacatagtctatttagagtcaaactactattacatatacgcagggttatcaacactacataaaattttactttttatcacaataaaatttgtaattaaaagtaaaaaaaattataactaagtataaattattattcttatattgtgactaaaaggtccgtgacttaaggtattagtcacaacaatgtatttttagtcataatacttattttgattaaaactaaattagtgataaattgtaacgaaatactacatatgttttagtcaaagtactattttgttgtgattaaaagtttagctacaaaaaaattatggtgtgactaaaaaattgtaattaaaagttacagttttttgtagtgcaagaccgtcccttaactctcacaaacaacacatttgttatattattattttttaatttcataaataatcgtaattctatggatgttaatactatgaatttaaatttgtggtttctattttagtcacttgattctttattattagttatgataagattaattttatgaacaatatttatcttccgaatttttttctttatgtttatatataatatttgtgtgcaccatagtgtttaattatagcaatgctctttacacactacaaaaaactgctacttttagtgaaaactttttagtcacgatataattttttatgactaaatgtgaattttagtcacaataaaatgtcacgtacttgtgactaaaatatagtgtttagttacaagttgtcactaatttagttttagtcactaaaaatagatttagtcacaacaaattgtaatttttgtaactaatacctttagccataaattttttagccacagaatgataatttataattagttacaatttttttttagtcacaagttttgttgtaactaaaataaatttttttttgtagtgacaatatcatattctaattacctttcctacatgcatattcaatatgttctacaaacacttggatcgtaaagtactagtcaagagcagcaaatcacggttttacaaataatattaggtctaatccatatacaaaagacatttatgtaagaataaaaataaaataaaataataatcgaaaccaaaatactaataacaatgcaaagacttaatatacattaggtacactcttttctggaaatttaatgggattttttctata

SEQ ID NO: 188474 - DNA, 3207 bp, Cannabis indica
tcgtgttcatgtcatattttaatccattttcaactcatgtacccataaaaaatcttgtttcgtaatgacccactttaacccgtttctttattacttaagttgagttattgagaaaatagtaaatttaacttctataagaaaattcatatacatttatatataaataaataatttttatatgtataatatataattaaaaaatttaaaaatattttacataatcatattattaataattttttattttattttaattaaaaaaactgtatcaaacgtgtcaaattcgtattaagtcagttgtgttgtgtttgatctgtttttattttgtgtcaaccatttttcaacctacgtctaatttttcaaatcctaacccataaattatgtatcatgttcgaattattatttgagaatgtaactgaaatttcttttgtatatcctcaagcaaataagaaatgcttacactttagtcatgtagattggagttaagttaatctccttagtcttacagtaaaaattacatatttaaagaaaagaggaaaataattaattatattttaactgcgcattgaaatgacattttcatttgttatgggactggaataaccattcctcccaaaacggtcaaaatcttattccaatactttaaatttagatacaaacacagaaaatgatggatcacagattcattttcgattccaactccttttcgccaaacaacccgatacctaaattagttttcttctgggtttaggagaaacgccattaggttgccgaaggatcgtttatcacacccaaaaagtcgtcctttatggtaccaatgcaaaactgtgatagaacaaaagaatatgagatctcagaataccaacacgataatactctaaatagtacagacaattttcaaagcaatcgtttttgaaagagtttttaggaactccaattccctaattttaagaatctaattagaaaaattcattcactttttaactaaaagaagtgatctcatgatatctaagttttgagaggaaaaagatacggttattaactgatatggtaagtgtaaagagtcttatttattttctaagaaaaagggttgaaaagcatacaatttctgtagcatcaactcttgttccaattatctttaatctcacttcactatctttctgaatcttaacctgcaagatccaagacacagagtttattaaatccacaagatcaattaatccgaaaatataagttttaataacaaatctatataggttttttatcagaaatacgtacggatccatctgaagtagtgtaattgggcatatctcctgactggaattccatatcatctggtatcaactacaatccacccatgacaacaagatacacttacacttagatatataacacttttaatatcgatagataattagatatattattcagcaaaaacttagatatagacttacatggtttgaaacaaaaatttgaacaggtccagcttctgcgaaaaatcccatctgtaatttccagatgttattgtacactctcactttgattacaaacacaaatttataatatttaatgggcacgtcagaaagaaataataaccgtaccttatttaccatactaacaacagcttcaagtatctctcctttaaatggtctgaaaaccacacattgatactttaccggaaatgtaacaaatcctgtaccatcacggataaggccttttccgatttcctcaattcctgttattgccacaacaaaaccatgtcgtccactgtacagtaatagaaagtaaaatatagttagttcactattaaattagactgaagaagtaacaaaagagtgaagacatactactatcctaggatctcaaaataagatttcagatccaacaatagttacatttcaaggaccaacatctatgggactattacttgaaacttgaacagagaaggaaaaattgggatatcctatgatgtcaaaagactacatcttttccagataaataaaattgtagctttaaggtttttggtttacagacttaagagtactaattttgttgtcctagggaaacaaacaaatcaaaagaacgaaagaaaaagatgttttctttttccacctgcaagttccctcgacgtctttcatcagcttggagacgatgttatctcgcagactacgaccaaagtgtcgtggatgaagctgtatattcctctctaatacaatgtggaagaacattctttttgttttattttttttttcctttatattattaactgcaaaagaatatggggaacagcagaaatttaatttaagaggaaaagaaaaactaagaaaaggaatctcaatgaaataaataataaaaattttgataacaaacttcaccatatcacatgaatgacaatgaacacaaacaaaacaagttcaaaataagcaaaccataaaactaaaaattatacacaaaataagtggtatattataaaggctcagagatattccaaaagttggaagacgcagacaatcaacatgacatcagttcagaccgcccgtctgcttattctcatcattgagaatcaaaaaccaaaccaaatttcaaaacaacaatgaaagagaacagagaatgtaaaaacgacatcaaagtttaaagtactaaaaagccaattaagataaatggtatctacagttatttcggtgcgtagtatatgagtgattctacttttttttaatcactgcctcttataatccaataataaaaaatattaaagtacaaaaaatgatacacacacacaatgaccaatttgttaaagatcatcaattgccattattaagatgcaaagcaattcagacatgataaaatcaataacataaccattaaaattacatatatctttataaatttagaaatagaactaacaccttctcttttcatttgacctatcaattgttggtggaaaaaaattgttttctaaattagattgcaagaacaaaaattatacactcaaaatcattcaaactaccaatcaagtcatacgaataatcattcaaatttaagaaagctgtacctaaacaaaccaatcaaatcttttcattttattttactttaaaaacaacttgcaatagaaccccatcttacctaataaagtccaaaaatattaaaactacacatacatacacaacagtttcctttatcctttttgtagatatatatatatatata

SEQ ID NO: 188475 - DNA, 2081 bp, Cannabis indica
aaaaaaaaaaaaaaaccaaaggatacaatgaaatttaggaaagtttgcacttaaaataattatgatcacaccgtttggatatgcgccttgatcgtttgtccttccgacctctcttcctctccttttctcttactttccttttcctcccctgctggaatttatcttttctggcagatttcttcttcctatgctttccatcactagagcttgagtcagataatgatgaatctgaatctgaatctgaatccgattcagaatcagaataagaagactcagattcagaatcagagctgtatgaatctgatgatgagtatctttttcttcttcttttctttcgtttgtccttcaatgacttcttttgtcttcctccacccttatcagcactatcatcagaggttggtacttttcctgattttttcttctctggggaaaaataaaacaatatcatcaaatagactgacaaaacaatcaatactattgcatcacagtatgtatgaaccaagcaacaatatccaacagcaccaacatttacttttattacctttctctttctcaactacatcagtaattttacttgcagaagtttcgccacaatctgcaatctttacaggtccggaaggtttaccatcagcggatcccaactgctcaattctctcaagtacatccattcccttcacaacttttccaaagacaacgtgtttcctgcaaaattagattgagatcacacaattattagtaaattcagactaatataaggagaacaagaatccatgaacttgaacatgaaattttagcaacgagcattttaaaaatacccatcaagatgaggctgccgcctgaagagtatgaagaactgtgacccgtttgtgtttggaccgctatttgccatagagagaaaaccaggtccatcatgtgtaagcttaaaattctcatctgcaaagcaaatgaaataacgcatcaccaatgaagaatatttaataagcatgccattaagtgcccacacaaataatcacctgcaaactttcctccataaatactttctccaccagtacctacaaaccaaccaagtgttgttaaatataagggcacgaatgtaggagtcaatagaaaaattgcattggtaggaagggattgcagagaaagatgtcataccatttcccttggaaaaatccccaccctgtaggaccaaagataaacaaaatgcaaatgttaattataattaaaacttattgaatagatagctaaaatcacacttgtacagaagcaatttgaatgatgcaaatgttcaaaagagatttaaacaacatacttgggccatgaatcctttgattattcgatgaaaatgtgaacccttgtaatgaaggggtttgtcagtagacttcccgatgcccttctcacctacagccataagcaaagcaattttgatagtgttggcaactgcttttacacccaaaaagaataaaaatgcagatcacacaaataagacaagtttgagcattatttagttttttgctttctttttcaagcttgaactagttaaagcatgcacaaatacttccagaatctaggattcaagataacataatagaatataagaaaaagccaattaggatttatttatttattgatttagtctacttttgttaacaaatcataaataacaagacatgaagatttttgttcctgcaaccactcttaacggaaactaaataatacataatagcaagaaaatcaaatcatcagcagaatacataaaaaaaaataataataaaagagaatggctaaattaccagtgcagagtgctcggaaattttctgctgtcttggggaccacattagcaaaaagctgcacatttcaaaagaacaaatttatatgcaccctaaagataaactgcttggcttaaagtttcttccataaattgaaggaaagccagaagctcaaataaatgaaacaagctgctagtttggtgtttcacctcaataacaattctttccacagaatctccatcaattgaaacatcaagaaaaacatgagggtttttcttcttgctcatagctccttcattaaaaaaaaaaaaaaca

SEQ ID NO: 188476 - DNA, 5027 bp, Cannabis indica
taaatttaattgcactaaatataatatattttttttaaaaaaaataaatataagataaatcatcatagataaaaaggaatacaaaaaaaaaacttaaaaacttatataaattttacttctatataattaacatcagtttcctatttcttgatgaagaaaagaagctaagttaaaaataatttttttaagataatgaattaagaaatcaattacttttatgtagtcaaatctaattttttaatgaagaaaccagttacgaataacaaaactcatataagatttgtttattgagaaattagtttctagatctctaattgcggcagaatccattcgattctttgaagttttggtggtggagatctcatatctaaggtccgtttgagccgttggtcgctggtgaacaaaagtcagcaggtagattgttgagggggtgagacatgtaggatacttaaatgggaggagaagaaataactttgatttttttttttttgaaataatttatcttaaatcaaatatgtactttaaaaattaaatttacacatatatgtacagaaaatatcataaaataatttaaacgctaaaatatgtcataaaaagtggccaaacctaaaagtggcatatttttataaaaaagttttaaaagtaatttcctaatagagatgctatataagagtttgatggataaagtgtaaggcatcaaactttgaatacaaatatttcctaaattcttaggcctaaattgatcatggagataatgaacttcttttcttactccaactctcagcaagcaaatctttttcaaagaatctgatgagtgataaagaattattctattgttgttgcataattaccactcatatttactatcagttgcaaaatggaatcaatggagttactccataatccaccacaaggacaagaagttctttttgttgtacaaattaatatctaaagaaataataatagaatggttggcaagtttcaaatcaactttgaagcaagccaagtaaaagtaatagtttagttctctcattccaaaactcaatgtctctagaagcttaggatacttgtaagagagaccaaatttatacatgtattcatcatattacactcactcaactaacagcattacactactcatcttttacagctatgctatagtagtacaactaggtcaaaaacaaagatagggaaggtgaatacaaacacaacaaataggatacaactcatctgtctatctatctagattgattcaaattgttctctctcttgttgtataaatcggaatatccgagcagctgattcagttgccgtccgagcgttgtgtggcacgactttgatcactcggattggctggttggtatcatggtgatggtgatgatgaagacgaggctgaaaagaagcaacctctggaacgacgggagctataggaggaggcggacgaggagcattgtgactcgacccgttttcttgtgttctcccacctcttcctcctctaggactactagctgtacttccttgaaaatcattactgtttctgggtttgggaatggatacatttttcttggttggcagattacaggacccctgttgttcggtgtttgaatggacttccgctctaggtacctgaccagtttcaccgttcgaaccaggttcggataactggctcccttcttcaactgccgaacctgacttccctgaattagagattggcatgccatatgggggatagtacggatgaccaactggatagttaccggggaaaaccccgactccttgatgatgttgaattccgtaggctgagtttgcgaaattggttggaacaggacatgggccaaaaggaggtccgtgccctccaaaacctgctcccatcattccaggtccagtatatggcttgtatacaaggccttcggaaggagacattacgggaaccaaccactgagggcctgctgattgatggaaaccccaaggacccattccattatcagtcatgttcgccactggctgcggatatcctaagtagggtccgtagttcataaaatgactagttgtttcgacagagaaaaatgattctttcccaactgcattttctgcggagaactccctttttcggtttggcttgtctgaatcatctttggaacaagcaataacaggtagcggctttacaacaacgtactcttgttgaagtttcttcgctggataacagccctttaaaggcgatttctctaagatgtctccattttcaaccatgagatttggtgatccagcgatcaaccgttggacctattaattggaaaataaaaagacaagttatttctaagcaatataaaagactttgtgcagcaactgcaattgcaataatactacctttcgatagaagaattatatagagaggcatacctttatcaatctatgcaactcaaatacttgaactgcaaatactctttgctgactgtagagagtaacatgagtttgaatcaagaacatatttccatagtgttgttaccacaaatgaacattggcaaagattaaaaccaacacaaggtaacacaagtatagactactgcattttcgatatctatcttatgccaaacccacctagcctaggtactcactagtaactgatttcttaatttgctcacttatttgaccaaaatacatatggaacaattcaaagcaacacataaaatggaaatcttgatgcaaataaaagcaattacatgtgccttttcattattaactaaataaaattaaacccaagtcagaagagaaatgcaaggcagatcttgttatttgaattctgcatatacattatagcaacaaacacagatgaactcaatcataacaagcaaccccaaaaagaatacgtttcttataatagttaaaaaacgaaaatacatcacaaagttaagaatgtcaaatgagcagagtcagatatttatacgagagactatcttcctccaaacaaagccaccactaattaacaaaactggtagtttcagatatccaccccgccaaaattacattcctccagttgttttcctcacggctccaggcccttgagttccatgaaaaaaaaaagaaacctccagtagtcaaagggaaaaaccaagcactaccaaaccgagacaggattacacccaaaaccagatgccattgggcaaaataatgagatgataaactgtctcggggtcgccttgacgtctccctgttgtaagatgattcagtatccacagttaaaatgttatcgagggcctttcagcacaaaaaacttcaactttaaaacggatctcagaattcccaaggtaaatgtttcaccatcctccaagccatcttgatattagcagttaatttgtactccttaatagttataattccatagaaaatacaacaatctaaaatataacttgacataatagaaaaagctaaagctagtcacaagacgtttgatactttcctaggtattgattactctccttgaagaggaaaaagtcgatctcaagagccaataataaaggcatatgcaaagtacattcatatttccaacgtgtaacgcataattcctccaaatatttttaccacaaagagcaaaaatatcttattaaaaagtaaagagcgaaagtacgtacttggcaattgctcttctcgctttccagaaatgtttttgacctattatgccaacaacatcatccggagaaatatctgtgattgatattgaatccaccattgatgtctcagagccatcatcgaatttatctacagtttcaatttcacaatgtgaagttctgttactattgctgttgtggtcactatcattctcaggttcattggacctgctacgttccacccaacaatggggctcgcttcttggctggaactcattccctccctccgcatcccttgctgatttgctgagatgatcatgctgtccaccgctctccagttgtggcccccctactctagactcttgatgtaagccagcctcactgccacatgacctgctaaaattagacaaagcatgctcgatgctttccatatttgaagattctttgattttctttagaggcccttcactcttctctctatttgatgttacaatatgattcccactttggaaatttgctctcacattctctcttctctcactttctgcatcttgtataaaagtggcagccatcaaattatgttgctttggattcttttcatagacattttgtctttccacaggctgtctagtacgagtagagcttacagaagaaaatgcttctccgccctggcaccgaccattcgttgcttgaacaaacacaggaaccataaaatcatcattgtcatctccgaccttctttctctgctcaagttgtgtcgtggccgcaggagcattcctgatttttacttccccacgaggctggagattttcagaccaatgagtaggagttgaaggagctccgttacgagtaaacactttatttctttcaacaccacttccctaaaccaaagaataaatagaaaaaataaagcaacaataaaaaccatccaataaggaatggcataataatctcttgcccacaaacactactattttgatcaactttacaatctagtgctaaaacaaaattgtcaaggaaagagtgagttgcttacaaagcataaagctcatttgaacccttaaccagaatgagaatttaaaaagttcctaacaattggaaactcaatcataatatactaaatctattgaaaaccgtataattagagctcaaaacaagtaaggagcttctaacaacattcattgtaccattcattcatttacacaactttccagttgagtagtttttgtctgaccaaaatagtacccaatcaatctcaaaagttgcatttcttttcttcactagctaatttcaacaaaaccatataaatcatacatcttaataaaaatatgaattcacataagagaaataaccattttttccatcactaatttgaaagccatgggaatcccatctcatgaataccaaaaagaaaagaaaaag

SEQ ID NO: 188477 - DNA, 1020 bp, Cannabis indica
tatatatggatgatataatttcttgatgatgaggtaattaataatattagacttgacaaaagcaaagtcaactttgaaccagtcatggtcgtcgcttttcaactatatatctaggaagttttttattggatcatatatttatatgtttttaatatcacggtataacaagatatgttactataaattttgagaaattataaatgattattgttattaaacattaatattaatggtagttattattatcttactagcgacactttataaatatttaatgatattatttaatagttattaaattaaattgtatgagatctgatatttaattgtactaaaataataattaatattatttagtagtagacatcactgataagtatcttttaatatttctcattgtaaataattgaaaatgttaaaaatagagttaaaataattaattacatatgtgtataaaaacaataggtatgtgtgcaattaattttttgaactttattattcatcaatatcgtaaattactcaaaaatatttgaaaattactgggatacatatatttattttaattacaatatacacgattatataaaaaaaaaattggattataatttagggtccacctagctcagagcttaacttttttaaaaaaaaagaatacaaatattttattgattttaaaaattcccacttttttttcaaaataaacatcacaacatgacacttcctacgttgtctagttatataaataataggggagtggttcaacttaaacatatatggactcacttgtcatgttatatgctttttagaaaatatataatataaactttccatgtcttcacttaaattgtctttttctattttaacttggaatttttctttctttttttttttttttttttttttatttaagtcgtttaatatattacaacaatgttttacatgggactcgaacccaagacctccaacactcacgcacccatctatggccacttgagctaacctcaagtggttgacttggaa

SEQ ID NO: 188478 - DNA, 1685 bp, Cannabis indica
gttattattatattattattatataattctttttatttataaaaaaataaaaataattatataaaacactattttttgtaaaaaaaaaaaattacatttttacttttattttttttatatattcttacagtgtaataaaaataatacgaaaataataagaaaatacataaaaagtaaataagaaaataatatttaaataacatcaaaataataacaaaaaataacaacaaattaataagaatacaacataaaaatacattaaaaaaccgtattttctgtaaataaaattataaaaatattaaaatgttgtaaacgtatttttgtaatttttttattatttttatatatttgtaaaataatttaaaaaaaaaataattgtttacttagatttattaatttgtacaataattatttacgtattagatttggttttccactgtttggttataacatactatatttattaccatgcattttgtatgttttattatttaattgtaaaacactctttttattttgttcctgtcatgaaaaacaaaactaaaacagttatataataaaatagtaataaaataaatatctgtttttcttattttgctttggattttgtttttttattttttatttttgtgtaacatatttccttttttatgaaagggttttaaaagatgtaacacttctttgataaagtaaccacttaaaaataaatttgaatttttgtttcattttttttgggtcacttttgttggttttatttgattttcatccatatgagactcttttctctctttttattttattttgtattttccttcttgtttgaagtttaataaaataattggtgggtctgctggatcttacttgtggagccaaatgtagtccaaaataatggagataggtgtgatttttttatattaacaaaaaaaaatctttttggcttagtagtgatattttattgattttaatattttaaaatgtagaatatttgaataataatgatgtacaaatatttatataaaagatgaaaagaaaagtgtagaagatgatttgtttagctcaattctcttagtataaaagctataaattatatccacaatctttgaaccatattctataatttatgcattgactgtggatagctaagtagataaaacatatttagttagatgattaaagaatatttaaaaaaaaaaaaaagaatattaaatatgaaataaccataataacaataatagtgaagtaacacaaggaggaataatccattcaatattatgattaaactttaaaatggtattagggtttatggattttaaaatccatgaaaatgaatcatatttgagaacataccaccactcaaattaagttagaaaaacaaaaaaaagccctctaaatctctaaattgaatactatgtataactttaagttttttgttatttcataaataaatatagtgttggaccacaattaattgatacaattgaattgacatgaaaaaaaaaacctgagttatgtttttttttaataactcaattgggttatgttatttatagtatattgtagaattttatttttttaaaattatatatatgggtgcactcttaatgggtaaaattaaaaaattttgagtttttatgcttaattattctatctaattaaaaaaatactctacatttttatattcatat

SEQ ID NO: 188479 - DNA, 7657 bp, Cannabis indica
ttttgtggtgacttatttattattaaaaaaaaaggagctttctactattttggcctataattattaaattaaaaatttacatttaattttttaaaaggcaatattttgttcgtcagggctatagccccccacatcaatgttaatggtttctacgggaatttttaattttatgatttttaaagtataaattttatgatttttaaactttaaaatataagtttgcaaaaatagaattttatctcaaaaaagttattttatgggaaaattttaaaaataaagtagaaaaagagatgaagaaaaaaaaaaaacaatataagtacttggttatcctttattcttacctcattttctcatatttttcaatttttttattcaattttcccatttcctcataaaattaagttcctctaaaatgtcttgggtcgaagcccattacatagcccaaacaatgatatttaggcccacataggcccaaatataggggaccggcccaagacattgacgcgacgagaaccaaagttcggaagagaagaaccagaaactcaggtctcctctctctctctccaaattcagtattttgatttcgacacaaaaatcatcaaatccctaatcgtgaatccagagagaaagagagagaaaaaccagtaccaaatctcactcaatcacaaccggactgagtccctatggaaaccggagcggcggccgtgggtctcgccgcggatgatcaatcatcgtcatcgtcttcttcatctccggcggaggcgttttcgcggtggacctcatcaatttcaaggcggtaccagcactttcttgacaagtcaacgccgcacgtgcttcacaggtggctggggtgcttgggtgtggcgttgatctacgctcttcgcgtttatctggtcgaaggtttctacatcgtatcgtacggactagggatctacattctcaaccttctcatcggatttctctctcctcaggttgatcctgagatgcacgactccaccgatggtccttcactccctaccaggggatctgatgagtttcgccccttcgtccgtcgactcccggagttcaagttctggtaattgaaaatctttgattttgtttgttctaaatttttcatctttgtctgaaattttgatactgttgtgttatattttgcgttatgaaatcagattagagaaacaccaacagaaaatagactaataagatgaatttaaacaaacactatgagaacaccagatttacctggttagctcagtttcactaggcaatccattatagagtcagatgagaatgtaacactccttttcaagcttcaaacttgagaaatgggtctgaaaagagagttagttatagtaacccaactaacattcttgatttttcaagttatcaaagtgacgtggcaattaaagtcatataaatatttcacaattctccaccttgactttagattgatataaatatttttgtggaacttgtttagtggcatcactttagttagttaacatgtatattgggttaatttcagtatataatattactatgtttatcaacccttttgaaacaatatttggagaaagatgaaatcttaatatctctgagaaatggattgcactttgagaattgcagtgcaccatttcgttttcttgtgagaacccaagctccgacatgattctcttcaacctcagatctgtatactctacttctgttgtagatgacacaactacatgttataaatttgacttcctgctcactgtatattcaccaactgtaaagatttaaccagaaagggatatccttttatattgatcttcaccaacggcccattttagcatccttaagccagagatatccacaatattcttcatttaaccattttgagaaagaactaaatcgcatgccctaaatgtttcattttgaactccatacttactattcatttatccgaaataaccactgtcttggagattgttttaaaccatagaaatgtgtttgttaaaagtaacattgtgttcagcttgtttagggctaattgcttgctagttgtgtgaaaaatcttgttcattaaaagttacattacggctaacaacacattttttatcatcaactaaccagactagaccagtctgttatcttagcacgttcatactcatatactcatatttgtttttcattttgtaatttgaaacttctgaggcatttttgatttcactttcaaacctttggatgataacaatagctgaagttttacttttgtttaggtactctattacaaaggcattttgcattgcttttgtgatgacattcttcagtgcctttgatgtacctgtattctggccaatacttcttttctactggatggtattatttgttatgactatgaggagacagatttcccacatgatcaaatacaaatacgtcccattctctttcggaaaacaggtatagagtgttttcaacctttttgctcattaattggtgtcattaccatgaaagtctgatttttatttccttttaatttcaatagcgatatgatggaagaagatcatcttcaactgaaggcgcaacagactgaacattttcaggtagattgcatcagtctttttcttttcgtttctttgttaagtcacaaatccaggtgacaaatagttttgccgtttcgatgtttagtgcttcattaagcacaatggttgtttatttaccctggaaatatagctttggcaggatgatgaagtggttgggctcaagtccttttcttcttttacttctggtattatgggaagtccatttgtataggagagaagaaaaaaaaatgcccactgattttgcttaataataacaataattaaatccagtagtgacattacatatctacttcttcttttttcagtcttttttacagtttgaaatgccagtcatagctgtgcattttaaaaccaccttatagtagctttattgtactattgattccttttcaaactgaatctgggcttaatgtaacctttctttttggatacttttgcttaaactcattttcttttgatgatcactgcttttctagtcatgaaatctccactttctccaaaattgacatcttttagattataaaacaagtgttgttttaatcatttttcatgcaagtaatatgataataaaaacatttaaaaaaactgaatgagctagtttaaactaattattatattgattatgtattttatgatatgtaagattatattggttatgactttcatgatatatatactcataaaaaatggtaatatggctataaattgggcaaagaaagtctaatacagttggttctttcatcacaatcgattttattttttatttttttggaaagatttgaagtttgatttagtttaatgtgcaggccaggcattgtattcaagttgtttagatttatgacacaaaaaagggtatttataaatacaacagtaaaaattaaaacgacattaatttaataattattgacaattaggtgaaaatagacaaatataataataagttgaataacgacaacaaccggcatgaaccaaaataaaaatctataatgcaaagcaaaaggcatcttcttctattggttcaatttttggcaaaaagttcagcatcggacggtttagtcgggttttgagtgaaaaagaaaagtaaacttacatccacccattcacgtgttgtgggttcgggttcgggttagacaggttgacccaatcaattttttttttctacttaattatatataaatatataattaaattattaaattcaataaaatgtatatacattaaaatatataatcatttaatatatattgtattaagtaactttttcttttacgaataattaaattaatattattatatttgaagtttaatgtatgtaaagtgtaaatttgtatacaatttaggtgaaaaatgggtctgatctgaaatccggtcattaacaaatcaaactttaaacttgttcgaaagatctaccaggttaaactcaacccgcctgcaatgagcagtttttttttttttttggttttttttgaattgttcgaatcgaattcagatcgaacataataaaaatgttcagtcctatttaatgacttattttcattatatcaattttttatttctttctcataagaatattataacgaataattcttgtgcttattccaaagcacaaagtggttatgaaataatgaagcatgttgagcatttggagtgatactattactagcttctcaattatgtatagaatttagatattctttaatgaattttcttcaatccaagtataattgtataaaataaactccaactttgtcaacaaaataaataaataatgttctcaaataaggcaaaatataaaattatattttgattttatacacttaagtcttttttttagtcaaaatccaaacatataaaacaaaaaccaaaggacccaattaaaaatatagatgaaaaaacaagtatatttgtagaaaaatataaattgcacaaatatcctaatgttcacaaagtaaggcttttgaagaacattttcaaaccccatttaagaaagtcaaaaaattaacaaacaagacactgaaaaacatgaaacacaaatcctgaattttagtaccaaatgttcacacattataagtagtttcaattgtttttccttaaatgagaatgaactaaaaacaagtaaagaaaaaaacatctttagttaatttggtgggttataaaagctataaacaccataaaatgtttgagcaaaagtaagtaacaacaacacaacagctgcaacaaatgaaattatagcccaaggattactaaaatagttatgtctcaagctagctctccaagcattccatctatgattatagtacttatttacatcagcagacaacctcgaaagataactgtcatttatgtcaaaaaccacttcttgacaaagcctattgaacaaatcagaaacctcagaatcactccccaaccaatgttctatgatcccacaataatgtaagtaaccaacatcttcaggtgagttgatcaagttgtccatgaaaatcacataagaagtaatgtcattacctgaatccaaatgacattgttcataggcaatgaggtttaggaagagtgattttgttccatcatgtattagaagtctaggaatttcaagaatcccattcttgaatttgatgtcccaaaatcgatctgtttttcttttcttgaatttgacaccggcttctcttagttctgtcacacaatgtatcaattgttgtcttctcttgtctgcaactcggtgagcatgagaccagcgtttcatccaaactcgaggctcgggttgaggccctcttcgcaacagacttcttcgaaatacatcgagacaatgcagaccgccacctgtttaagaagaaatagaaaaaagttttaggagaattgtagtaaaatgtgtcgaatttcaaaggtttgtgttggtaaattgttagtatttttttgtatttttattgcctagcttagtataaatatgttatgtcattagactaatgagaattaggagtttttttaatagaaaattgatactgtctcgaagagtatagcgattattgtattactgaaagcatcagtaatacaataatcggtgtaatcagtaccaatttcttataagaaaactcttaattcttattcgacattacatatttatacttagttaggcagtgtaacaatttataatgatgatgagaagtatggggttccacctaatggatcaaatgtcgcggtattgttgttgttgttgttgttgttgttgttgttgctgttgttgttgttgttgttgttgttgctgttgctgttgttgttgttgtgtcccatagatgattcaagcttggttctatcactcttagacaatggctcatctgttggcattaaagggtcaaagaattgcaaagtcaatttcgaaattagtcctttatgatcaagacaatcatgaccaagttgaaggcccaacaatctttcaagtatgaaaagtggaagttgattctcaagcatgatcatatccctttgaatggaatgcattgagccacgcatagcaaagattggatcatttctaggataaccaagatgcttaaaaccaccagcagcaccccgaaaaagctcaagaacaaaacaaccatcaagtaccatcatctcaacaaactcattactactaagagtgattgtaccttcataacaagctctagtcttttcttcaacctctttgattgaatcaaggtacaattttatgtcttggtttgttctcttaaggcattggttaagcgatcgccacttgtggcgatccatttggcgaaggcgtctcttgccatgatggtaaggacccaatgacacaatttgtgggaaataagctttgtcatctccttctcttaagtagtgtggaactttgtaaatacatagttttgcccatgaaccaacaaagtcatcttgttgtgcttgttcaagcttttctatgattgaaatcacccattcagagtctggtgatttaagcccttcttcaatgttatgatcaacatcatcaccatcttcatttttcaacacaacttggagtgattcacttggcttttgttcctgtttttggactgaattttgatgagaaaataactcaatagcttttgatgagtttggtgttgttgctgttgttgatgttgtgacaccagattctacagtttctctaagtttgagagttattaagtaccaactcaatagctctttgttaaacactgcaaccatcttttagtgtctatagatttagatttaaatttagagaagaaaaaagaagaagaagaagaaaagtgttatgtgtttgtttatgactctaaattaaacaaaggttatatttatatatagatatttttatatatgaatttatgatctcaaatggatctatataaaagtcacattcaaaaaatggacccttttagccttttaggttgggaattaatttagctaaaccaaaactactttttaggtatatattgttctattctatacttaccttgatggtttattctcttatggacctttcttcttcttttatttttaatttatttataaaattaaaagttaaatatgtttttatatcttgtattttatagaagttactaattgattcttttgttttattaaatgaaaatttggagtttgtattttgcaaaaaccaacataatgataccctaaattcaattttggatcaaatttttttttgaattagaaatataatagacatttacctttagtgtactttaatctttataataagctttaatagattgtgacaaccaatgttaataatttcatggtaaaaaagactttaaacatgttctaagctcaactatggtactttgattataatataacattaacttatcatgagtagtagtagtagtagtagtagaaaacaacatactttgattagagcttcttctatattataaaactaatactaataaattgaattgttttaattattgtgtaggccatacactaaattattctatttctacagccatatccagcaacttctcgtccacccaaaaaaaactattacaaattaaaatacattattattgaataataataaaatttccacatggtattaaaaaatggat

SEQ ID NO: 188480 - DNA, 2491 bp, Cannabis indica
gtataattggtatgcaagcatttaaattcctccactcgaccaacagcgagccaatatcttggccatcttgaacttccttagctgtaatttggcacccaccacatttatcattgtaaaaaaacgtggcattaaaatcaccaaggataatccaaggcttattcaaatgtcctatacctgtaagtttaaaccacaactctttcctttctgttaaagcatattattaccataaaccacagtaagatagaattcttgatttttcctaattatcttaagctaacagtgaatgaattgagcatcttcttgtaacacctctactttcacaagaccagcatgccaaatcaaaataatacgataggaaataacaatcctaattcaggaagttattatgtatcaactcttttaccttatcatggttaattttggtctcaaataaagcaccaaaatcaaccttattctctttacacaccttcaaaagtgatagtttcttttctcttttattcaaacctttaacatttcaccccatcaagtttaaactctccatgatcagaatgaatggagttagtaactagatcctcatcatccctgtcttgcaacacttcataaccatttctgacttgagcctttggaccagaacttactgttgacttggacctttttcttctcatagtgatccattttttagcataatcacaacctgctttagtaatctccttggattgttcttccttcctatgtcctggtagaatcttcttatatttgcctatatttttctcaactttcaattgctgctcttcaacagcaatattgttaactactactacaacaccatcaactagggcaggagcaactatattaggaacaaatttcatttatgcaaccttccctctcctttcatcttcaaattttctcttccacactaccccttgtctttgttacaatttaccagtatatgtcccaacatagtacatgtcgcatattttgaaggtagccattcatattcaagtaattgttccactagttgtttcctgtagactatattttttggtgaattatccaagatctccatatccaccaaaactctagcatacttgaccattgtcctcccaagagtaaccttatctaccataattagttttctaatagtactcactaaagcactcaaactattcttcccccgatattggagtccatgttaagcctaatccaaactggtactgatttcaccatttgaattgaatccatgtcagtggaccaaggtcatagcaccacaagctttttatcgaaatgaatcacccctatttttaaaattaagtttctagttgcctcatctctgaaactcaccaacttgaatccataatgcatttgaacaatcctatccactcccaattatcccaaattcttttgacaaaccctttaaagaccctgaaaagtggattcacacccaaaatgatacacacaaaggatgttttctagaaagaagcctcagtttcaatctcatccatgtccaatctagctactatttgatcaccaacttttagaggttcagtgaaatccaaacgagtagaaggtgttctaaccttattaggcttaaagtttctccatgtatctttagcagcagcttgaaaattcaatttctccatctcctctgcccagttcactgtctttggagtaaaattggtctgatcgattccttcagcttcgtgcgtttccgaatcaagaacaccacaaggatcatgataaatttaagtcagagctacttcctctccttcttcttggatcgaaaggaggtcacattgcgctttgccaccaccagaaactatcttcatcgacttcgacacatccacttcttctttgccatgggagagagcagacagcatcacacaccttacttccaaatgctatgtatcccttatttttttttcccttttgaaaatactatgggtgtgtttgataacactttttaatcagttttttccaaaattataaaataaaaatatattctaaaatcatgttctataaaactattctcattttcacttttttaattgagaatcaaaattttaaaaatttaaaataaaaaaaaaaagtcactctcaaaattattttaaactttattttccttaatcaatattttagtctccgatcccaacctagaccttggaatcccaatcccgaccctagacccaaacccgaacccaaacccaaacttagaccccgacccacaccctagatccagacctagaccccgaacccgatgtggtgtcggaccctgacccggccccgaccccagtcccagcctcgaacccaaatgtcagccccgaacctagggctgaacatcttgagcgggtttgacccgaacccgagcaacccggccgaacccgaactggtgaacccgcaaaaaaaaattaaaaagtttcgggtgggttgggttcaacccggtacccttcgggtgggttggcgggttgagattttaggggtaccgagtttcggg

SEQ ID NO: 188481 - DNA, 845 bp, Cannabis indica
aaaaaaaaattcatttctttgtgcaagcatatctaaccgagaagatattgtgttagttttctgtcctatatggtcaaacctaattacaggcacacagccaactcttttatgtaaaataatagtacaagacattgacccacttattattattttatcctttatatgcattgatgttacatgtgggcatgacctttttatatttatccagaagaaatccatgagcagacaattttttccttctcaattgtttactataaaagatactttctcaacagaaaaggcaaaatatataaaatctgagtgtagtgcatattacacatcttatctttgttttttttcaatttctgtaatggttggataaaattgtcactaaaggcctttttgttaatagatttaaatggtactttcaagttgggtcttttacactgctttttacatgccgtattgatttttgtgctggtttgaacacacttaatctaacccacataacaactaatatctgcacattgaaccaagtccaaccaagatctatacatgttggttttctaaggctaaataaggagttgggtcttctcaaccacttccattgtctctttttcagcaaagtcaaccatctgttagctgctaaaggttgtgttttgtttcagtctttaattctcgagtttattaattttagtcatactttcattaaattaataaaggttgtgactttgtgagagtgagagggagaaagggaaaaaataattgaaaccatcaatttttctagctaaagtcagatatgaagagccaatagttattgtctgaagatttcaggtggggtattgataaataggtgaaaaggaaag

SEQ ID NO: 188482 - DNA, 1968 bp, Cannabis indica
aaaaaaaaaaaaaaaactgatgcttctgtggacatgtttcaaggaaaaaaaaacataaatacaaactcaaaaccaagttcatcaatcaagaaacttatagacatgagccccactttaataataggtgaagccaatgtaaatcaaacacactaaagactactccagacttatgcacattagatatgaagcaattgtcgcccaaagcagccatttgccacatttgtcgacaaaataacaaaatcactaaaatatttactctgcatcgattttcatggaacatttaaaagctataagtttgaagaacttatattctttatataagtagatgaaaaagataaacagtattaaccaaataaaggacgatatccttcactaaataggtttgatcacctgtcaaatctcccatgctgtagcgtattatcacataacagagctcattgagccccctcacccccaaaaaaactaaaactttgcagcacttatcgataaaagggaacgaacccaaatccagaccctacgccttaaacccgttaaaccccgttctttaataaaataaaaagatataaaccaatgcgacctaaaaggtacttagttccatcaaactaatcacattcatgaaattcgtaatagatgatgacaattaacttgaaaaagaaagaaagacagaataaataatttcaaaacctttcgggagaagataaggagccttgactagctgaaggagcattgctatcacgaactgaagaagacgaagccggcgacgaataagaattagtggcagaagacgaagacggcgacggcgatggagactgagtaagaccaaccttctctctaatgtccttgagcaatgttacccatttcatcgttctccctctcgatccctcgaacagactactcttctctcatccgactccaccaattgcccccaaaaaccagatccgagccttctagaactaatctagaaggatcgcatcacgttttcaccacctcaacaaatctttgtctccacaatttcaccttccacctcccaaaatagaaaagagaaaatccaaaaccaattcccgaaagaaaacaaataaatttcccaataagttcagaggaaatgcagctagaaatgtcacaggcaaagtaccgatcaaagtactcttccgccgcttacgatcagaaagatctaacaccaaatcgattctttattttattttaaatatatataaatatatattatcctctatttctttccgtttgcgattgtgatctgtgctcctcttcgcaatcttcctatattttttgcttttggaatatcgtttacgctttcctctattttccgggaaaatgttctgtgagccctaaaactaaggaaaacaaatgaaacggcaacgcggacttcggttgaaaataaaaaaaaaacaatatatatctatataaatattttatgtgtatataacaatatgattaaattaaattaaattaaacaaagaacgagaagctctttcttcttcttttttttttcttgcgctggttttatgagacggcctctccgcgcctcgttcctcgctctatatctatcgcctttctttctcttctattttttccactccaaataaaatctttaatacatttcaaattttaaaaataaattaaattaatataataattattatttttctctcactagtttcacactacctgaccacgtcagcgtgggatccacatctaccaatctaccaatctaccacgtggcatctcgagattgacggtcaagacgtgagagcctctttccctccaccgatttgattattttttttctttttctttttgtaagattaatacttttctttcttttttttttttcaaaaaaaaaaatacctttcctttttttaaggtattaatattttaattaaataagaatttgctaggtgactatttttattgctaattagtgttgtaaactaggtgattgttacgtgc

SEQ ID NO: 188483 - DNA, 2165 bp, Cannabis indica
cactaaaacttcaccaccataataaactaaaataaaaaaaaagctcaaacacacgtacaaagcttttgcctttttattgaaagatggttttgaatctcaatagttatcttctaaacttgctgtaaaaaaaaacaaaggcaaataagagaaaggacacatagctattcttatacaccaaggaagttgggatagtgatacacataatgaggaagagtctaatcttacaaatcacaactcaaaaaaaaaaaaaagctttcttctttctgttatcacataattgctccaacgtagtaagtgaaagactgactgtagcataaacatataaagagaagagtttctaacaaaagatacaaaaacactatccttgtgcacaacatacatcatcttcaagtacctctatacagtctgcaaaaagggattggtcttttatttgcatgtgaaactcaaggtcagtagcatctgtcatgaattaaacaaacatggaaaaagtttgtgtctatatatatatatatatatatcatgtgtatatgtatgtgaggaatggaaagaggcctacttaccatagaaaactactgtttctgaccacccttcttccataaaaccccaatcttcttcaacatgttgtccatttttcttcttgggtgaatcatcatccatgtcttccgaataaggcgaataccatgggattataggtattgtcaagtgaacttgtctgtcgacaagtttcccattgtcccggttgaaatcatcgcagcagctgcctcggcagcctttctccactgatctgactgaaccttaagcctcctcaactcagcctccatttcgatgtttgatgcttgtgctgcatccagttgctcagtcacccgagctgccctcctgctgtttttgtcagcctcctcagtagcatagccaagcttcataagtgcctctcgctctgcagcctttgcagcatcagctaatgcagcagtttcatcattaaccttactcctctcggtttccttgttcttaatttccatcttgagcgactcgttttcctcggttatactctgcaactctgtctccttgtccaacaaacttgccttcaactctgataatgtagcttctgatttcttcagttccattgtaagttcaaattcgcattgacctgatagagttttctcaatctttgagtttaaactctcattttcctctgatatgctttgcaactcggtttccttatccatcagtagtgccttcaattcctcaatataagcattagatttcttcaactctgatgctaactcagcttctttctgacttgattcagattttgtatgttcaacttgttcataagcacttctaatctgcaatgtgctgcgaataaattcttcttggtacctgatctcagcagcatctaatgcagatctcagttgacctacttcagatttcacagaattaagctctattttcaactcatttagttcgtcttctccattttcaagatttttctcttccttaggagccactgagttttggctgtttcgattaataagctctgcctggagctttcccacaagaccctccagcgacttgactcgagcattggactgctccaactccaaggataaggaattgtaggactccactgatttggctgcatcttttcgaagcatttctatggtttcatttgccgtttccaattgcatttgagttctattaactacttctaaagcttgagcttcagattccctgcaatcattgagctcggttttcatcttctgaaccagtgaaagagtttctgatagctccattcttaaattatgaacctcatcgtgtgcagattctgcatgcctagcctggttggcttctgattcggctctcctttccagttgaaacttgagcttttgaatttcattcatggcagaagccaaggcagcagaatccattgaatgctgcttctggatggcctcaagttcagactgccatgctctgtctcgatcctgagaaagtttacgaagctcttggatccgatcatcctcgcacgcagagatatcctgcagctgctgttgggattcctcaagctttgcagacatctgcatcagctgattcttggcttcttcagcttcctgctgggcttgcctcttccatgactcagaagtgttcagctggtcctttgccttcttcaa

SEQ ID NO: 188484 - DNA, 3979 bp, Cannabis indica
ttttcttttttcttttgaatttttttgattttcttgatttttcagtcagtgaaagtagatcgaacttcaccagcaactttgtttatattcgcgtgtatgtatacgtatatagctttgtgtgtagtattgtttgaagctcactaaattgtgaaaacgtaactcgaaacttttttggattgaaaagtttcgatgaacgttttgcttatggaaaattccgaatctctcgttgaaatatcttgcttttttttattattatttttagtggaaattatgatttattttatttgtgaaagataaaagagaatacaagagagagtcgttttctgaaaaagaaagggaatcttgtttggttgtactcgaatttcgtggctgtgttattgtgttccagctgcttaagtaaagttttagtggagttttcttttttagttcatgaagatggtgactgtatgaacactataataatatagagaattgacaccttttttcttattattattattgaagattaaagaattgttttgtgtttgcttctttaggtgaaattgactcttcgtttgagttgctggtcatggcgggtgagaagaaaatcgaaaatggtatttctctttaccttcatttcaacaacatgataggtcttgttatctattattgatgctaatgctaaacttttcttatctgtttaatctaggtgagcctgctgctacagtgttgatatctgatcctgctactggtctgccggagcaagaagtggtgagtcgaatcgccttgtatatttgtatattttgctttgaaaatcatttctctctgtcaaactcaaatttcaatcattcttgcaggcttcagggaaagatggggtcccatctgacttgaactcatccatatcaacttcaaaggatgtcaacgctagcatcaaaggtgagattgatcaacagtcagtgggagagcatggtgttcacaatccaccttctagctgtgacagttattattatccaggttagatgtcacacaagtccaatatagtagtgttaacctagtcgtttcatttgagtgggaagttaagcttcaagtcataaagccagaccttagcgctagttatacacaaacaagaaagaattactcagttttgtgcgttttattgtgtctttcttattgtccttttactttaggttgttattggttatatttattatctctaaatagatttatgttcattttacaggatataatggatcgtttacgcaggttgatgatcagggttattatcatgccaatggttctaatgcagtaggttcttccttattgctatgttcattttatttttttttttgaaaatttgtaatgtattgtatattataaactttttgtttattaatgaaaacatttactcttatctcccaggctataccatcagaaaatggtatgtattataactattattttaatccgtatcaatctgggcatatggtgggagttgatggacaaggtattagtcaacagcaatattatccatcatcagggtatcatcagccagctgtttcttatggatcagaagctctgtattcgtgggatccggcatttgggagagatgttcccaatggagccaagtctggtattcgctctactggtggtgtagcaaggacgaatggctacaattcatcaaaaactaatggcagttttacaaacaagttttccaagcctgttcttaatacgcaaccaaccaaacagttgagcaaggtactcatctacttgcatttaccttgttaagtaaattttatgaatatagtaaatacgtttggtctttcttggctataaatgggatttattcttcttgttggacttctgattaacttgtatggtgtttattattacaggtgcctcattatggttctgaattctcggctgcaacagctcccatttttaaaggatttccccctcaggctggacgatatgcatcatttgctaatcagaaacaaggtctgtacccacagcagactggtttctcaagctataataaaccttttgggtcaaaaatatggcctggaaacgatagattcaagtcaagggacaaaaataataggaatggagattttgaagcctcaactgaattaacccgtggtccaaggtctcgcattaagagccagtcagattctacacctgagaaggaagaccttggatctgctgttcagaaagagcagtataacacagttgatttcgccactgattatgaacatgctaagttttatgttatcaagtcctacagtgaagatgacgttcacaagtctattaaatacgctgtttgggctagtaccccaaatggcaacaagaagctagatgcagcataccatgatgcagaagtgaaatcgactgagacaggcacaagataccctattttcctcttcttctcggttagtttacttgtttaatctcatgacaaatcaactctctttgtaggattgtttgaatgtcctatataactaagtgaacatggattctgttttccattgtgcaggtaaatggaagtggacaatttctcggtgtagccgaaatggccggtcaggtagatttcaacaaagacatggatttctggcaagttgacaagtggaacggattcttccccgtcaagtggcatatagtaaaagacatccccaacactcaattgcgacacattatcctcgaaaataatgataacaagcccgtaactttcactcgtgatacccaagaggtactaccgctgcttagagccaaccatactcgactgtttctgcttttccgttgttattgtcggttaataacgtttccattctttatgtcttgattttttgcacaggttggattaaagcaaggactggaaatgttgaatatattcaagagttacacaccgaagacttcattgttagacgattttagcttctacgaaagccgagaaaaggtcctcctagccaaaagagccattaacatcaagcctgcagcaacattgaagatggaaaccaatttcaacaacagcgaattcacggtaagtctctttccattcgtactgtcatggttgcctgtgttatgatatgaagtgtaataaagctaagaatgtgtaatttctgtgcagcagcaacagcaacgcggaaatggagtagagaggaatgctgacatcgagaactcagagcagcgcgcagcatctctcatcagtctcgccaatctttcccttagcgccaatgcataagagtagtaactaaatgtgcctgaaatttgagacaaagtcatcacatagtttttagagatagcacaaataggtctctcttgttcttttttttttttctttctttctttttaattttacttcttttgtgtttcatctctcaatttttgtcttttgttctagttttcgatctagtagaagagatttgaagtgttcattttctttttggtcttctttttctaaaagcatagtagggacttggtagtagtgagtgagtaatgagttgaatttggagattggttagtgagtgagtgagtgagagagattgagtgagttttagtttctattttgcgtttttaaattttgagcaacttcaacatttaagtaagtgccctcaagaaattttaaatccaagctttcctaaaactattatcactggtatttgattaacaaattaaatgattactcacctaaacttaatttaatttgaaaaaacaatttatcatcagttgtttttaacattaaactaaaatagtaatactgacaaagctttgtgtggtttagctaaacaaaattgaaaaatttactaggtctctaattgaattatgtgatcaatttgaattacgcctggccatttgagtttattccctcgtgttttgattttcgtatttagtatgaagaaacctcttttctgaaggaaagaaagaaattcatatccaaaaatacaaacttaaatatttaatcaattttatagaaacttgatcataaaatttgaagtataacctatta

SEQ ID NO: 188485 - DNA, 1550 bp, Cannabis indica
gttttttattgggttgtcgttcttgttggttgcattctgagctcacaccagcttgttgttgttcagtagttgaataatggtggtaatgaaggtctttggtttcggatttaataggtgaatgtagctcagcaatttcatttgtgacacagctttccaactctaacccctgaatttggtgttgtgtgtccaattgaggaggcaaaaaagagtggtagctgcagccatttgtatttggttcccatggctttttcatgtgttggagtctcaaaagagtttgaaagctcggatctttcaaaggcaagaaagatggagagtccacgctttgtaacatttcaagaaatggcattctctcatccaaacctcgtgataacacataaccttcttcttcctcgaatctcaactcattccctgagcttgtggtggttagtccttgttctagacactccatatccatgtgttcaccaaaaaactgagaaacaaagaaaaagaaaacatcaaaattagatgaagaagaagtgtaaacaatagaaaaaaaaaaaaacaaaaacaaaagggtaaattcttattttattaaagagggagtaagtaataaagaaaactgtcatggagtggagtggagaacgagggtgggttcagtatgaacagaaaataatcataaaaatggaatgagaatagaatgtttatagaggtgaaaacagtgcagcaggtatgagtgtttgaagtaaaaaaacaatacatagcattgaatgcaagcatttaaagaagtaaaatcaatccatttcttgatactaggaaatgggattgaaaaagggaaagagaaaacaaaaacaaaagaaagttgtacaaattaagcaaagcaacatacacagggattgatgggtccttggagcctctccattacagcagagtaagtagttgtggaagcgtgccttacttaaattccttcactttctttttttttttttacactctctctctctctctaaatatatctttgtttctcactcctctcgattaccaacattctatattaatgctcacagaacaatagtaataaatgtaatcccctagaagcagagcgagagaccccatatcttaaactgcaatatatattcctttgtgtttgatgatagaaatagtctttaaatagaattgtaataaatgctatatgcttatgatttgaagaatcacacgaagaagaagaaagagatagaaaagacaggaggttttactaagatgagggaaaaaaggaaaaaaaaaaagagaaagggttaaacaacaatgctttgaatatgaaaattaagtgatttttatactcaaatggatgatctttttagaagatatagatattcaactgagaagagaaaacccaagagagaaagaaagagtttggtgagaaagagatagagagagatatagaagaaagagagcaaagcaaagcaaagctagagttgtctggtttacaaggacccaagcattattggcggtggcagttttgtccctcagtggagacagagggttgtggggtactttttttttttttttttctc

SEQ ID NO: 188486 - DNA, 2414 bp, Cannabis indica
aaaaaaaaaaatcaaaaaacgaaaccctgtgtctgtccaatatcgcaaatacagttccttcttccactttctctctcaaaccaaaccaaaaaggtttgcctcttcaatttgatttcctctgttttctttgatttttcattctctctctttacgatcgatcgctattcacaataatctgacgaaacttgtttgtgatttgatattagggtttgttggaacaaagcttgattacccaaacatgtctctgaggccgaacgcgaggacggaagtccggcgaaacaggtacaaagtggctgtcgatgccgaagaaggtcgcagaaggagagaggataacatggttgagatccgtaagagtaaacgcgaagagagcttgcaaaagaagcgtcgtgaaggccttcaaacccagcaattccctccttcgcctcacccttccaatcttgacaaaaaggttatctcaattgccgattccctttgttcattctatttttttgtttctttgttttccttcactatttactttctttgtgcgattaagcacattgtcggttctgttagatcggaatgagatgaattgagttggggttttgggatgtgggtgctatatataagatatttatatgtatgtatttatattgatggtattggggttatttgtagttggagagtctgccatcgatggttgctggggtatggtcagaggataatgccaatttgcagctcgaggcaactacgcagtttcggaaactgctttcaattggtatactaataatgatcatgatttgatttgtcgatataatttttagggactttgttgttcactaaacaaaaccaattgaaattttcatttgcagaacgaagccctccaattgaagaagtaattcaatctggggttgttccagtattcgttaagtttcttgacagagatgattttccacaacttcaggtccgaattttaaccaatatttcatttccatggtggttgtggattgtttatttattttacagatttgtttctcttattaatgtagtttgaggcagcttgggctctcacaaacattgcttcgggtacttcagagaacaccaaagtggtaattgatcatggggcagttccaatttttgttaagctacttggttctccaagtgatgatgttcgtgagcaggtattaaattagaactgtctatgtttgttataacttgtgcgtttgtagtctgaagtagaagtctacttttttaagaattgtttaatatgtgaacgtattacgaactctaggctgtatgggcattgggaaatgttgctggtgactccccaagatgtcgtgatcttgttcttggacatggagctctgattccattgttggcgcagttgaatgagcaggcaaagctgtccatgttgagaaacgctacatggacactgtcaaacttttgcagaggcaaaccacaacctccttttgatcaggtttttttgtcttgttttcaaactgtatagtttctttctgtaggatgttcctcttttttttgtaattttggaatttgtttggcaggtaagaccagcacttccagctttggagcgactagttcattcaaatgatgaagaagtcttgacagatacctgctgggcattatcatatttgtcagatggtacaaatgacaaaattcaagccgtgattgaggctggtgtctgtcctcgacttgtgcagctccttctgtaagtattttatattttattttcttattcttgttacacagtcaaatattttgtgaatgtaaaattgatttattttttttttaaatgcttatgcaattcagacatccatctccttcagttctcattccagcacttcgcacagttggaaatattgtgacaggagatgatgttcaaactcaggttttaacttttcttatgtttctagtttcctattactccatccatataaaggtctcagaagctttttgcacctctgctaatatgttttcaatgcttccagtttatcatcaacagtggtgcactcccgtgccttatgagtttgttgacccataatcataagaaaagcattaaaaaggaagcttgctggactatatcaaatattactgctggaaacaaagaacaaatacaggtacttgtatttaatatggcattccgttgaatttaattgtagtgtagtgtagctctactcacaatgaatggtttgttcctatgagttatgaatctatgaccttgtttggtaaaacttttgcttttgcttatatctaaaagttgaagtgaaaaattgtcttatttttttgtttggatcaaaagcttctggatgatcaatataaaatgaatttttaagaataaattagaaattcttaaaattcagtaaatagcttctcaaatgtcttttgggagtttttttttttgtaaggtcttttgggag

SEQ ID NO: 188487 - DNA, 2935 bp, Cannabis indica
ttttgtatatttgtgaaataattgaaattgggctttgtagtgggtcagaaatttgaaagcccataaaagttgaactgggccggcctggtccaatccatttccaccgattacaaatagagatgagaagggttactagggtttcacccttcacttttaaagaggtctctcaaaaccctagtttctcccattactcactcagaagcgcctctgctacattctcttcggcggtacgattctctcatttctctttaacctctgctttcatttccattgctaaaatccattgatttacttcgttggttctaaattttgttgtgttttggatttttttttttgacattgatactgttagaacctcaatttgggtttcgatctcaaatactgttattgttatcttctatgcgtgattaggtgaaattaaagtttagatcttacttgtgagtagaaaaaaatggactttgggttattaccagtttggttaatttgattaaaagtttcattttctatgatttgattttttagatgtgaatttttgattgttatgaagctttagctttattaagtttagtgggtttgtctgtagagatgggtgaagtcaaggctttggttccagagtccgtcttgaaaaagcaaaagagagaagaagagtgggctttggctaaaacacaagaacttcagactttgaaggtgaagaatgctgagaacagaaagctcatttacaacagagccaaacagtacgctcatgaatattcagagcaggtagttagtttaccctattctatggtagattagggttatttattattgattatttattttaattattaattgtttgctattttataatggttttttaggagaaggagttgattcaacttaagcgtgaagccaagttgaagggaggtttctatgttgaaccagaggccaagctcttgttcatcattcgtatccgtgggtatgtattgtggcttattgatattgatacataagttttttctgttctgggtattgattctgtggaatgattttggtttttccagtattaatgccatgcacccaaagacaaggactatcttgcagctcttgcgattgagacaggtaaagcattatttgtgttgtgaactatatagatgccattgaaaatttgtctttgttatagatgtttgtttgtgttagcttgtttcttttagaagtggagaaatatggcttttcacttcatattttgggcataagttggaagtttgccatactgtttttgttatgtttaatttacagtttgtcatgtaaatttgtaggtataatccactgttcatcttacaataatatgatacattttccattttaagtgcatttctgtaaactaattttgttttggttttccatttgctttgaatgccattaaaattttcagtatgatgattgattttctgtctttcttgaacagattttcaacggtgtgttccttaaagttaacaaagccaccatgaacatgcttcacagggttgaaccatatgttacatatgggtatgtatgagtgcactgtttcttagtttttgttgttattatgcattcttctgcttcaagtggtctgattagttacttttgctttattttagttaccctaatttttacttttgctttattttagataccccaatttgaagagtgttaaggaattgatctacaagagaggacatggcaagctcaacaagcaaagagttgcattgaccgacaactctgttgttgaacaggtttgtggatattttctcgagttctgtctctatttgtcttatttttgagttcttggcaattattctaactccctcgttattacaacaggctcttggaaagtacggaatcatctgcaccgaagatcttatccacgagatcaccactgttggacctcactttaaggaagccaacaacttcttatggcccttcaagctgaaggcaccattgggtggcatgaagaagaagaggaatcactacgttgaaggaggagatgctggaaaccgtgagaacttcatcaacgaactcatccgaagaatgaattaggtttggcagtattttattgctcaaacagatttatgagtcttttggtttattatgttagaacaaatctaaactcaaattttgttttatcgtttaagttggacgaatttgtcacttttttatttttggtatttaaaggtttgaatgtcagaatattttgtaggcttgcgagtgttaaatgcatttgttataaattttattattggatgatcgatctatatcccaattttacttgaccatataaatatatttaggcaaatttagtggctgcaagtgatttcttttgctaaaaatctgagtttttttttttaaaaaaatccatgtttatttcaaagttttttatttttactcctagataaagctagattcaaatgcaacaagtcatagcctttttaagtaattgggaaatctaaagttttgataaaaacaatccaaataatggcccaatccttattttcgtcaacctagttttgaagtaagttcaattattctggtgagaataaaagattgaatttaaagttagtgttataagaattagggataattcaatttacttttaaacatattcttcaaaatacgaggttagaaatataatttagcataatatattgtccaaatacgtatttaaccaaaaataacgttgtcctttattcataagaattacacagccaaactacctcacatgtttttagtattgagcaaagagggttagaagtacaaccaaacctctaaattttaacaattatgatatcttcaaggaaatgttttctaggtgggatctaagtgttattgttattagtgttattaattattggatcttctattgaaaaggtacaaataatcctaatagagttacacacaatacaaaataattaaagttgga

SEQ ID NO: 188488 - DNA, 4468 bp, Cannabis indica
atgtagcaagttccagccaaaaattcatgttaataatcaatggtggtggtgagtatgagtaccttgtcaggcttgcccatccatttcacttcacctccaagctcttcatattttgcagccagaatccctaataaaccgaaaaaaaaaaaaaagtactaaaactgaaagacgcgtttctgggaaacattgtgtaaatttccaatacaaaaatgttcagtgagagttgaaagagaaaccagttgttatgttaccaggcattactctcaaggctctagcttcaacagttacaaaatctggattagccaccaccataggaatctttttagtagcacattgttccaatatactctcaagttcctcaagtttcatgggacacgcaacaccagaaggatggcccaaagcttcggtgccatgagccaagatgaattcagcatccttaaccttgtccacaacttgtaggcctaatccctacaagaaattctgacatgttaggccattcattacaatttccagtataacagaaatggcgtttattttcatggtaagctagtcaaaagatgtgttgcagaacaaaatgaagaaagtaacacaagcaaagggatccaattcttttggcggggcgcttttgcaaattaagcagaaccgcacagccacagtaaatgcaatggctgcaagcagcaattgcaccacatacaatccaaacaatttattagtcaaaacactgattaggctgccttccttgttaactaggagcgtttgttagttactctatcttaaacatgaagaatatggctgtaagtttgacagagcaggaaaaacttatccaagaaacacaagcacacctcaagagatatagctccccggtcactccaagtcatgtgaatgcaagatcttccaagtgctgcaaaccaatcatcatctctcctatttttgcaagatgaagtcatcaaaatctactcataaatccaacttaacagaagtttcaaaacagacaaaacaactgatggtgataccagttcttcacctttgcaggtactgatgtgttagttctccactggtaatggctcctacaaatagagaagggtcaaatccaagattctttattttgtccatggttactgaagaacgtctggaagaattacttatgatcaccatctttgctccactatgtgcaagcttttctactatcaaattcaaattaaacaacaaagcaaagacaattaaacaaacatgaaacatgcacagccgcacctgcattgccaaagaggcaatatcacaaaaaaacaatgctcacccagaagccaaaaataacattatgaaatttttttatacatacatgtggaaatggcacccggataaggttgcttcccgtcatggagaaccccaaactgatctaagaaccatgcctgaaatgattggatttccaggaaattaatatataattatacacagaatatactaatacactatgaaagtaaagaaaatgaagattcagcatctcaaattggaaaaaagatgttatttttggtgatgtggtgaattctgggtaccttgaaagaacgcctctcggtaatttgttgaagcccatttaaactctgaaagagattagtagcttcgttgggtggagcagaacatttgggcatcatcttcgtttttcagtgtccgtaaaaatctaaacttgaatcaataacccaagaccaccctttatttatttataactcttttgattttgaatattttgtttgctttcactacaaaacgggtcgggttctaaattcggtacctgatctatgaagctcttcgggttatttataattttatacagtagttttcagagggaaaggaaggatttccaaaactaaaaactacaacttttatacaggttgtgaaaattgagtataaagaaatggattttattttttatttaaaattataaaacaatttataccaaagcatatactattgtccttttcattcttttttactcagcaaaaaaaaaaaaaatccaacttgggcaaaataactgactattaagccaccatgttagaatttacatccataccatacaatgatataattttcttttttgggggggattctcatttctcctctggtaaaaggatcctttgttttattgaaatgatacattgtttgaaggaaaaaaaaatacgaaaaaggaataacatcctcagatggttgtttcattaaaatacaaaaatagagacaacatatttaaaaatggtatgactattcagattgagagggtggttgaggttcatccagtgcttgaggttgagattgaggttcagtctgtggctgaggctgagcctgagcaggggttgcttgaactgactttcctctctgcctaagcttggccatttcctccttcatggcttccttcctctttttgctagctactactttagcttgaagcccactcaaatttgggtcctttttctcttcttggggtgaaggtggaggccttctagctgctgctcttgcactccactcaccaccattcagcccaagagctacaccacccaaccccaaccccaaccccaagctcaatgtcctgtgaatcaacaccaccacttctatatatcaatattactaacatttatctgtctaatggcaaaatggcaatggcattgtcataaggtatgaatcaaaatccataacaaatgaggaaagcgctaaccttctgttgaggctcttttcatcgtttgaatcttcatgggatgccctcacacttacacatgcaaaatgactcttcttataggttgttgtggagaagggtgttggtgctgctgttgtagtagacgccgcccccgccatagctgccgctgcagacagggaatgtgccatgactctttctcagtgtcctactgtcaaggtatactttggggttatgtgaatgagccattttccttctctatagcgattgcatcaaagtagagggaatcagttatgtggatagcgttgaaaggtatactatagtcaaacgatgcctattggctactataagataagattgtaccaagtggaccctttcattccgagaaattgtttaataagatgattttgttcagacaaaggacactaaattgttacacattacgaattcctgcatgaatataaaaaacatttgcacgacaacaaactttggatatattttaactagtattttgcaaaacgaatgtctacatttatattaaaacttctattattctctttcgtcaaatgtattacttgaattacaataacctacacgcgactacggacaatgtatggctatcacaaaagaattgatttttaattttaataccaaaatgagaatcattcataattgacaaagtgagaaaaaatgatagactcaaattggccatgaaagagtatgaattaagaaaaataatatttaaaactaatattttataagaaatgtaaacacttaatgcggcggttgcagttgtagtattaaaggacaataagactagtctttaaattttgcatttctagctagcatctccaaacaacaaaaattatccaaaaatctcaaaaacttgagcttgcacaatgaagcaatggtcctaacagagaaaaaggcataacaaaattaagaaactctggaaattcactcgtcatcgtcctcatcagcatctgcagcagagttgaaggcattcaatctcgcgacaagcttggccttcctctcctcataagtgagctttttcaagttgtatctgtcataaaaaaaacaattgccactttaagttctagttcaaatcagataatataagttccacacaagttatttttactgaccttttgtgctccttaggaggctgcttctcagacttcttgattatgggatcagcacggatagcggcatgcactttcttgtacacctcctcaatattgtcagcctcaatgcctttcttaatgtattgtgagaagtgtgactggtatttctcaggctcgtcttccataagagtctacaaaacaaggtataaaaaatggaatcaagttccaatgaaatgaacacaaacagagaaggcgatctaatcataaacagaaaattttagtaaagtctcctaacataccctcatgtaatctgcaatgtggccaccaaagatgtacttgcggtgaatttcggcatcaagcttcttgttgtcttttgaaaatccagcaaacctcttgtcactgtgggggatatccaaaccaccatccaaagcaccctacaattaaagaaatgtgaaaagaggaaatgagattcaatacaatcacaacaaaaaaaattgcagcaccatcaatgaacagacaccacaaaaaatatattaaaaactaatgggtaccttaagagcaccaaaaacacggttgccagtggtagtcctgaggagaccaacatcaagaagggcacggaatggcctcctggtctctgcaggttctacagagtaatcctctccagtagcct

SEQ ID NO: 188489 - DNA, 2939 bp, Cannabis indica
atgaaagaaatgaaaaaatggtggttggttatagtggttgcaaccagggtaagccttgttgcgactaattattgtcgcttcgacgaggctatatcccaatcacaacgaggctcttgctagagcaggcagaaaaataatcacgaatagtagtcgcggcgagcgtatttctcaccgcggtgagagtgttagattgcctttatattgcccatttcgtgtccaagctttctaaacctaaaaaaaatcaaaaccccacccaatttttaccttctcccagctgaaaaacacacattccttcccaaaatataaattttcttcatctctttctaacatcttccatcccaatcattcgaaaacacattttctctcatcaatctcactttttcccaaaaatcaaccctaaaatcaccacttttcacccaaatctgagatgatcattattcatcatcttcaacctcaagctttttgaggtcattcaacaatggaggaacattaagggcatggtcacttagtaatttcgtcttcattgtattttattgattaagtgagtttttttctacaagattggatatcatctttatttgaggtttgtggatttttcttctaaattttggggctgttttggattattttttgcattggattatattggtgtaattttggtgaagtttgtaattttgggaagtgaaaaaattaaggggaagtgctgtcaaattttcctgagaatttttggttgagtatttcttgattttgagaatgggtctcaagcgcactagagctagtgcagcgggtgcttcatcgtcgaatcctctacaagccgcttcaaggccaacttttaagaaagccctatttgtgagtctcaaagcccaagaaagatattttgaattacaaaaaagggcattcatagtagatcgaggcattgagtatagtgaaaatcccttgccaaatcagccactgtttgacaatattaggcttcaaattcagaacagtaagtgggcggaacttgttgatgttagggagagggtaaatcaaactttggctcttgaattttatgctaattggcctaagcggatgaatggattagttaaagtttttggtacatatgtccctacaacgacacaacctatccatactttatttggactgtcagtcttcactagggaggaacaacatctttgtattattgaggaggatgagctgttcaactatttagatgttacgaggacacttggcttcccgagattgagatttcatgagttggatgaggaaccccataaactctaccgctatgatttgatctaagttgctcgtgcttggttattttctatgagtgcccagttggttcttagtaagcacttttcagatgctcaaatggataggcttaaatatgtatatgcaattataaagggttacaacatgaatgttggggacattattcaatatagttttgatattatggtagagggagtcacacatggtggggttggcttggcaggaatcattactgaactttgtgtcacttatggtgtgcgtcagtatgcctatgatacccaggttcctctacaaagaaagattgatggggtgatgattcgtggactaaaacctccacatccttacctcctccctattataatcaacaggcagaagctcctggtcccgaagaagcaactcaggatgaagatgccttagttggtccctagtcctcttgacacacgaatgcaatatgtccgtgctcaactcaactatctcatccaacagaataatcacatgctgagttacatggcgcagaagagtgagttcaatgagaaccaagagaggaaactaaatcacctcattgatcagtggagccttggggttgaggatctgaattgcttggtgtatcctcctctcttccacccttataatcagccaccactgccaaaccccttctgatcggggtttcaggtaagttcttctttctctttgattttatgtcacattggggataatgtgaacttttagtttgggaagagggacttaattttttaagtttcgctactttgttttgtttgtgtgtttcgtgttttatttagttttagtctttgtttagtgtattgataattaagctaatgataattgatttagtgagttggtgatgttatttatggaatgaattgagatttaaattgtgtgcttgattcgttaactctttggattaatttagatacttattgaagaaaaaaaattaccgatttaaattatcaatattttgatgttctactatggtttgtagaatgtttgcttgaatggaataaaacttgcatgatttattttctcgaggcaaaatccttaataactcttgctttgaatatgatttaggcaattttcgttggaccagtttagcatttcaagcttacccttatgttttatccttagtttactcaaatttgagccttagcttgttaaaaaattttaactacttagttaagcttattttttttccattcactacattgaattcctaatgcaccttgaattatgccataagcttagagaacatgtttggagagtaaattgttatgggtggaattatttggaaagtgagagattgaaaaaagttttgtaatgtaaagtattcccaacatcactaaaaagaaaaaaaaaatatagaaaagaaaaaaaaattatatatataaaagaaaaattgtatagttattccttcttgattaaggaaaaatttagtggaaaagtgatgttggactcgaaattagaaattcttaatctttaaaaaaatatctttgggtaaatattgggatatgcggatttgtgtgggtacttgtttggttataatgtgcttatggtataatagagcctaaatgactttttatctaccttttacctaagccatgacattacaacctaggatgacctattgattctgagtaaggattgttgacattagt

SEQ ID NO: 188490 - DNA, 1161 bp, Cannabis indica
aaggagggaggaataataatgatattggcctacaattacaaaacccaatctgttgacactcatctcatcttagctcaactttctcttaacccagtcaatgactcaaaggtgctgcatataggcttttataccatacttgtttgcttctatatatggttatcatgtagattaatataaacttcaattgcgtgtctgtttgttatatattttgaataaaaatattacagtttttatttaaatcatagtaataaatttcttaatgcgtacgtatagtttgtctccatgtagtatttaaacaaaggcttaattcatttgtttctaatttttttaaaaaataatattaggttattttaataatagtttaaattaagactaggtagcagcaatcaggcatgataattaagcagctgatatgattacgtttatataagtagagaatgtagaaggagaagaactcataatggtactattgtatgtcaaggatgataaaataaagcatatatatcactatactgatagcacagtaagaaacaaaaaagacaaacaacttgagaaatgacacattcataattattgtaccaatataacattgtaaattgattgtgtaaaacaaagaaatacaatttatgattagctcaaaagcctcttaggcttatgccacatctacactatcatatgtccaaacaattgagctgcaataacttgaaacccagtgaatggacgggtttgattagaaaaattaatactctgcaaacgaaaattttattacttaaattgaaagattaccctcattattaatattaattaatcaaatgtggagtggacctcttaagtcttaagtctaaagatgcgaaaagcatatgggcagagcaccagaaaaaaaaaacacccaaaatggatggtaaaaactaaacattatttatacatttgcaaaagtagaaattttttcataagaaagaaaacaaatcaaaaatccaaactttttagtttttaaatgattttaagttttgttatttggtagatgaatttgtatcatacattgaatgaatacgagtcaagtcacctatcaagtccattaattttaattggcgtacttaaatgagttagctaattattaatttataattgattgtgttaatcaatgtatgagcttggacagaa

SEQ ID NO: 188491 - DNA, 1959 bp, Cannabis indica
attattttggatcttattttttttaaaacttaataattggagcctctctgttttgttaaataataaaatgaaataggactctgagctcaattttcaacaattttatattttaatataatcaattttaagataatttctaacacgaatagatacagaaaatataattagttttgtcataacatttctagatcagattattattaagttttattttgataaaaaattagtttaaagtcttatatggacaattttaaaaaatacaaatctactttataatttaacaaaataaatagtcaaaattaataacttttacaagaaatctaaaatcctacctacccaaataaatataaacaggatgtaaatagtttggtggtaaggtgtaattgtgataaaataaggagtatatcactacaatcttttttgctgaatatatatcaccacagttgttacagtggaagtgtgagatatagctaacttaagccgttggagccagacaagccgcgcccaccatgcagctaaaaagggtaaaaggaaatcgcatgcgagtctgtgcacaataatacagtaaggtctaggaagtgattggttaagccgacaatttgaccatctcttgggcccgctttctctctagtgaggagttatggtccaattagatgctgatctgggtagagttttgtgggacccattcttggagaaagtgagaaaattagtcacgagaggcggtgagagattacttactgtggggtccaccacaggtaagtcctgactgtcaaccatttagttgtgtcctctacttctactaccacagtcagagagagagctcaggcctcacaggtagccaccgaggcgcgtgtaatttcgtaatcagaacttgcgaatgtagtttgtggagaagcaagttgcaccaacttgttcttctttcctattaaataaggttatttctttttctttttttttaagaaaaaataaggttattgctaaagtaataaaaataagattatttaggttaaaaaaaataagattaaactgaaaattcatctattataatagcacataattcaaaaaataaattttgctcgtaaaaaatacgacctaatgaaaaataagaactacacgctaaataataaacaactttatttacagatcgtttaacgatatgaataacggcattaacttaaacaaaataaaataacattgcactcatcacattagactatgaatgtcgctgaatcctactcaaagcctccttaatatctattatttctgcaatttctagtaaaacaacacccatcctactcgttgaataggcctccaaaacttgtccctcatgagttcttgccaaataattgaacccaaaatgaccagcatcattaaataaagtctcgtcaatatttaccttgatctgattagaagtcggtgtagtcccatgcacattatgtttcaaactagcagaaacaaaggacaaagaagatttcatctgtgcctgtgcaaaattaaattaatcaagaaaagatcgtgctaaaagagcaactgataccacagtaggagtcttatattgccaaaccgcctcattatgggccttccaaatcgcccaagaaagcaccttcttccaaatcttgttgattaatcatgatagactgagacttaagctagcagccaaagtctctttcagaccaactggaaacatcaactagcgatcgattccaacatgctcgagcaaacgagcatcctaccagagcatgaaaaattgattcctcatggccattacaaataggacagtaagaagaaacatgcacatgtcgtttgagaagctgtacacaagtaggtgaaatactagaaactacacgccaaaagaaattgctaaacttaggtagaatcttcaaactctaaaattttctccaaaaacagtagaattatcctcaaatcagccacctttaagatcctccaagaaccgataag

SEQ ID NO: 188492 - DNA, 1808 bp, Cannabis indica
ttatatatatatatatagctcaaagtataaagttacaataacttaaacttgaatcaaggttgattgtataaactactattaactaaaactaaaagctttcaagtcaagaaagccctttttaactaagctgggttaatcaaattttaaaagatacattaatacatttgaagcttagctttaagaatacttcatttattatttttattattgtattataatatctttactaggagtagaagctggcctaacttgtctgaattggctggactaaaatgtaaagaagattcctcaacagaacacaatgaatatcattgaagcatcatccataacgacatctcctttactctatactgtgaaataatttaatatgagcaagaagaagaatacatagccaattagtctgaactctatatgaaaggagaaagaggatttcccttttggtatttctaatatgttacagacaataaactgaagaggggagaaaaaaatcttgcctttttttttttttacatttggagaagaacttctaaaaaaaagtttcaattgggaatgatagaatcttttccattgccataccttgtaaacataaatctccctgttgaaatagatcttctcatagcaagaggactccttaccatgttgagaactccacttctctcaatgggtttgaaatgttgttctccttttgagtaatttgatgaggtaccaattccccttgacaacaattcaagatctttctcaatctgaataatcaagtcatcatcatcatcatcatcatcatcatcactagctcgcaatatatcagcaactgaaagacgattatcattacaaaaattatgacaatttaaggacactgatctcctgagtggttgaatctgaatcccttcatctccaaatccacgatgtgttgcttgatcctgattaaagtccccagttggggtctttggttcttctccttccacctcttgtacaaaacccgaatcggaatcccgaacaacaatcacaacagcctcgttgcttctgctctggtactccataacagaagagacagtactcaactcaagttgaggcattacaccagtaacaaagggtgcaatattggatcggcaaagaggacaactggaatgagatttcaaccaagtatcaatacaaggaacatggaaagcatgattacatttaggaagcaatctaagaccctcgttttcttcgaactcactaagacaaacagagcaatcagaaccttcaaccaacccatcccctttcttgtacttgtaaaccttaattgacttgatcaaaccctcttccagtccagatgaaggagactgacaagaagggtcagaagaaggagtggtctggtgaggattactggtgtttgcagtgtcagttccagccgaaacgtcgtcgtttccaccgccacggcagcgtcggcagtactttgagatgatggtgtagtaactcaacaagatgaaggcactagccaagatgccgattacagctatgatgagaggagagaagtcagtggaagaagagtcgtggtcgtggtctgagatatcatattggtcgggaaagtcgaaaggaggtggcggtgggtagactatgtagcaccactggagggcagtagacactgcagaggccttggggagcaatctctgtatgtatcgtatggcgcaaatggatttgggttgctgccaccaacaccaacagatcccatctccacaagaaaagattattagatagatcttgtaaagattgtaattttatttgctggggatttgttgttgttgttgttcatgataatattctttctg

SEQ ID NO: 188493 - DNA, 5533 bp, Cannabis indica
tttttagtttaaattattttttatgatcatatacaatatgctatttaaaattacatgtaaatttttaaaaaaatttaagtagtttactatatcataagtaaaatttacatattttgttacaagcgcaaaaaatctttttgaaaaaaaaaaaataaccatatttttggacagattttttaatatcccatagaatttgtaatttcctcacaaataatttttacatctcttgattttcctcttccaaacatagtgttagtcactctccttttccacagtaaaatttctcccgctttaactttttaatttttatcatgaaatactgtcaatttaatctcttcttttcctcagcagctcaatttcactatcgtatatttttcacctcactcattcatttcacctttttcacctcatattatattaaattgtgtactgtgtcatatttttacactatttcaaattgatattaaattgtatgatacattttcataagtgcttcttttagttttctttggtgagaaaaaagataacacatcttctcactcttttttcttttctttttttctcctaatttgacccaaacatgagaaagaaagttcataaaagtcgtcctaagacttcctagtcaacatttgacaaagaacagtaatcaccataaaacaaaaatatatatatatattcatatacaacaataatatacagaccttttacacttaacaaaataggaaggctactgcttttaggaaaggaatgatactaacttgatgattcttcactaattatcttttcccctcttttttttttctatctgagttaaaatcatcagaaacattttacatttcacccaacaaaaataagcatattggcaagtcatacgtatttataaaaattacctatttttcttcagaagtaaaatctggctccgctggcttctgaagcagcatcggtggcattctttcgggcatccttgttttacgtgtactattacgccttatggcacgcagtgcgtttgcagcaaagcgtgaagcataaatggtggcacctaaactaggtgagctcgccccggccttggccaacgcatcctgcaacctattctcctcttccctaagagactcttcaagctttttcttactgtatcgccgccatgctgcttgaataaaacaagctgcccaagtcctccactgctgtgagtaaaacctgaaagtgtggcgaagctgcttactgtgaagcctccggaactgagacgctacaaacttcaaatcatcggcttttaatgcaaaggcttcaacttctgtcaatgcttgcacagttctagtcgagatagggagattcgatgaagaatggggatctaaagcccatgtaagaagttcttctccacagaagtcgccagccttgagatattcagaattgaaaaaaccagttcttccaccattcgtggtcacagtcagcagcctaccccgcattatgaagagcatttcatcaactgggtctccctcccgaacaatgtagctgtcctctgtgtatagtactggcttgagtcgatcacacattgcatccaatagttgttcgtccattttctcaaacatcggcaccttttatcaattcataaaagaaagtaagcaaatctagcaaaacaactagaatttgaacatcaaatcacaaactcaatcacctaagccaacaaaatcgggtttcacaacttcaacacaaccaattaaaaagagatcatttgatttgatttcctttactttccttttctttctcattctcacacaaatagtaggagtatgatctaaacagagtttcacctcttaagatatgtatatgagccgaaccaaaatattgtaaagaaaataagcatagaacagctgaggtactcactctcattagcaaagccaggcagagatggcgctttatatcccttctaagatccttaggaagattacaaattagattctcttcatcaacacctctggtttcttgccatttgtattgttcataacgtctgattcgctctctcagagtgtcagggagcaagcgatgggacatccattgttcagcgtctctccttttcactctcatctcctccaatctcgtagtggttgactgcaaatatgtctatttcaaagaaacatgaaaagtgtcaagaattagaataagggcattgtatcatattaccaaaaagaaactctacaccattcaaaattatccttgaacaaaaattcatgttaccaaacaaggtgtgtactaacctgcatatttccaataagaaatgaaaatagtactaatcctgcgatcgaaatgaagactgcaaagcaaatttcccagacataggtactagtctgaaggttctgaccaagtgaactaaagaacataaaaagtaaaaatgagtcatcgtatattgacaatcgaaacaaaataaggtgcacctaaaaaagtgacagtaaaatgcagaacagagttccaatatgtaggcaggaaaggttaaaacaaagtaatatccccatttcttgtgacaataataaagttatatcaaagtcagcaaaaaggtacaaagagcaatttatgcataaaagggatagttaaaaaataaattagcgcacctcaaatttcgaaggccccaccaaaagcagtaaaagaacttttgtggaaaatccgtagatgactcgacaacaccagatttaagagcatcaaggaatattccaaaattaaataagtcactattatcatcttgtattggacaggaagcatttaagaatatgttattcatttggaaactatcacaatataaagagtcccggttgcatgtcggaaacctctcacaggcctcttgccagcatgtagtttcccgttctatagaaaccaagtaccagaaggctccaagtacctaaaccagccaattactcaacaatcaggaacttaataatgagagaatataatacaaatcatttcataaggtttaaggtacctatgttggagataaataaagcttacaggccaaattcttaatcaccaagaatttccctttcattaatttccataacaaacatagtgcactaaaatacatacaaaaatatatcaaccgagctttttcctcagtctatagctaataatctctgcccataatcttgtgtatttttagctctcagcctcggacactatttcttttagtactagtcaaacaaaactttttttcggtgcaagttaagaactaaaattttagatgcataacaaaaccaaaggttgacatgtataaaaagtttcaaaaagaggaccagaatccaatttattttttaaaaattaataaaacaaaaaggggaagaaaatgattgtataaatacttatatattatataagtaatcggtgaaaattgacctcataagacaccactttggcaataagataacctatgtttaaagaaaaaattgagttaaaaagattgcaaaatagccttctcaacacactcaataccttaacatgtagagaaggtgcagagtgttgttaagaaggctaccagaattatttaaacaacaaaacacccaacgaaaaatgatataaacaagcaaggccgacttacatgactggcaagcatgtaaagcaagagattaaacgcagctcctgcccatgcagtttcagttagtatgccagaagttcttgtaacttctgtatacaatggatatactcgaatgatccttgggaaatattgaaaaaagacaataaatttcaacaagttctttgtattcaatgatgtcgagcccttcaattttggaatgacaatcaagatcaccacctatacacataagaagaaaattagagcaccactgataacgaaattcaatattacagcataataagttaggtggcatgaagcggggcagtgttgaaaatataagaaaggcgaaacaaaaatgctgacaatgatgcttctatcacaaactaatacacaatgaaaactttaactaaacaaatcgtgctatgtaatacagaggttatgctacctgcgggagtggaaggacagcaagaatgtcgattaagaagtatgacattagatatcttttagcaatagcacaagcatcttcaactaaaacaccccttccaaatactcgagaagacggagcaataaatccagtacggaattgaaagataatatgaattatataaaatatgtctgtgaaagaccgcaacacactagcagtgatctccagcttcctgtccaagtctaaacattttctggcatcatcaaccactggaatatagaaaaacaatggatccagagaaatggcaatgacacaggtcagcacaaatatcttattccatctctgaaggaatggcccaagtggatcaagaatcttcttctcagaaccaaagtttttagacatagcactatcaaatgaacaagacttgagtgatcttttaatccttttaagcctctcagatccagattcaaagcctctttgaaacgtgtgtgaaaccgtgtttaatgtcagtttaagtttccctggattcatttcatcatttggagaatacagaacatctttattcttctctgcattccagtcctggaacctggaaacacacccaaaaataagtcaaatctcctctatctatctaacttaagataacatgatctgaaaattcgaccgatgacaaaccaactctgcagttcacaaaattaaggtggtggtcaagtgatggttgtgtgtcattggcgaaaaccgattaaaggggagaggtattagcatcaaaatggtatattaacagcatagatgtaaggcaattttccatctatgaaaagggggttttaattcttaattcaactttcaagagaactctccaagcatctgtaacatgacaacctgatcttaaactctaatcttatcatcctctaagtgaaagaaaggttttctattttccaactgtaatatgcataaacaatatgtataaaattgaataatgaacatcacaaaaactaaggcaattatatagaaactaacctcactattttctcctgctggaaattcatggcagcagattttctctaatgcaacaatgaaattcaggtcaagcccaagtaaacttcttcattcaccacaaaagtcaacccctgaaaagattattgaacacaaaggataaacttgaatataagcaaaaccctctttctcattaattgaaacttgactctacagaacactaaagtatccaatccaagaaaaaaaatactaaatacaataatccctttataacattagaaacaacaaaaaaagttctggcttttgcccatattataaaacgtacttatagggaatttgtatggtaaaagtacttatattcgtacaaatacattacacaattgaccactaagaagaccctttccaaaaatatctacagaaaacagtccattactgtaatacccaaatgacttcataatatcccactttgtttaacaataacatatatccattcagacatgaaaaaaaaaaaaaaaaacaaaaaaaaaaccttttgtagttactcaaaaaaaacaacactttaccag

SEQ ID NO: 188494 - DNA, 2355 bp, Cannabis indica
tattattattgtaatttaaaagtaaacagcaaaaacattacataatgtaatagagtaatggtcgactttccttgaagtggttaaattatataaattactcagttcgaacatcatgtacaaccctttcaaaaaaaataaagaatatcatgtacaatgcctttcacttaagttaaaatacattatcatgtataatgtgacaagcttgtaattgtatcaactatcaactcaataaaaccattaaatgttatggcagttgtggtggcggaggaagcggagggacttgtggtggcagttgtgatggcggtggctgttgttgcggtagtggcaatggtggtggcaggggttgtgaaatgttaggtgacttcagtagaggttgtaatggagggggtggtgattgtgatataactctgcttcggaaaggaggtaaactaaaccctcttggagagttagggagtggcggaggcggtggagatcggcgacgccgcaacgaagacagcaatggttgttgttcggcaattgcttctggaagcaaacttagagaaacaatgggaactagtaccaataacactgcaagatgagtaataataaaggaaaaatcataatctgccatgaacgttcttttagcttttagcattttctttctttagattaacaatgagtttaatgcctctcctcttatccatatgttgcatccttgttttaaatgttattaaattataggtagttatctagccaggagccagccatgcaaatgaatcattttatttttttgtttctttttccctttttttcctttattattacttataaatgcagtctgcaatttcttctacgaaaattcaataacacaacttgacgataattgagctggtcccttttaattcctcctgaggaagtaggtcatagacttctatcgtattaaatcccataccgttagaaatcgaattaaacaacgccacgttcactctagcgcttaggtatgcataatttacagtcactccaggccaccgtagctgtcacagagcatagactaataaaaccatgtcacgaattgaaacgaatattatttatttttttgaagttggaatttttcaccatttaattgccataaaggatcatagtcccactgatctaataacagagataatctcatccaattccaaatatgataaattagtccaatgacagttaagctatataaccaacaatggtagacagattcagtaacaataatacaaaccgaatcggtaacaccaccaaatacgaattaggtcacgggaaagatcatacaaaataacacaagctgagattctagaaagactgggtgaaaaatgccattattacaaagatcagcccaaacagaaattaaaaaactaaaccacaaaaagccccaaacagctatcgacacaaaactttgatatgagcctttaccaatcccaaacagaaagtaaagataatattgttttttaatatatctggtttgatatgagcctttacaaaaaatcaaataataaaaatgcccttttgtaaaacaagagtgtaagtacatattttattatttataaacataatttacagaacatcaaacataataattcagatgcaatcagtagggacaagtatcatcaagagtacagtatcagacgaagagttgagcaaaagtgaaagataattcaaaactcagacactattaaataaacatgatatggacaagaaagagttacataaggatcaaattggagtttctccctaaccattaattgcattttgagactttgtccaatgtatcgaaaacgttttgtagagttacttcttccacaattacgaccttgtctcttgatttagatccagcaccaatggaaacctgccttcttcttacccctaaaacctgtaaatttagaataacttgtgtgaatgaattcttttgtctaagaggctatgacaaagttgtgatccttgaaactttagctattaatcaaatgccaattacttagagaaaataatatatgttccactgaatctaattctcatacctctatgttacaaagtcgaataaatatataaataaataataatgatattaagaaaaaagaagaaggaagttatagatcactccatgacaactctgatcttataaggcagccattacggccatttctaaactgcaaagaaaaattccagtccaatttgaaagatcaaagcctagtgcaaaccccattatatgattcactctaattgattcaaaattaccaaaattcccagttagattttattttacttaactaaaaaacaaaactttccaacttttttataagattgaaacacctgtattcctaacaaattgaaatcaaaaca

SEQ ID NO: 188495 - DNA, 2182 bp, Cannabis indica
aaaaaaatactatctttgacttctgttgaggactctttcactgtgataatttcttaccaaaaagtaagcatctaacaatgatttttgcaggaggtttggtagtcttcagacatatgtacatataattttctctttcttaggcttccttccaagccgactcatccaattacttggagatgagtcgaagaattccaaatattctaaaactatgtcatatcaaagtcttcaagcattgtgtaccctagaatcttagactttaaaaatgaattatattgctcctgctttttttattacaatcattctagcaattatatcataaatttaacaacataacaaagacactaacaagttttgacttaacgacggaccacagactgaaggtataaaagtaaagttcatgcattagaaacaacttcatgcttattagaattatatgaacaatgcgattattacccgcagcctagagtctgtaacatccacgtggtagtccaagtcatcctgtacaacagcgtagttacattattatacgtagagcacagaacattttgaaaaataaacaatcaaggagaactcaagagacaaaaactaaaccatacaataagtctagtgtgtagatctagttcttcattaactgccagtgcaatatgttttgtgcttataacagtctcctccaacttctcaaggccttcatcttgctctgtttcaaagttacgaactagaattaatgatctttcatttaaaaaaatcataaagaaataatacaaaaagaaaaatattgtttcaaataattaaagtggaatgcctttcatgacttgtcgttggaaaccgacaaggccattattgtccaagccagctgccttgcccatggcatcagcaggctttatttctggaccaagtaagctgtctctattagcaaagtttgacatgttcaatgttgaagccatttgggacaattttgacctaagatttccaagcatgtctttgcggcgattcatctctttatctgatctgtgaacaggcaataaacaacgtaaacaagtttcaaaccaacacccagacttctatatttaaaatgaagactttcctaatatcaccatatttaatcaagtaaacatttatataaatcaagtttggtacttctttaaccacttcatggaatcttcccagttccagctcatcgcatagaaaatagtagaatcaactttaatcagaaagcataatcattttcttttatctaaacaaacatcaattctacagtgggaacatttgacactgttaagttttatgatgacatcaggtttccctttgataagttgctcaaattcaatgaagttaacttacataggctgcttcccaggaagctttgatagaacagactgtaagctatcaagtctagtgcctaagattgtaatctttctccttatagcagaggcatgacgctgcatttctgggcctgatccaggcagtgaacttcgttccgatatcatcccattgatatcatcggcaagcttcactgcttcattatattctttcatccatgaatccgaagaagatgccatcaaacctaaaatataattttatttactataatcagcagacaaacataaagaggaactctaaaaactcaggagttcataaggaattgaaagacttcacaaaaaaaataagaatattaagcatgttcacattaaatgctggaatatatggcattttcgtattggaattattcattgagaaaactgatcaagaaaaaccaaaccaaaccaaatcacaacaaaaacctattcattcagatagaccattattagaaattccaattgaaattgctttactaaacaaatatatagacaaatttaccacattcacccaccaattcaaatacccataatctaacccatactaaattcatcttataccaagcaatatgaaaaaaaaaaaaaattgtgcacaaaaccaagaaaagaaactgatcaacagatgggcaaagtaggctaacaatactataagcaataaacaaaatcgaattagctagaataaaaggtttgtaaaagaagtcgtaaatagaattacctgatttaggctaaaattgaagctcgatcggataatgggtttacaacaacaaaaatttatatacgagtcgatctgaaatcaacataaagaacaaaaaaacaaacaaaactag

SEQ ID NO: 188496 - DNA, 1528 bp, Cannabis indica
tttttgtaattttgaaattttaagataatatatttgaaaacttaagacaatacaaatgtaaaaataaaaaataaaaaatatgacagtaaaaatgtaaaaaataacaaaaaggtatgtattttggtaagaagatcatgacattaagtgtactaatgcttattatttatgttgaatttgtgttttatcactatgagaaacaataaattgtgcctatttaatcttttctttataattttagtgaaattcagtctaaataatagttaaaaaagattgaatggatccggtccaatgtaatagataactaatttcaatggttagaattgatccgatccaatgcatttattagatcggatcagattgattgagtcaattgatcagattgattgagtcaattgattagattggatcggttgataaaatctaacatctaatagataattgaattagatcttttagattaggtcgaaatgtattggatgagataacacccctagcagcaatagtaattgtaagctgagcgttttattgtgtttggtgacatattgcttatgtgttgagtcatccaatttggcttttgaaacattacatccttattatcaacattgtttgaatttctaaaattttgttatttttgtgttattatttgtgcaactctattctaaattctaataaattcataaatttattaactttaggatataattttttttttcttttaaatgtaccctttgtggagagttagaatatttcaaaactagtgctagtattttgatttttgagcatcatcttttgcgacaccaaaattagcaccgatttgtgttgtggcagtagcaaggaaggaagctgcaataagactgcactttgtttttgagcaaataatatttaagaaataatgcacactcttgagttgccaaaatcatgcactaattcatgttattaatattaagagtaatttgcggcataaatacttaaatttaactcttaattgtaaataaatacttaaatttaatttttgatagtaaaaatatccaagttatatttctggtttccataggtacctaatcattaagttttaagttaacaattcccgattggttcatatcattgaatttttatattttaatttaaaaactaattcaaatataccaataagaaaatgacacgtggataataacttgacatgtaacagacaattacgtaacttaggtattattaccgtcaaacattaaacttaagtatttatctgcaaccgagttttaacttaagtattaacccgtaaattacttttaatcttaattgtatatatgtggcaccttacaagtagtcaacatatttttctaatatttattaaattaaaatatgtgagataccatatcaaattataataaaattattaaataacactcttagatggagctcgatattattattgtaaaacaatagcaccatgtaaggtcggccttgaaattaggtgggtcttaagataaagattattagatcatttatattaaaaaaatgtaaatttttg

SEQ ID NO: 188497 - DNA, 4376 bp, Cannabis indica
ttaagttttatttttaacaaaaaaatcagacatagcattattagtttgtatcatacttaaaaaatacaagatataaatttagacaaaaataattaactttagagaaaagagagataattacataattacatttatttttgttaatttttattattttacgtttcgagttttttttttttttgacggtgttttataaaaacaacaccaaaacaatacataaaagtaacagaaaaataacatcaaaacaacaacaaaatataacatacaaataacaataaattaacaagagtaaaatataaaaaaatactttaaaagactatattttctataaataaaattataaaaatatttaaaattctgtacaaccattttttttaaattctttttttgttatttatgtgtatttttgaaataatctccccaaaacaacaacaacttgagcttgactggttggtaggcactaggcatggaagtccaccagctaattttttcagtactataaataaacttgagaaaaaaaaatgtacactaaatcaaattagaaacaacaaaaattagtaatgggttaccaatttagcctcattttttttatgtgggcatctttgttagtactatgcctatcttttcatgataccaaacaaagtgatgatcatgatcttggtaactattccatattagactcattggatgagatgagagttgttgagttgtttcaaaattggaaagagaaacacaagagagtttaccggttaccggaggaggctgagatgaggtttgagaatttcaagagaaatgtcaagtatatattggagagtagtaagtcaagaaaaggtcaccagttggggttgaaccggtttgcagatttaagcaatgaagagtttaggaaactatacttgtctaatgttacaaagcctttggatggaaagaggaggagaaataatcctatgaggacaagattggattcttgtgatgcaccttcgagtttggattggaggaaaagaggtgttgttactgctgtaaaagatcaaggtgactgtggtaagtaagctttaactctattatcccaaatgttttttttaactatagtaaactctttaaaggagtgtttttatttcttcatgattgagtacaaggtagattttttagtagtggtaaaaaaattgcgaatagtttctagtggcaaaattaaagtttgatatttcgttgtatatgtgactttttctcttataataaataggaatttttatactacacattgaaatttttaacttgtatttttactgttgttttatattgttctattttattgtttaacaattattttataagaagatagtatttttgtaaaaaaatcatgtgacagtaaaattgtaagtttttactcaaaatctaatatttttataaaaatccttaaaataattgttttaattttatttcaacacaataaactatatatagtttttttgaaaatatatacatgatttaaaaaattacagcatatacaattataaaagaaaaaataaactaaaaaattatcataaatgccaaaataaataaagtatgtgttgaacgtccttttagtgggtgaggaaagtaagctctaactctactatcccataaaataatgaggtgggattttggtatatttcttatttattttggtatcgagaattgttttttttttttttccaggatcgtttatgttgtgattgtttaggattaccggtaaattttcaaaaaaatttcaataatctacaatgacgaaaaaataaaattaaaatattttgttgtacgtgtaataagaaattatttggacttttatttcggctttataaacaacaatttaccgcaatgattaaaaaataaattagattaaaacactatcttcgagctgaaacagataaaaaaatataccgaaataacccttttagagggtgtactacaaatttgtccaaacataattagttagagctttttgagataaactaattaaggtaaaatttgtaggcagttgttgggcattctcttctacaggagcaatggaaggagtaaatgccatagtgacaggagacctcataagcctttcagaacaagaattagtggactgtgattccaccaattatggatgtgatggtggctatatggactatgcttttgaatgggttataaacaatgctggaattgactctgaatctgactattcttataccggtcaagatggtacatgtaacaaagcaaaggtaacatttttgttaccaaatccatatccatagctaaaagtttgtatgtataacacacactaatattaatgtcttttctttttcattaggaggaaaggaaagttgttacaattgatgggtatgaagatgtgggagaatctgatagggatcttttgtgtgctactattcatcaacccattagtgttggtattgatggatcagcattggattttcaactctacactggagtgagttcattttcaatttcaagattgattaataatgaatagtttctagttgtagaaagggtaaattttgcaaaattatcgatatacttttctatttgagttttataaaaagaaccacaatgatactttgagcctgattttggtcaaactacttttattccaactctaaaaattcatctttctaaccctaaaattttttattccctaactctaacaattgcggttcaatttctattttatttctaatccgaaaagattttgtgtaaaattaaactcatggtatcattatattcatttttgacaaaatatagagtccaaatttttatttaacaaaattaaagggttgatcaataatttttgtaaaacacagtgtctaaaatagtatttatttttctaaaaattaaagactgatgtgtaaatacttgaacagggaatctacgatggagattgctcggacaaccctaatgatattgatcatgctgttttgatagttggatacggctctgaaggcgatgaagactattggattgtgaagaattcatggggtactagttggggaatacaaggctacttttacataaaaaggaacactaatttaccctacggagtatgtgcaattaatgctatggcgtcttatcctactaaagaatcttccacgccgtctccttatccatcaccgtctagtcccccaccccaatcaccaattctaccaccaccaccgcctccccctccttcgccaaccaaatgtggagacttctcctattgcccaagtgatgaaacatgttgttgcttatacgagttctatggtatttgcctaatttatggttgttgtgagtatgagaatgcagtttgttgcattggaactgagtattgttgccctaatgattacccaatttgtgatattgaagaagggctttgtctcaaggtaggccattttctttgattgattattgtgttgtgttatcataattttagctaactttttttttctattgaatacaatgttgttttatagaaccaaggggatatcatgggagtagctacaaagaagaaaaaaatggccaagcacaagtttccatgggctaaaacagagaagatttctcaacctcttgagttgaagaggaacccttttgccacaatgcgttgagagaatgaatgatcacaattatattttgtttattattcaagtttaaagatgtgagttttttctttgtattactattcatgtttgatgtttacataggtagaactatgttgtaagagcaaaaactaaaaattgaaagaatgtgaaggttgaatgtttcacatttgtttcatttgtctttataattttatgaagggtgtgattattggtgtacatttttttgcataatttatatatgtaagattttgcaaattgatgctctttatatagcaaaggttgatataagatgatatgaattttgactaaatgaatgcaatgaaaaaagtagatggtagaaatataatggagaattatttttttacagctaaaagtttacaaaaatatgattttttttttctaaaaaaaatgtatattatgttatgagaaaaataaaaaaaaattaaaaaaccaatataaagtaagctgttaccctaaattattacttttttctttaaaatttttgaccttttttttgttcaatttttcctaccaaattattttttttttaaaaaaacattattgcacacattgaataaaaattcataaaatgtgtaattttcactttattttatcgtaaaatttacaaagtcttgtattttgctaggcttagttgtactctaacaatttacaatttgctactagacttagtagaattttgggtaaggcggagagttgcgctatctatggtgaaaatgttgatacctttgttcatctcttctgcctttg

SEQ ID NO: 188498 - DNA, 6345 bp, Cannabis indica
taaattgtttctcaaaaataagttgagattttattctataaagaacagttaatagtgcaaaagttgtcacttgcatccaggttcttcaatgctcatattttcttctcaagtctttccttgatgttctcacttaagaattttcatcattattaaaagagaccttgattaatcaaccatgcaagaagttctgctaaatagggtcaataagttgagaactagtggatgataacagagtaggtagaaaaatatgaaaccagaaaattggcaggctaagtcatgtaacaaatatttatgctaagtaacatgtgaaaattcataaaagaaaataaaaattggtccctttttttttaaaaaaaaaataaaaaaattggtgctaagtgttgatagataaaagggcataacaggaagagttattacttttaatgagaactattggtgaaacactttaattacggatgagatactacacaacaagttggtcacaaaatgataaaaagataaaattagtgcaattggttggggaggttgtatgtagagtagattaatagttagctcgtataaaagaaatattgatagaactcacaacatacgactcgaggttcagaagagttttttttctaaaactagctctcattttatcattgctcgctattcttcttttcttacgcagaagtacgcatcccatctcatcacttctatcttatacacaaacatttcatcttatcactttcctcttacacacaactatctcaagtttttttaattaatcgcccttatgcccatttcgtaatcttttataaatactaggctgcttatataacaaattgttaacaaaaaaacaagttgcatatttaacaagctgctacaaaaaataggttagcatgtttagcaagttgatacacaaaaaataagcttctctaatcatcaaattgctcacattacttttaaatacatcgtcaactttcacagtttattaagcttgttcataaaaaaattgaaaaaaaaagagaaaatcacgtaccataaaaggataatcaatatcctattttttcatattttttaattttttttgaaaaaatttcacataaattaaacttcttttcagaaaaaagctatattttaacaaatttatactttaaaaaccattcaaataaaatttttctattaaaattaatacagaataatgtttttttttttaaaaaaatatcaatttatttatttatcttactaataatataatattggttttgtaagtaaagaaaaaattaaaatagaaatcatttaatgaaaacgacagctcgttttttgaagtaataatttcaattctttgttaaagagaaattagaaattgaagaaaatggagaagagcttcactctggttcagacggttctcaccgccggtgtcttctccgccgtttcttgttggtactaaatcttctctctaaccaatttggctattagattagggtatatcacactataacctcgatctttctcaggtatggattcatgttcggaagagaatcagctcggaaagagctcggcgatgtgattgaaagtcttcgccgtggagacccagacccaactcctcctccgccacattcttgattccatcgtaagaacgaaccaactctctcgcttcatcttttttttccctttcattgattcagaattgtactagtttttttttgctgttcaatgagtttgaattttagtttctaaaatttgtatattagggattttgaatgagtttgaagtgtgagtaagagagaggtgtttgaatttagttattctttgcactgcatgttttaatttgggttctgagttttcatcatttggaaagttactaattgtatttgttcaattttcaaattcacattcaaattataagaagaaccattgtaatgggcttttgaagttcgctttccacttaatgagaatgatgcctatgtttgtatctaacaacagctccttaacgagtaattttctactcgtttaaactaaagttatggaacatagatttccattgatgtagttggacccttttaaaaaggtcttatttggctatttaggtttgattccaattccacaatttgatctgtatgaattatttcagttgattcaacagctaaatttccttgccaccaagagagaatgctgcactttttcatgtctgctccatccttatttttgtttgtatatgtatattaccattttgcaatgaaaacaggtgttgggttcttattgtctttgcactatataatgttaatggctgtttatgtacttgagaaattgttaaaatatacacggttgttgctgaaggctattcttgtttgccctccaaattcttctttttgtatcaattaaggattttcctccccttaagattatggcatactcaggtgcttggatttgagactgcagacttcatatggggttaaaacatctttcattctatatttatgagtttcagttaagtggaagtagcttcagatctttgttgagaacatcccatggccaatactaagtggtatcttcttgttttcttacaccatgcttgctggtggatgatgtgcttctgtactttttatgctcttcccttgttgattccaatttgaagataaacatctttaatcaagagcttttttttcttcttttttgtattactattacataaatatgagcaaaaaagttacaaacaagatatgtgcatcctcaatatctctataaatatataaacttaggcagacttttcttgaaactttatttgctttttcacatatatgtattgttcatggtctatgctctctcatccattttgtacactgcccactaatatacttagattaggtgatcgtatcattcaaataaaatcaggttaaactttataaaactgtcttattctagaaaatcatctattagatgatcatattcatatggaagggaaacatttcatctttcattctgttcactagttgtttaaacaaatgacatgtatataagataatattagatactgattcttgaaggatgttaacttcacatgagagacaagacattgatgaactgtggggaaaatgcaaaatgtgatgttatgttagacttatgaggaatgaccttaaatagataaaagttgatggggaatatttgttgttggcctgattaaatagagaataaaataagaacttataatggataaaacaagttcccaattcagtctgaccttgagaatattcaatcaaatgaaaaataaatagattttgaccagataaaatgtaatttattacagtagcattgcttctaggaaactaaggaaagaaatttcctgagctattggtttggaatttcaaatgaacacaagctgtccattactaaaagaaagatataaatacaaatttccaatttctgctctgtatctcatacaccagtagtatttctgttctgtgtttcatactgctttattctctattatataaagtacactaaactatgctctctgttatacatgaacaaacacatgtacataatctacacaagagcagcctcctttgctttgttgatattgttggctttgactaatccgacataaagctcacttccactaaagtcaaactcctcgcaaattcttttgttccgaccaccttcagtcatggttctcacaaattccaccaagttcctccagttctctggttcaaataatctcttgttcattcttagatatgtaaatgcacataacgcattacctgaatcggacctgcttgtgtccaaaacttgtccaaatgcactgggatcgtacctctccaatgcattctcaccagcaagctcaactctagctaatttagtagccatttttacttgtcgtactaagccttctggtgagcaatttgcatgttcgggttgttctccgtctttcatttccatgcaggtgaagttaaacacagcatcatgtctaccaaacatctgtgctattggaaggtaaccatcttgatgtctggtgttgtagtatcccgcagtcaattcagctgcatgagatcttgtattgtaatgccagtggattcctgctattttcccagatagtttcgttccagttccacggaatactccttgtgcagctgccaggatatcatcaccatgaaccaacagctttttagagtaccattcaaggagaactgaccgtaatcggtattccaagttccatctctcctgaaaaactcagattcttctggaaattggctgtacttggcagaatcatgaggtccactttttccccagtctttcttcccaatagccaatgctgatgattgcaatgaagctctcatatactgcatgacatgaagaagaaagaaaatgtttaggattgaacataaatgcatctaagactatttggttatgacattatgataaaggaaagggctcaataccttgtcatagcattggaattctcctattccaggaaacctccaagttccatctatttctggataagatgggtatctgagctccccacatggacccattcctacttgaacttcctgtaaaatataaataaattccaagattaggttcatgaagcttaggagaaataatttctttgttttttatggggtttagaaatgaattgaccatcattactccttatgacttgacctgggtaattagtaatttatttggaaagattttcctcatatcctttaacctgttttgtttttattttgtctcctagctatgtttgattgtgagcctcaaaagtgttttctccactactataaatctaatcttatagcttgataaggaagttttttctgtttttgggttgcccataaatggtttgaaaattcctctttagatttttatattgttgaaaatatctctttagatttaatcaaacagaagagctgttgggatgggttgagaaagttcttaccacaacaacatcgcccaaatatttactgaatctgtcgcggaaactcctcatgaaatctgagtagacttgaattggggttcttcctctgagaataggcactgcatcacagcctaaagagatgtactctgggtttctccttcctgacctgtctgtgtaaacaatatctgggttcttgctgatctcttcaagcacccatggaggtagaggaatactgaaaaatcacaacaccaaaatccataactatgactaaatgcttaaccaaaacaactctgttttgttttctattaacactagactaaaagtacccatataacccttttgcttgtttgatcttaattggctgttgtctaatcaaaattgattgaaaattaagaataccctttaaggtaaatgtactgaaaatgtgatattatacctgcaagagtctccaacattgcctccacactgatgaaaagacataacaacttgaagcttcaaaccaagcttttgagccatctgaacaagctcagcatatccttcccaattgtacttaagaggtccttctttctcaaccaaaccccaccaagcatcaaccatgattccttcaactcctgcactcttcatggccatgagactcgcattcatggctcttggcttgttcaagtgccctccatggcccactgtgtccaatggaagcattacaaaaaccggaacacttgtgtcgtttttcgtagcatgaggtgatgaagaagtaaatgcatggtggtgcttctctactcttttctcacttgtgaagacagtctcatgagagatttgatgagcagcttgaatcgaattactctttgctctaacacgacaccccggcttcatttgcgccgagcctgaaaacaactcgtctgttgttttcaagccaatagtgtccttaagattaagaaaagaagttgaggaacgtaatgttaaagccataattgtttttcttttttacttctcttctcttctctagtttgatgagaagaaaagagaagtgggattggattggtgaaggtgtttgtatggtttatttagtaaggggaatttaaaaaagttcatcttgtggtactttgaaggagaagacattggtggggtctagctatgaaaaagaaagaagagaaaaagtgcatacaatcaaagagtaattagctcacattttcattatcaatgtccttgtttcatttccacgcgtttagtccattttacccttctttcttcttgttataaacttcaaatttaaatgcacggtttagtttgttctcctcaattttttgttttatatgttatttacctctattcatttgaagaaaaactattattttttttcagatcttttatgtttttttttttttgcattggaagtttattggaaaagtgaaatatatttttgcatttcttatgtcggtattctt

SEQ ID NO: 188499 - DNA, 5777 bp, Cannabis indica
ctctctctctctctcttaaaaccataacctttgaactcactctgtatttctataagggagcagcaaagttgggtttgtcagattggcgtgcttttacattatataaagagagaaagagagagacaggtctttgttctcaactgggttgcctttactttctgcttaagagctttaactaccaccaaaagagaaccttttctttgtaattaaaaagaaaaacaatattaagggtacaaattaaaattaaaattaatttatgggatttgtgttttgagggaaattatgaggatatatagaaaaagttggtgttggtgatggtgggggcgttggtgctgattcaaagggtcaggggtagagagagagaaagagagaatgagagagtgggaacagtcttaagagcttggctttttgcgttgagttgtaggtgtggtggtggctgtcaaagatgagaaacagctcatctttttgaatggggtgtattttgttcttcttttcatttttcagtctttgcttctgctcttgtggggtttctctgaggatttagtgttcgtgcagtgaacattgtgtttgtttgtcgtgctccccagatgttagattcttggtacttgacacaactgatattggagaagaactctcatgtctgatcaccattattgccaccttcatatttcttaggtgggctctgtactctgcttcttctactactcctcctttttctctgagttcaactgtttttgtttaggccctgttcatattttgttaaccccttgtccttttgacatttcatgccaccgatttgtttgtaaaaatcaactcatttctcttcttttgcaccatttctgaggtgggattttaattattattattattactatttttgcttgtgtaaatgtgtagcctttcttctattgtgaaagatgaagcaattttcactgatgtttttgttacgttagatttattacatctgtttcaataatacgacacaaaagagatgttttcgggttttgttttcaagctgaggatgtgtttaatgctcatttagctgatttttaactcttgaaagtaaatgttggacagaatgcagaatttagtttctccattaatctcttgttttacattctgagtttgttaagtgaaaacaaaattcttttgggtacttggtattatgtttgtttgcataaccttccttatggaaatccacccaatatggatgctttttgtctagagatttggtcttaatctcagctaataccgagatatgctgtcttctaatgcagggtgttttggcttgcacactgagacaggatagccagccaggtataaaaagagattatagcattaaaggaatgagggttatgtgggttttgggctgtgaaactttgtgaaggggaaaaggtccttgttttggtgtttgatttcgttggcaaaaccaagcaaaagtaactctactataaacaattagtaaagggtcggttgtgtcagtttgagcaagtgggggtgtctctgatattgagttttatatacaaatacaagtctctttggttagtcatttggcacttggcagtgtctcctaagctaagctgatctctcttgcccggactccttgggctttgttaccagctggggaagcatcctcttattttggtctcttctctttcaagtgaagatttcattaaaaaaatccttataccattttctctctttccttggtctgtgggaaagattcggtcatactaagagaaacaaatacagatacagagtttttaggatccatttttatttctatcttaatctccacaactattcaacccttcaatacctttgagagtcttcttgcattaattttagttggtgttgtggttaacttataaactgtttgaggctctttagaagttgatattcaacctctttaggaagtcagagaatcagatcttttccttgccaaaaatgaagtttatgaaacttggatctaagcctgattcttttcagactgatggagacaatattaggtatgtgatccttcttgaaattgtttttccctttttttttttttgcttcttctagaaaaatatgtaatttctgggttgcgatactaaactcatttttgcctttgttttgaaaataagtatagtaaaaaaaaaattggactgttgacatattaattctctcttgattgttcaagtcttgtagctttacaagaaaaaaaagataaattgatttaatctttgtatttgttttatttctaatttgaagaactatgattgtatctattgacatttcatccaacacatttacaaaatggaatggtggggtccaactaaattgtgtagtgtaatatcttatttatttgaggcttgaagattactcataggattccctttccattaaattacatttctcaaggttgcttacttttagttttctaattcttactctttaacatgacccaactactttgtggatccaggtatgtggcaacagagctggcaactgacatagtcattaatgttggaagtgttaagttctatctacacaaggtatgaaacccatttggttttgagaaataagctcactataaagtgtaggccttttaatttaatctttgcaataactgggttcacagccatgtttttatgtaattatgcaaacaaagtccagattaatgtaatagttagaaatcttcactcttaaacttgcatgagaactgaactggtttattcttatatattcaattctgtgtacaagtattatctctcaatggacctacttaggataagatagctattgttttgggtttttaaaacaattgtattttaaagcaacatcttatggttgaatgcttcttcaaaatatccatgaaaccatttttgaattgtttttccactactactctattactttaccaaatcatatatgctcttagaagtatacatagaaaacctgctttaatttgtttgtgtgttgtgatatcaatgaaaagagttttaggatagtatgtgacgtaatttgattagtgagctctcctgtattcttatatcctgtgatttctgtagtttcccctgttgtcgaagagttcccgcttgcagaaactggtttcaaacacaaatgaagaaaacagtgatgagattaacattcatgatattccgggcggtcctgctgcttttgaaatctgcacaaaattctgctatggtatgacagtaacactaaatgcctataatgtggttgcagctcgatgtgcagcagagtaccttgagatgtacgaaactgttgagaaaggaaatctcatatacaagattgaagtatttctcaactccagcatatttagaagctggaaagactccattattgttcttcagactacaaagtctcttttcccgtggtctgaggaacttaaagttatcagccattgtcttgattctgttgcttcaaaggcctgcattgaaacttccagggtggagtggtcttatacctataacagaaagaagctcccatctgagattgaccctctatggaatggtgctagaaaacaaccgacggttccaagggactggtgggtagaagatctttgtgagcttcaacttgatttgtacaagcgggtcataacgacaattaagtcaaaaggaaagatatctaatgacataattggagaagcattacatgcttatgctctaagaagacttcccggttttagcaagggtgtgattcaaggtggtgatgtcttgaagtgccgattagcagtggagaccataataaggctgttgcccacagagaaaggcagtgtcccctgcagttttttgctcaagttattaagggcaaccatttcattagaatgtggggaagctgaaagacatgatctcatgagaagaatcagccagcatcttgaagaggctacagtggcggatcttttaattcgatcaccatctgatgagacaaccatttacgatgttgatatagtgcaaagcctggttgaagatttttcgactcgtgatcatactgctgtgattgatcctcttatagaaaatgagtttttggagattagaagcccaagatatagctcagaagcttccaaggtttcagtagcgaaacttattgatggttatcttgctgaaattgctcgcgatcctaacttacctctgtcaaagtttgtaagtcttgctgaaatggtctccagcttctccagaccatctcatgatggaatctatcgtgccattgacatgtttctcaaggttagctagctcctgaatattgttaggctcaagctttcattacaattaatgttgtactcgggccattgaaaacctcctaccctttttctttgccacgagaagtcgagtaattgttgttttattccttgaatgcaggaacaccctgggatcagcaagagcgagcgaaagagaatatgcaaattgatggactgcaggaagttatcagctgaggcctgcatgcacgcagtacaaaatgagcggctgccacttagaagcgttgttcaagtccttttctttgagcaggttcgagccactacaacagccggaaacagaacgccagacttaccaggatccatccgagccttactccctcctagtggatcccatggaagctccaggtcaactaccactaacacagaagaggactgggatactgtgccaacggccgaggatatcaaagccataaaaggggaacttgctactctaaggctaggaactggggatcatggtgaaattggaagtaagaggagtggttgtgatgggaccaaaatcattgttgcagatagatctgcatcaaataagaaaggcttgatcatgtcaaagaaactcttctctaaactttggtcaagcaaagaccgtagtggctctggcgatatcagtagctcggaaacttctgagagcccgggttctacaaatgcagaggagactaaatctagtactccctctgccagaagcgggaggcattcagtatcataataataggttatcttagagggcaaggcaacttgtgtgttgggaatattttgaagtgttaacccttgacaaatagaagggctgctgagcctagtctggcattgaagaagaaagatgagccagtgtaaaatcatctcattcaaattgactttaggggattattttagattgtgctgacaagtttagttgattttgggggtaagaaagaaggttatgtctattgttagagaaagaagtgcccaagaaacagaagaatgtatctttatatatatgatatataaatatttataagaaaaggccagcctgtgattgagctttgtaatgccccaaagaaaaaaaaagattggtctttttttcagttttagaatggattttgtgataatgagccagttttgctgtatcataatcaaaaagggaatgccaattttctttttgtgcgtatcaattcttattttccaacttttcccgtcaaagttgaaacatctaagaacactcgtagggtaccatagttttttctaaattctctctatgaatacatctgttcacagtgtatatattattagaatttttcttctttgtaaatttaaattttacaaaaaccaagtttaaattttcaatatttccgtaaattttccaatgaactttgaacaaattttcacgataaattatggaaaatgatccaaaaatataatacagataaatgtcattattttaaattttttagttaaggagccctttacaatatttattgtttaaactagtaaatttttcgcgtttcgcggcggatgtattaagtattttaaattatacataaaaagt

SEQ ID NO: 188500 - DNA, 2649 bp, Cannabis indica
ggcttacggttaaattatatggattaaaaaagaataaaatattgggcaaaaatacactaatggccggccataaaagggaccaatctctagttacaattttgccactttttttcaaccacttattcttctttcaataatactatattttcctattcaatcatataactgccaaaactatttatttaataattataattaattatcaagtaaaattaccatttatattatttattaattaggccatacaaagtctcttaattaatatattgaccccaaaatctcttttcttcacaattaattccctgcttagtgaaaattcataaataagatatagtctaaatttagaattataattgattaattaaaattaattaactgagtctgcaagcagtattatcacaactagtgaggggaccatggccctatataaccgagctttcaataagtagatctagattccaccaaataaattccctaatttattaattctgccttacgccactatagatttggaattgaatagcactctcaattatatagaatgctctatatgtaccacgacatagatacgttatgattatccattgttacaatcctaatagtcaaagatcctctatagatgatctacatcgaaaatgacaaatttatcattctacccttcaatgtattttatcctttaaacacttagctacctataaatgaaaattcagtaaactaatataattactgaaatgaaatctcaatcatttatctctatcatgttccccaagatgtaaatatccgccagaaccatttgttggcttccacgtacaacttgaagaacataaataatacaactaagctgaacctaagcatatcaggattcagatccataaacctaagatcaaccattgatattgacttagaaagatataatggtaagtttatgatatcttatccaagatcaatatctgtcccttccaatgtatactccatacatccaatactggtaaactttgccaataccctggaaaggacgtaacacttatccaagttgtaagtatactttatcggcgattatcatgtcagtctaaatctagtgaactgacaaatcatgggaattgaacttttgaacatataatcatgattatattctattgtgctgacgacactataattatgaacaaatatatatttatatatgttcttgacttaatagaatttatacaataaatataatcatgaaataaatcatgtgaaccatgcaacatagaatgatttatgatcttttataaattactaaatctaattatattaaaataggttttatttaggggtatctctaggtgcagaacgtgttggtgctggtaaaattgtggcaaaagatgtaggttcaagtgtatttgttatagtaagtgatggagttatctaatgtattgggggtgctaggggttgataataggttcatttatttgaacatgtgggattggggcctgattagtggtgacatgtgatggtggggatggaataggaaagacaattggttgtatcaatggagatgttggtgagacaggaactggtttgggaaacagtgtgtcataggggaaagtagcttcattaaacttaattgttattgctatataaatttagcctgaaggatgcatatatttttaccccttatgactgaggctatatctaagaaatagaaaatgagctattctaaaagaaagtttattttgttgataaggtcgtactaagggataacatgaacaaccaaatgtcctaaggaaagagtagtcaggttgttgatgaaagagtacctcaaacagatttttgaattacaacactggtgtgggaagacgactgattgtgtaagcaatagttgtaaaggcatcccaccagtgtgatagaggcatgtttgccagtgcaagaaatgagaggcccatgtcaacaacatgtcgatacttcctttctactcgaccctactactgatgagtgtggggataagggtgtcgaaaattaattcccaaaggttcaagtatggactataatggcctgtattcaccaccccaatctggttgtactacttttatttttgtattaaactgtaattcaacataagctttaaactttcagaaaatgccaacaactttagacttgactttcatagggtagtaaccatgttaatttcaaaaaaaatacatcaataaaactaacataatatctgaaaccttccattaaactgtaaaatagagggtccccgactacatctatatgaactaagtcaaagcaagaagtagttttaggttacagaactactaaaatgcatgttgtgtagcttgtcatactgacatgcttgacaaaaaggaaagtgagttacatttagttttagaattgacactacagagaatatgtttcaagatccttggggaaggcatggccaactcgatggtgccaaatttgagcttcagagaaggttccagcatggttattcttggtacagttgaaagcagcaggtatgtgaggtactcctttatttgtaagtggttgaatttactctagcatgtgaaagattcaaatggtataagtcgtgtttaagatggccccgaagaagtacttggcctgtagtcttgtcctcagagatagactcactcatatttatagcccccc

SEQ ID NO: 188501 - DNA, 3444 bp, Cannabis indica
taaaataatatttactaagttaatttcaaaatttaagattattttaaccgtattttctatttatttgaaagaacacttttattattttttattaaaaaaaagatggagcgtaatgcacacgcagcaagagggcgtgaagaatttaacaagaaaaagtccccaccaaaacatttcttaccaaaccaaagaaagtaacagagtctcatctcatctaatctcatcaaaagtctctccttcctccatttctatctctcttcttcttcttcctcagctttctctctctcctgtactagacagaagaagcacaaggcagaagacttgagcaacaaattaataaaaataaaataaaaaataccatacaatccatcaatggaaatctcaccaagacatcagttaaacccaagcccatcttatcctgctcttccttcaccaaatagccatagcaccaccagtaccactagttcatgcaacagcaacggtgtccaagcttctccctcagccgcaaacactgcagcgccgccgcttgctcccaaacccatcaccagatccgaatccactaacccgtacccgaccactttcgtccaagctgacacctcctccttcaagcaagtagtccaaatgctaaccggctctaccgaaaccgccaagcaagcctcttcttcttcggccaaaccggcatctgacccgtcctccagaacccatatacctcctgtgaagtccatccccaagaagcagcaacaatccgggtttaagctctatgagcggagaaactctctcaaaaatctcaaaatcaatcctctgatcccaatttacggttccaacaactctggattctctcctcgaaagcccgagattctctctccgagcattctggattttccttctcttgttctaagtccagtcactccccttatacccgacccgtttgaccgttctgggtcggctagtttcgcctgttccagcaatgggaaggcgaatttcgatgcccaagctgaggaaagagctattaaagagaaagggttttacttgcatccctcgccggcgactactccgagagacccggagccgaggctcttgcctttgttcccaacaacatcgcctagagctccaggttcttctttgtcttcttgaaatagaaaaaaaaaaaattagtatgtttttaatttttatttttggtgtaattctatatgtgctattgttggcattgatcatgacgatcatcatgaagagaaggaagatgatatatatttagaaaaaaaaaaagaagagaaagtattgcgatatttgcaaagaatgagatatcaatcacttgctttaattgtaaaaatttgatgtatgttcttctttcttatcattattgttattatttgtaacttctcttgcttggttgctaagaaaaattgatcggaaatgaaaagaaaaaggaaggggaaaaggcaacttttgaatttgacattcactatcttgaatacttatgtttatgatcatattaccccttggaggaaacgtctctcaatgctttgaatagtggtggtgtcactaattatctaactcttcaattttggcgattatccttatgttttcttagatcattcaacaaattgaaatcgttaaaatatttaaaagaaaaagtcttaaaacggtgagcgaaaagttgcatgtgagaatttttagtcttggctccttttatttaagaaaaaaagaacgcagaagaaatgtgtagtattagtgactccattttgagatcaattgaattagtttttaggcattaattaattaaatatgtaggaagaagtgtagatgaattgcgtcagaaaaaggagaaaggtattgtttgcatcaatggcaaaagtagctttgctacgctgtcatggaaagagtagaaggatgggcaaggaatcttgacccttttattgtctttccaagtgaggagaaaattggcaatggttggcagtcaggtactctgcgtgtgcttacgttgtaaggactgttttcttatctgttctatgtatttatttttgatacacactagaggctctgcaaatttaactctttttttcatggtagatctacaataaagtttgtcaccagaagaaagtaatcacttgatatgttgatttatgggccccctaagaaattgccccttgatatagttaagctaagctaagcacatgcttgttcttctttctaagttgatgttgttgttgttatgttatagttgtccaattcttcggtgggttttgtttgtgggaggtcaaagtgggctttaaaggtggcaataaattcaatggtattgattaccaaagattagtacaatttcagccacaggggtagtcatttttatttaataattttgttgggacccaataaaatatagggaacccacttgtggagtttgatggggccatgatcgtttgaatacaaaactttgaattgctgtaaaagcaatcatgcaaaggtagcccttctttctttgaatctaacattgttttaagtctgctttttgacccccaaaagaccaaaactgtagtgaatggagacacatgagaaagtgaaagttgtgtggggaaagtgggacttgtgatgatgaaaggaaggaagggaaaaaaatatgagggccagtgattgatgaaaatttggaaagctttatagaaggtgtaggcggtttatggcttcttgtgttttgtttgtttctgcctgtgtatggcacaatgtccaatgaggtttcttcttgtggactttgcacctcttatgttggtgggtcatttaatgagaatttgggcattttgaagtttcatgtgcactaacttatttattggttttctagcaaatttgttacccaaaaaattataaaaaaaaataaaaaaaaaaaagaaaaggaaaacttttattaggttgggaaatataaagggaaataaatcaaaataaaggtattatccaaaaactaaaatattgtcttatttcctttgcttagaagccccccatgtcaagaccaaagcttatttttttttttagttggggtatactcaaaaattagaataggtcccagcaggaaaaggataggccaatggtttaattcaacttattccaagtcagtgctcatttttgttttttaattgaaacttttcaatgccatttgtatttgatttttaatttgccttgccgaaataagtgctctattctattcctctcatgcttaaaaattccgttaatttgtgcaattcttcaaagttagtgtcacctcatgatctcaatctagatgtttttctctctcaatattatctcaagtctcaccctcttcacttttagggccccaatggagtctactacgttgtggcctactttcattatttcattcgtaaagtcttgtgtgcactgccccaaaggcaatctcattttccgcagaaatgtttgtttcactttcacctctctctctctctctct

SEQ ID NO: 188502 - DNA, 2216 bp, Cannabis indica
cttcctatacttgatgattttcagaggtggagagttgccacacaaactaataccaagagcaaaagcgagaaatttccacctccccatcaagatggagcggtcggatacccacaacaaacatcacacaaaggcccgtcatcttttggtgcatctgattcttctttcggctcagctgtgttcaattcaagatcatcagactctatcaaaagcacgggagctgtttctggggggccttcaaggcggaaaactaacagagaagaccctcgggtggctccatcgcgcaatttcatccgtggattcaagccatcctcggtagggatatcgacaaatctacttttcaggagtaaataacaactttcagagtttctttttttgccgatcgaataatgaagaaagaaaaaaaaagggtattatttgtcagagttttccttcttccttttaggcttagccctttttcggttttttggaatgctgtgtttttcctttttggctcatcattgttctcattatttgttcttttaagcttatgattgttttgttgttgtataatccaagtgacgagatcccacaaggacccaggtgtatatttcagtataatggagtccctcttctcttatgtggtaacatttttcttggggtgcaagtaaccctatctatctaggtagagaatctcagcaatatatttgattctgtttcttattgctaaatagtaatttagatatttatatattttggaatgaaacaatttgattaaacaaaaaccacaagttttagtacacagtacaaacaacagacaaaaccactaggaaatacaaggaaacatgttgtttgatgagggtacataaaatatttttattgatttagctaaggaacagtgaagttaggaccaatttcttcagaaagaatcaattttctttgacagcaaaatcttcagtgtttcaaatggttccaagctgcggtaccaaggcggtgcgtgcggccacagtgacccttgttgctctttgaaccaatgtccacattcgaccaccgcgcgcgatccaccaaaggctttatctgtttgttctctcaactcgatgaattcgagaatggattccaagatccatgtgcagcggagtgtgtggcaggggcctgaggatcggaggttgacgacgacatggtcttgtgtcaagactcctgataccatgtagaacaacagtacaagacaaaccagagaaagaaaagaacagaggaaagaatgcaaaagcttgattgtattgaatgaggacttagcctttatatacagagtacatacagtaggaatcaagatgaaaacaaactaactaccttaacagaattaactgaaaatgtaactaactaacagacattagttaatactgtttacaatgtcaactaagaaaccttccacaccagttcaacaggttttgagctatgggaattagttggttgtggttccaataatttctctaatactgtaattgtacctgcctaagaataatacaaaatagctcaaatttttcactacaaagaaatatggagagagtagatagtgctgaaaatacatctaaaatctgattctgagtcaaatttttaacgttgaggaatgttatattgttttgtaaataatataaggatttgatctataagaatattttaagattagataaaatttatgcgtataacataatgcttaatatattgattatgttgtcttaaatcaattatttgataattgattaataatactctatggttagattttaattactaaatatttcccttacttgatttaattttttaaattaattgtttgtaatacttataatgataaaatatcttaaatataaatattttaataattattgatagagagccctaattacctatctaacttgttgatcgaaactctacggataaataattgaagatattttgatcctatttattgtttatgttcgattttatatttcatgtatttacaatgtttacatggtaaattagaggcgtcgcaagttagaggtgtcacaaaattatttcttattacaggcgttacatgataaattctaataaatatatattatatatatatatatttttttttataaaggtattcgttagttacaataccatccttgtaaatttttgaaaaatttcgaatagtttacagtagcggaaacaattcaaacctattttcgacactgtaaattattcgaattttt

SEQ ID NO: 188503 - DNA, 2410 bp, Cannabis indica
ctccaatacatatgggctttaaatagtggcattaaagcccatgtgtatattcgaccctaagagtaatattcagcccaagtctttattttaagcccatctcatttaaacctaaccctaagtgaagcctataaaaagaaagagaagagagctttgtctgatgatggttttctaagctcaaaaatcctaaaaagctcacttcttcttcttcttctttttttcgaaaattcagaggctattttctcttggattttttcatgaaatttcgtgctcctttgtgttgaaaacttgcccacacatatcaaagcaatactcagcatagtgaagaagattgacatgaacacaattgaaggaggagaagatccaggttcaaatcttgataatgctctattacagatatgaattaagtgctagagatataaacagaaggagttatattattctcctaccatcattgtaagcatttcttaatccttaatgtctttatttatcatttttaagaatttcatatttaggatgttaaattatagaatttcaatcacacatgcttattagtaaatctagatcttggtaaaataagtttccaacaacaagtgcaaagagacaaaacaatgttcacattcatatatgggtttgttaaatctccatttcttgcaaggtaactaagccgagacaattaacaaaaatttcaagacacaaaaacaggggtgcataagacatgtcaatcgtcagagcaacttcgttctataaaaggtcaatactttaaaacataactaattagttctaagaaaacataactccttacttacccttttctcaatcttaggtcgtcaatactcaatatggcattgttttctttattattctctttgctaactcttattgtagcactaacggcataggtcattacttcaaaagcaggaaaaatagccatctactgaggtcagaatgaaaaaaaaaaggcaccatatcagatacttgtgccaatttgagaatgctcaaacaaaatagtcaaatcatataccatattcaaaaacaactaatgatcttggttgaggaagcagagcaaaccttcttagttctctctcccaactcagttgtaactcagtggaactaaaatatgactcaggaagtattcatatacagcttcgtcgcctgaggcacaatgatattggccgagtaaacggagttcaccggcaacatcccatcgattgcagcttagtgcattcagaagcttccttcttctaacaacaagtcacctacagttatgaccaccacaccttaagttttctagttgagaatggttatggtaattctcattccatttgtttcttcttcttttctttctggtctcttcgtttcctttaagcaattctttttgttttcaagaaacaaatagagtagaattttgaattgcatgtgattgttgttggatctagtgactaaaagtgtaatataatttggtttttacttagtttggtggaagaactccaaaaaattgatatattgtttacaaacataaagctcagacaaaatagtaaacttatatactagatttaaattgaaaatgcaaaagatgtggcatgaatgaaaatcgaaggagatctcaaagataaagcctatacaagaaccaaccattccccaatacacacgacgaagaacaaagtggatatatatatcatttctcatatctttaaatattctaaaagagaagaattgcatagatttaaaaagaaaagaaaagaaaaagataagagtaagaatcgcacataatcttaatacaagaatatatgtttgggtttgaagataaaaatagaaattattttattgtttgcacttacaaatggatcaatttgtgaatatcttcgatcataaccagagctcaccaaaatagtttcactaacgctgaaacaaccaaaaggaatgtcgacaactggcgtagatcgcccccaatgaatatcaaactaaaaatttaggaaaatttctataacagatcaaaattttatctgagacttaatcacatcattatatttccaagataaattataaaattttagtaagtaattcaatgctctgaatgagcagaacactttacaatgtatatttcatctaaattgattatcactgctagcaaacaacaacaatgtatatatatatagagagagagagagagagagagagagagagaaacattgaagagcttatgaagacgataatacgtgagatcaaaatttttgagacgcaaggtcactatatccttgagatcgaagatggaggacaaggccttgggaggttgaaacaacagagtaataggagaagcaacgaccatagatttctagttcttcttagagagaaacagatatttgggaaaacagttgagagtggtagccatcgtcaatggtatttcgacaca

SEQ ID NO: 188504 - DNA, 3480 bp, Cannabis indica
tttcgtctggagttttacttgcatgaaacgctgcctcgaattagaaacctagggctggctttgacaatctagggagcgagtattttcggcttatatcttccgaaacgattattgttatttgatgtatgtatctgaatgtatatatcgaggtgaagaactgtagtatcaactgttatacatacatacaaatctaaagtataaactgaaagcttggaaccatggcgaactgtcttgctagaattgtgcttccattgctataccagaactttactttcttgtcttttacgactgttcgtataattggaaaagcatagtttcttataattgatgtgatgttgttcttgaaggacatgcaagatatgagggactgctatgatagattactttcagcggctgcagccactacgaacagcgcttttggtatactcttctcgttcctttgcttgtcttggattatctgtttcatttttctgtgaaatgttgtttgttgtgattttgttattgaatgacaacttacattatccttaatgaactgattgctgagggagtcatttttcatttttcattagcactatgatgcagactttcattttgttatttggtattccagcacttccccatgtggatttttgcttatgattttgtcctctaaactaatgtaagcattgccagttacctgtgatgacattttgtcaatatgacctattcaaagagcaagcaagacattttttacttactattagtaaataaaaaatgcagattcatccatgctatgtcctattttctttatattcttatgtctttccttctttccagaattctccgagtcattgcgggagttaggtgattgtcttcttgagaaaactgcactcaatgatgatgaagagagtggtaagtgttattttaattctactttctgttgtcacaatttttttttccttaccttcgctgaaaactttcagatatatttctgaagattacagtttgtcacactttgttctctcaatctgtgaaaatttacctttttatttcccgcacatttaaatgtgtctgctgcattatgtaaaattcaaatatgatttacagagctgtgggttcagtttttctacatttgggagctatcgttcattatctttatcagtttttttagtctattttttaatttacttaaaacgaatcatcgcttgcgtctctctttccacaagaaacatgctaacaagcatgtattgtcaaaacacgttactcccattaatgtggctctgtgtaaattctttcacctgtattaatataccattggtggcaaaaatattaattattttctccttctattttcacgcaggcaaggtcttgcttatgctagggaaagtgcagtatgaagttcagagacttattgatagctatgtgaggctttactgtaaagtaatcctgagattccattacttgtcacttgcaataagtcttatttatttctttcatgtcacagcgctctcatatatcccacacaatcactgtcccatcagaatcccttcttaatgaacttcggatagttgaggtaaatccttgttgatttaatttcatatttgtaatgattcattctttccatttctctgttttctattgctggctcagttttgctattaggactttcttacttgggtagtaatttatatatgtggttactttttatttgttatggttatgggtgctgcactttctgcttttcggacatgttttggttgttactttctctgtgtattcatcaagtgtttctaaacatatgtatctccttgtatgcaggaggatgaagcggcgaatgtgatgaaaagaggttttagtcttctaccttttatttttatgttataatttaatgtgtatgtatatatgcatgcatgctaaaacacacctaacatactcacatgcatatacatctgtttcatgctgtcttatcacatggtcttcagagaagtatatgaggaaatcaaaagctaaacatagagaaaaaggagatcaagaagtggaagggaaaatttttctatgcagcaactgattatggctcatgatgaatatgatcaggaagcaacattatttgtattccgcttaaaatctctgaagcaaggacaatctcgaagtcttctaacacaggcagctcgtcatcatgctgctcaggtactagtttcagatcataatcatcattttgcattcttaaattcttttactgacctacttattgtgttgctctataatctgttcaaaacagttgtgcttcttcaagaaggctcttaggtctcttgaggcagtagagccatttgtgaaacatgtgactgaacagcagcacattgattaccactttgttggtcttgaagatgatgatctagatgattatgatgactataatgatgatcacgatgatgatgatgacggtagctatgattcaaatgatgatggagaattgagctttgactatggccaaaatgatcaggaacaagatgtttctacatcaagaaattctactgtcactagctgagagttcttctctttattaattacatatattggtcaacaaaaaagagtttgcaaaatacttttacaagatcacagttctcaattgttttatcttgatatgtgcatgcacacacacacacaagatatgcttgtgagcatttatctagaaatttttaggagatatcttatgcagggaaaggaaacaaaactttcatgtctttttactatttatttttatgccacacacttttgttgctagtggctagaataagctatattgggttgcaaaagatagaggataatgttgttgtatttatagcaagcaaacgcagaaatagtttgtgtttaacaagcagggaaaattatgacaataatgttattaaaattataattttaaatgtctaattaccaaaattaatcataaaaaccttttctatcaattcataacggaaagacgaaacaatatccaaaatagttgtcctccagttattttggttgtttgttgtttgctctttttttttggacgttttgattttattgaaaccattctgacttcatgtaaacatgtaaattttggtacaggttgaccaggtggaccttacttttcccaaggtggcaaaggtggaagatcccaaggtaagagaatgtgatacattttcttttctgtttgcaaagatatgatccattagcaattgaattgggatcaggatcactctgtattggattcttagtaaattccaatatgtctaggttattgtttcagttatcagttcgtttgtatgttgtttatgtgtttgcacatattcttgttcatttatcaacatatctttaattattaatccacctagtctctaccataactgaacccccttaggttattgtgaactaaatttgaattttcattttgaaagttgatcccaaggtttaaataaaataggtcaggtttcaagatgatttcctcaattgaatgaaaatgta

SEQ ID NO: 188505 - DNA, 10654 bp, Cannabis indica
ccttcaacttcatcatgaatctaattaatactagatatgtttatatataaatagaacatatatatatatatatatatatatatataaaagaattacatcgatgtgtaatgaatcttcccaggattgagttccagttcatctggaattaattatagattgattgagttttagttcttgtctgccaaatattcgttctctctttgtcctttttgaacgtatgcagtacttatctataaatataactaaaaaagactaataaataaatgactaaaagaattgacttccaattccaccacaactttgtaatcaattgcaaattagacaccttaatagttagaataatttcgatatatatatagtagcaccggccaaaaaagcagcaccacccattatagattatataattaaataaataacttgcatgttttaaatttacattatatatatatttatacaaattaaaatatataacaaacgatagggtttgtattatatttattatatatatgggcaataatacatcgaaaattattcttaatatgaaagaaaaaaataagtgagaaccccctaccccccccaaaaaaaagtgtattaattaatatcactgtcatattactcatttatttggcaataaagaaaaggtctacgaaagaaagtcgcttaattataatattgcaaaattaaattttaatttttaactaaacaaatcttatgctatgttattactaaaggtctatatgatagtaataatacttatcaataaaatatattgttagtgatcacaaaatatttatcattaaaaatagttgtgattataaaattatattagtgacaatttataattaaatataatatttagtattatattttgttgtgaataaaagtaacattttatcacaaaatatttatatatatatttttgtaaggataaaatatttacattcgtgactaaaaaactatctaaattactttctgtagtgttaatgagaccactcaaaagatcaaaaccctaagcatggttttctttgcaagtaatagacttaattagtagtttttttaaacaaaaattggcttgctttaattaccgtataataatttacagtattaattatatatatatgaaaaaatgctaaataaacagattctatattgcactctattaattaataaggtaatttgattatgtgtgaggctttttgacatagcacgaataaagaacgatacaaattcgagtacggtacgaaattattggacttgtagaccgtgtcgagtgtaacgccctgactttcagagacgccacgtgtgtacttttacaaatttaatactaactaatctattagtttagaaaaaatatattgtagtttaaataaatttttttgattaaattagaataaaaccttcatacaagttctccctttcgatctaatcttcttctcttcttcttcttcttcgtcaggtatgctcgcagaccaccatggcagtggttgagatattgagtgtcaacaacgacggctagccaactatagaactcactttttttttttttgataaaatatagaactcacttttgtagatcttgttttattcctctctcgtttctcatcgttcaaatcaaacttttttttgtatagtcacatatggtggctcaacttggtggcggcgttgcagggttcaaatttttatttttctgtattggtttggtgaatgtggtgtggatggatgtaatttttctttcgttatttctagcgtttgtgtccattaataaccaacgcaaaataaataatcccgttagttaataatcgacccaacactccccaatttgtgtcagtggaatgtacgatggtcttttggactgatgcaaaaagcaaatatgtcaatttaatattagaattttataccctaaataaaactcaatttaaatgtaatcttaatttcattattagtaaaagaacataagttatttcgttacttatttcgtttattgcttggtgcacatgtttatttcatgatcatatatatttgatatataaattctattaaatcattaataattatatcattgtctacacaacagtaaataattatgattacatgatataaactattttagtctctcaatttattagtgcactagatttatactgacatgataatcatcgacgttgtttacttacacttgtttaagtagaatgtattttccaagacattagcaaagtaagcatgtatcagatgtattggttatacatcgaactggactgatattgacagtggaaaagatatcataaacttactgtatatcttttctaagtcaatgccacttatttgatcttataaaatcagtgatctcaatcctaagatgattaggttctagcctaattatactattcaggtttttggacttgttcattacccacttacccataggactagcctatacttacatattgagaatatagtagtacaattgagtgagaatgctaattataaatatgcaatctataacttctataaactcttagaattgaaataatggtttccttaagcttggataaatgagtttaaatggtagagcaatcatttcagtaattatattagtttacaagaatatcatttacaagtagctaagtgttttaaggataaaataaattaaagggtaaaacaataaatttctctctattcgatgtaaactatccatagaggaacattgattgtttagattgaaacaatgggtacgtaattcatagtgtatatgttggcatatagagcattctatgtaatcaagactacaattctaaacctatagtggaattaggaagaattaataaaacaagaaatttattcataaattgtgggaactgcctattggagtttggttacataggcccatagtcccaaaactatttgggataatattgtcttgtagtcaattaattggtttcttgaaccaattagaattctaaaaaagactttatcttttttttaatgatttttactaagcaatgtgcctacaccaaaaatagccctatacatcaaaggttgacacgtgggaagaaagaaaacatcctggagttgagtagtcctaaatcataccacgtcgagatgggaggggtccctagcctgcccccaggttgactttgaaaactttaaaatgggtgtttggatccctctaatttgttttcaactcactatctttcagtattctataccatgaagacatagcctccaagtccagggtctgggagctaaaaacacacgaaacaacacatcagaaatgaacttgggcgcctagggtttcacccagcgcccaggttgaaaccccaactagggtttcagtttttgagatcgtttaagtgaaaatgggtcaaattttacactgggacatgaactagacataccacaaacatatttgaggcatcagaatcaaattcaaagaaatttcatttttgagcacccggtacccaggcacccaacgcccaggttgataatttctcaacttgggccacttccaagcatcaaactgcaaatccaactcatgcatcttctttgtcttcataaaaaattgggaaacaagtgtttttggggaagaaacagaccaacttgggggccaaaacaagggaccagcacccaggttgacacctggtgctagcctagtgccaagtttaacattttgtcaacttaggccaatttcaaggagtttatccaaaaagtcttccaggaatattctccattttcatcaaagattaagattcaactatttttggggagcaaacataattgtccgagggccttaaactggacccagtgtccagttaacacctggcactgggcccaacgcccaggctgacatattgtcaacctgggctgtttccaatcctctttctgaataagtgttctgggaattattctaacatcagaaataatgaagatacaaataaacttgaggagaaagaaataactacaggggcttcaaaactaagcttagtgtacaagttgacttggtgctgggcctagcgcccaggttgacaatcaacctggtgcgctggttttgatcactcaaatgcaaattttgctctgaaaattctttccaaaatggtcaaaaatagtgtaggagaccttgtccttaagttcaagaaagtgacaaaatagcagctcggaagctccaaaagaaacccccaacacccaagttgacatatggcttggtgcgctgggttctgcttatccgattctgattttttcttaattgttcatatagtttttcatagtaactgagagctatgaagtcataagagtcaaatttacaacttcacatttcatttttctagcaaagtgacttacacaaaaatcgggtagtttcgagtctctcatttttacagaatagcaacatctccaagaactggtgaccaattttaccagaacatagaaactagctaactgatgtagtgctagtatccactacagaactagagtatatttcccttactaaagttgtcaaggaagctctatggttaaaggtaatcatgactgaatcggggtttgatcaaagggatgtaagtgtgcactgtgactttcaaagtgctatacacttagctaaaagcactatatgtttcatgaaaggatgaaatacattgacatcaaactttatttcttaagggacatagttaaaaatggactcatcaaggtggttaagattgccacagagagcaaccctgctaatatgctaactaatgtgataccagtgagcaattcagtattacattagactttcttggtatcaagactttattcccggagctttgccaaagtagtcgctaattcactcacaggttacacttaaggaaatagaaatcaaggtgaaaaattgtgaagatttggtccttatatctttggacctttgttagacttttgtctaatctgactcatattgcattagaagaccagttagttgtaacatccaactgtccaagactcaggtcaacagttgataacggaattcattaattttgttacaactaacttcagctctcttctttcaaaaaaaatcttcaactttctccttctctctttctcgccttatatatagagtttagatttgatcaacttagaattgagacaattgtaatgtacaatgatatttctagagaaaatttcagagagagagaacttgtgccattcagagagaaatttgtaatgcgagttggagatcatttctgatttgagtgtgtaacctcattctttatagtgaagtcgactcaaagcactgcctactcgaatcttaaccaaataaatttagcactccattagatactcttatatatctaacaacattttagtaaaaaaaatagaggaaaatatttttttagaaatttattggataacttctttttatttatatataactctggattgataaaataatatttttctaattgaatattagaaaatatgaaacaaatatttggcatatattgacactcatttcattattgaatatattttataggcatggttagggagttataatataataacatgtttgccaacttaaaactctagggatatggtacttgtcatattattgttccatgtgggactcttagggtcctttaatatatatggataatcccattaatttgatgtaatttataacgcatatataaagggcaaatcattcacaattctttcccaaacaacattacaaaacttttgcagctaagccaaatgggttcacttcaaagtgagagtactaataataacgcatttggctcagtactagagcttcaacagttcgatatagcaaatgtcgaggaaggtgctgttaatcatcatcatcataatcatggtgatcatatcaaaacatcatcatcgtcatcatctgatcatgagaatatggtcctcaacattcctgatcctccaactatctggcaggagcttcttgttcaatcaaatacgagtctctttgttccaagaaaaagaaaaatattcataccaagaatacagttaaccattcttcgttccttccaactctatttcccatcttccgatggggaagacattataatttttctatgttcaaaaatgacttcatgtctggtttaactctggctagtcttagcattcctcaggtacgtacgtactacctctttatatttatatatactcaaaattcttctacataacttaattaattagtgttacatttgttttgtgtagagtataggatatgcaaatctagcaaagcttgatccacagtatggcctctgtaagttattttacgatgacccctctgcatataatttcactttataaatctattcattatatatatatgtatttatattattatatatgatgatatacagacacaagcgttgtcccacctctaatttatgctgtaatggggagctcaagagatttagccattggaccagtagctgtggtttcattactaatatcctctttggttccggagattcaagaccctgtaactgaccctgtcgcctataccaaccttgttttcactgttacattctttgctggggttttccaagcttcctttggattcttaaggtttatatatatatattgattgataataaattactcaattatatatatcaaacgttactcttcaattattaaatactacatatgtatataattatagttaattctcttaattaatgcatatatacttatacactaggttgggttttctagtggattttctttcccatgctgcaattgtgggattcatggccggagcagccattgttattggtcttcaacaactaaagggtctatttggcattactcactttactaccaaaacagatgtggtctctgtattgacatccgttttcaaatcactgttgcacgacccagtaagtatctcttacatatatataaacacattaattggttaataaccttactctaattaatttaattaattgactttttatgttacagtggcaccctttgaatttcgtcctgggttgctcattcctgatttttcttctaattgcccgacacatcgtaagtaattgtaaattcatatgtcaccacaatatagctttgtttttcttttcttttttttttactttaaatataagcttaattaataatttacgtgcagggtagaagaaataaaaagctgttctggttgccagccatagctcccttaatatcagttgtattatctacactaatagtgtacttaacaaaaggtgataagcatggagtgaatatagtgaaacacatcgaaggaggcattaatccaatctctgctacaaaattacagctcacaggtccacatgtggcacaagctgccaaaacaggactcatttgtgctattattgctctcaccgtgagtaatatttttatttaatttctcttaattattacctacctattaattaattaattaattatatatttattcatatatatatattatcaggaagcaattgctgtaggtcgttcttttgcttccattaaaggataccatctcgatggtaacactgaaatggtggccatgggttttatgaacgttgcaggatctctaacttcatgctacgtggctaccggtataattaaatttaatatatataagactctgaggtggattctctctaaatctgtattaatatatatataaatatactgcaggttcgttctcaagaacagcagtgaacttcagcgcagggtgtgaaacagttgtgtcgaatatagtaatggccataacagtgattttgtcactagaattgttaacaaagctcttgtactacactcccatggccatcctagcttctatcattctctcagcacttcctggcctcattgactttaatgaagcccttcatatttggaaagttgacaaactagatttccttgcttgcattggtgctttctttggtgttttgttcgcctcagttgagatcggtctattaattgcggtaattataactaatttcattaattaatattaatattttgttaattatattattatatatattttaaaaaaaaaaaaaagaaacatattatagacgtgaccatgatagaaccccatcatccaagttgtacaatataaataatttaatcaagtcaccgaaacaataaaaacatgccctcgtgatgttgctctctataatagtactataaatattggaacacactgctgataattatatcaatcaacttaagtaatagcaacaaaatttaataggattatatatataattgttgttacgtatataaaattatattgtaatattcatgattggtatgtaatattataaatatatatatataaaatattttattgagtcgttttccgatttaattgttgaatgtgtgttatatttggtatttatgggtggtggagatgggctcctcgtctcataattgagcacttgaaattattttggtccagtcttgatcaatttttctttagtggattcttagcttttttatatatatgcatatatacatatatacctttccaaaagtaaggctactagtcaggtctctagtcttgttacagacgttatatctaccacttacttcttagctctattggcacatttctcttggcccatatacatatgatatatattcttatttttgatcatgggtctactttaaaatttaccaacaaagaagaagaaggaggacttgtaaacatgtgtaagcatcaacatcataatcagcgcacaatacatgatctgggtcccattccatattactacttgtctagtagcatttgcacttttacccatgagaatataattttaagttttagataattgtatatagaaaaattaaggtagtaaatgatgcaacttgattagtatatattaagtgttaattacatgcatatatctgcaggtaagcatatcttttggtaagatattattacatgcaattagaccaggggtagaattgatagggagaattcccagaacagatacgttctgtgaaatcagccaatatccaatggctacaaaagctcccccaggcatcttgaccatccgtatcaactctgccttgctttgttttgctaatgctaatttcgtaagacaaaggtacatatatatacatattatatattaattaattatgccattataattgttacagcataacactgcaaaattctagtacatgatctcctaatcatttcgttctataaataacaatatgatgtgcgcaggcctaatactttagtggggtaaaaaaaataatttaaaaaaatatataaattttgtgagaataaaaatcaaaaatataaattttataaaaataaatataaaaaccattcgcctcttgtctacaaggacctattgtaacatatattttgtcaataacagtattaagtaattgtctcattatgtatgtattggcttattaataattaggataatgagatgggtgaaagatgaggaggaggattatgggacagaagattcgactcatgtaaaggatagagttcaagtagttatccttgatatgtccagtaagtttactcttaatgctaaatatattaattaattattattaccaaaatatattctattatatatagtgaacataaatatttattaaataccctacattatattattgattaacaaagtaaaatatactttttagctcacatttctcaacacatacttaaataaattaattggtattgtatctaatctaaaatatgtcatgagattccatacaaaattacactaataatataatgtgtaataagtattgttaggctataatactacataattagaggagcattgcaataagctataagagaaatactaattataatcttctttttaaattttgcgttcaaaaacatatgcagaaataatttctttttctcaatagtccgttgtagttataatttcgtatagactatttagagatcaaaacacaaattagaagcttttgaataggagtggtaaacttaaattattaaaaattctgttgttaatactatagactatttagaatttttttaaaaatttaaaaaaatgattttgtaactacaaaaagcactactatgaaaaaaaaattataagaaaatattttagattggcatatatcgccaccatgattccatttctttttttgaggtaccatgatattatattccacattttaatctaaattaaaatatattaaatttaacatttacgaccaataataatatgtgacatcttttttttagtaatttttagctatttctcctttattaataaatttaattctaatataatacaatttaagtttttttttttcttctttaattatttattatttatttgttttttttttgtttttttaaattatggttcattgaaaggaaagcaaacaaaatagcatataattattgggcgcagacccaacatataattagggatgtcaactaccgttgactttttttggtagaaaaattaataattttatttttattatttattattaataataatatgtgtgcgcattttttattataaatttataatatattatgtaattctactttaaactctaaaaagattattttggttacattttttcttttttttttagttcagtgttatttagttttttgttaagtgtacattgtaattatttaagtacc

SEQ ID NO: 188506 - DNA, 1248 bp, Cannabis indica
tttttcaaactctgatttttcttcaattttaattaattttgaaatcataaatgactctatgaagtgacttgtttaagtcaagcatcaaatattatcatttttatatatgcaataataataataataatggttgactgactaggaagacttggaaacagtacttacgtctcttatatataatctataaaactgaaaaagaaaaaagtatgcaattacattccattcccattttgttatatgaacatggctttgtattcacttaataaactcactataactcttccccttcttattctcatttttatgttgcatgtagaagcaactaccaaaactaaacaccataatgatgatgatcatgtactctgtgtcgaaagtgagaagcaagctcttttgagtttcaagcaagaccttgtcgatcccttcaacaggctaacttcatgggctgccaatggagatgatgatgatgactgctgcaactggactggaattatttgcgacagcatcacaggccatgtcaaacaacttcagcttgctaatacttacaaggattatgttgatttggagaataaatatggtggtggactaagtagcaaggtaaacccttccttactgaatctcacatatctaactcacttagacttgagctacaataattttggtggcactcaaattccccatttcattggttctttgatgagtttgaaatatttaaactttactcgagctggatttgagggaaaaatcccccaccaacttggaaatttgtcaagtttaaaccatcttattcttcaaactgattatgattcggactctagccgtgacaaattatatgctgatagtcttcattgggtctctggtctttcttcactagtatatctagagatgacagcaaaccttagtgcaacatctgatcattggctactctctttaaacaaaatcccttctttgttggaattacacatgtccttgtgtggacttacccatattcattccatatctgatgttaactttacatctcttgagtttcttgatatatcaggcaatgattttcaatattcttctatacctaattggattttcaatctcaaaaagctcgttcatctcgatttatcatatagattctattcgggtgatttatttcctagaaatcttactaatcctaagagcttctcttctttaaaataccttgatgtttctgatagcaatcttaattctctaccagatttattagatttagagaagagagaa

SEQ ID NO: 188507 - DNA, 2959 bp, Cannabis indica
accagcaagtgaaattggtgtgacatttttctgatattggtgcattagatgagatcaagaatcacttcaagattagatgcttccactgaaagacctgaccttttcaatggaggactattgaagccttgtagaggaatattactatttgggccacctggaactggtaagacaatgatggcaaaggccatagctaaagaagctggagcaagtttcatcaatgtttccatgtctaccataacatcgaaatggttcggtgaggatgagaagaatgttagagctcttttcactttggcggcgaaggtttcgccaactattatctttgttgatgaggttgatagcatgcttggacagaggtctagagccggggaacatgaagcgatgcggaagatcaagaacgagtttatgacacattgggacgggttattgacgaaacccggtgaaaggattcttgttcttgctgctactaataggccttttgatcttgatgaagctattatcagacgtttcgaaagaaggtatgtcgagttagtttgaaagatgttagagaatcttacattgataatgtgtagaaacttaagttgcatttgattggaggtaaaagggtaatgaaatagaaaataatcaaattttatttcattcatttgtttagttatattttaggtaacatttgattggagattgtaaaatagaatggaataagaatgtgaatagaaatgaaatcaaatcaaatttaaaatatataaaaaattattaaaatttttcttatcttaaattgaaattttcatttatttcatttcaaaatggaataatcatttcaccaaaatgataaaatatcattccattagaatgatattttattccattccattccatttaactttaattaaacgtcacctttttgtattgaaatgtcattctaatctaaagagttttccatcattttgatggaatggttattccatttcaaatggatagtaagatcatctcaatgcaatatgcttaaaaattttaataattttttatatgcttattaaatttcattctcatttctatgtctatgtttttatcaattttaactaaagctacccttaatatcatagattatttcatttattgccaattaattttgaaatagaacctcatacatcttcgtacataatattaattatacagaatattggtgggacttccatcaatggataacagagaaatgatcctaaaaactctacttgcaaaagagaaaatagaagaaagattaaactacaaggaacttgcaaccatgacagaaggctatagtggaagtgatcttaaggttattgtttgtttttttcatgtctttttgtttgattttgattcatgtaaaggtgttgactttgttattacaaaacagaatttgtgcacaacagcagcatataggcctgtaagggaattaatacaacaagaaagattgaaagatttggtaagtaaagtgaatgaatgattccattcatttcaacctctttttccataattacattgtttaaacaacattttattttcttttgtaggaaaaaaaacagaaacctttggtatcatcagaaactgttagtaagttcagaaaaaaccgaaaaacccgaaagtggtaaagaagaaacaggtataattttaaggcctttaaacatggaggatttcagggtagcaaagaatcaggtataatataacatgttaattacttggttttcttctcaaaaaaattttgagtgagcttttaatgataactaatcgattttcgggttgtaggtggctgcaagttttgcagcagaggggtctgtaatgaatgagttgaagcaatggaatgagctatatggggaaggagggtcaagaaagaaagaacagttaacttattttctatgaatgtgcttttttctttgttaacttttttttggtattgaaaataaacttgttcatggagagaaaacaaattatgagatgaattagttctaactttgataccaggaaaggaatgatgatatatatagtaagtaaaattatatatttttgtgtaataatattgtaatagttttataggagaaactactttaggtatatgtataatatatttttcagatatgggaaaataagagtgagaagcaaagcacttttataagaaaatgaattttatttatttatttatttatcatcatttgaattattattaaaattaaattgttgatgttattagttttttttttgttttttttttttttttgaagggttgaagtatagttgttgttatacagttattttgctaatttttcttttattattatttttttcaaacaaaaatatgtctctattaataaattaatagttattggtgttagaaagtgtcgaatttgtataaattttataaaaaagaaaaattattacaaaaattaaatacgagatttaagtattagtctattagatgactgaagccactttataaaaaacaagtacttttacattgtaattaattataaactttttaagttttatgtacctaaatataataataatgattactaatgctatacaattatgtaaatgaaagattaagaaaagaaaacaatgtgatttttgtggtttagacaattaattaggattttgtttcaaatctaaatattatatctgcataatatctaacaaaatctttcattccatcagaacattattttgtgcatttatgccagattgatcattacaaacttactgatgaaactaaagtaaatatggaggttttaatattagaatttagaacatcttattctacaaatttgtctgaaatttctattttattctaatgacacattgaattttatattattaatagggttgaattttgaatctacactaatatgatgtaaaacttcttttattagattctaatccttattttaatttattttaaaagttaatcttacattttagtgcttaaatt

SEQ ID NO: 188508 - DNA, 2829 bp, Cannabis indica
agttttgtggctaacagagaagacgaaggggatatccttcgatgttgttggcccctgtactcaaggacccacggttcacgagcttcttcatcaacatggtcgatgccaacctcaaaaggatgactctgagcgttcaaaagctgtcagacgtcatcataagagcccaatggattgcccaagaccacggtgcgagtcttgtatcgccttctagtagcacctgctctagcagtaagttcaacctcctcagcatcaaaatcactgccatgaccagccgaggccttctcatcctagccgataatgggccactcggtcataggttcctcaacgtggctagcccctagttggtcagcttgaggctactcagcctcttccacctaacagaccctccttcttaacatcagctcagcaatgtgagggtcctgaggaggtgccctatgacacgtttgttttgttcaacccatgaaaggctcaaagagcctacaatcgtaactgtagtctccgtggtagggtgatctccaacgaatggagttacatgacctgtgggtaatgtatcgggcacactgtcccgaacaatgtaggtctatgattgtgggaggaactatctccacccctagtttagttcctacacaaatggaccataaattaaccacctattttctctaaaaaaagttgtggtgttggatctcaagttttggggaactactgctaacctcaaaatcattccaggggctacctaaagaacccctggtagaagaactaggtgaaggagatggacgttggtctacaaaagaagaccaagcaagtctttattgatctggttgtcacctccccaaaagtcacgcgagttcatctacatacaaaagataaggaaagtgagtcattgaatgaaatgaaaggacttagacaaagtactagtcaactaaacctaagggtactagctagatatcctaatgttaaaagccataaattagctaagtacaagatctaggtgtaaaaattcaaacgacattgagtttagatcgctaattggccaagttagactcgtcctaagatatgccatacaaagttcttgatggaatcaagtaatggatagaggcgagacaagctcaaaaagccatgaaatatccttgctaaggtcaaataagggcttgaataggccaagttgctaggacttaagccatgtgtcgaccatggtcccagaatagaagcatgtgctggctagggatccaggaccagagcatgtgtcgaacagggtttcatgaccttgacatggactggacaggtttctagcctagaagccaagaactggccagcttcctagactaaaataatgtgtcaactagagtcataaataggccctatttgccgaccaagggagcctatggatcaaaactctactttttaaaaactcaaacattgttcttcgtgttcattgtgactcaaagtgttaagaatctaaatgaagatcaaaatttaatctttttcatttggaaatcatacattatgcatcctaaagctatcattcgaattataatgtaaaaaaatattaccatataatgtgagaatcaaggttttaaaaaagcttggaaaagcttaaactcatcaaaggcagatttaagaaaacaatgagaaagcgagattcgaagacttacatagtaatgaagtctgttgtggatgtttgtggaaaggttggatcgtcaaaaagaagaaaaaacctcaggaatggagacctttgggatgtcgagtgcagaggaggacttaaagaggttactttgctttttcttgaagagaattcaatgagagagagggagagagagagtgatgtggaaatgagaagatagactaagttaaccttataaaggttctgatatgcttttctcccgaaaaatatagtaggtggttattcctcctaaaaaatagccatacagaatacaaagagttcataggtggaaacttgtgcagcaaaagaatgaaaaaaaattaaataataatactaataataaattcgcataatgattggcaaataagtcattttttgtcatgaagtgggttatatgaaaggccaaatatctgttcgatgagtgctgcttggttaagattttaacattcaaagtcggagtggaaaagttcctattagtacaaacatccgcacaggcacttgggggtaaattttatcccaatttttgcccatatgatgtggcatatccatgtagggaagactagggccttgtggaatacagtgtgtcaataagtgagccaaatcaccgtacacagcacatcaattgacaagggattgaagtgctcaagcaggatcaaataacaagaaaatggctagctagagggtctagctagacaacaccctggtcggctaaggatgaccatgtgccggctagccccagacgaaagaactgtcgccagcacaggtggagagcttcaaacaagcccaatcagatggtggggtccgcaatcatcctcctagacaggtcacataatcgtttcacccacgagacggctccaacaactcacaaaagtagggtttcaacactaaaatatatacctatcttttagggatattagttagttatttaaatatatgataaaagagtaatatctcatattttttagggatattatcctattagaatgtaggttttttgtaagctctaaaatatttaaagagtatcaggctaagtggaaagggacctaagttctaagttcaacaagccctagagcagtcttgctttttctctctcacacgccacctccaagtcactagcagtaagtttgtttctcatatcacttgtttagaatctgtcatacatcattctc

SEQ ID NO: 188509 - DNA, 3201 bp, Cannabis indica
ttttttctttaattataagcgggagttagtatgtattgtatattacttattttattgttgagcagcctttgatttttttttttaattagaattggtttgagttattttttaattgaaaccaattatgagttattgtattttgtgtgtttttattcattttgttatgaaatcggttctatttaatttatgtattaatatttttggaattgatttccccctctctattttttttttaattataaacagtttgcgttattttgtagtatttgtttgtattcattataatataaaattgattctattttaattataactgaatttagttattttgtattatttatttttattcgttataacaatgttatagaatcgattctattttaattataactggtttaagttattttgtattatttgtttttattcattatatgatagaactagttctactttaattataattgatttgagttattctgtgttatttatttttattcattatgttataagcaattctatgtttcttgtttttattcattatgttatagaattgtttctattttaatttataaccaatttgagttaatctatgttatttatttttattcattatgttataaaaccagttctattatctgagacatctacttctagtgacttttccaataacttttctcacgacaataactttttcgataacttttccaatgacgataacttttccgataataataattttctggcatcagtgactttttcaacaactttacttttctaacatcgatgatttttttgatagaaattttatcaaatttatttatccttttttttttaatttttcaatttcatatatttttgtattatttatttatgtaagccaatgcttagtgtttcgatggacgtgttaaaaaactagtcatcaaagaaaactaataagttaaattaatagtctcctcaaaattgataacatctcattatttgacttggttactaacttatgttgatgtggattagactaagttcggttaatctaaagcggaaacattagagaaaatcgtccaaatttcaaaagcaaccacatatatatataaatatgttctgtaagcaaacttcaatttttcttgctccaacttaagtcataacaagctacatcaaacaactgaaaattctaatacaaagtaatacaataagaaaatagaccgttctaatggacatatcctaatcaaataggtaaaatcaattcaatggtttatttccaaactcagaaaacaaggaccatgatcagctttgctgtaaatactaaagatttatggtaatcaatattattcattggcccttacaactcataccatgatgaaaaccctgcaaacaacaatgaaatttgatcaacccacatgcagattatgagacaagcatagattagagataagcctagaaaacaaaaatgatacaagcataggcatagatatcgatcttgcacaaatccaacagcttgagctatataaaaccgaaaatgcagacccccttgagagaaaaagtttgaatttccaatcatgaattattgtgtaacaacaataatcatgacttgcacagttaataaatgcaaacaacaaaaaacagctgaattcaaactaccatggaaagtaaagtgtttgaatttcacaaatttttgttttgttttcgggccaatccttaaatcataaaacggaaattgcagtgtgaaaccaaatgactttagcaacttcaaacccaaaaatcaatgaatatataaacaggcatatatacacataacacacaatatgtatatgatcattcgaccattaaaagcaaggcaatcccagaacaagagacttacagcctataaaagcccaaaaaaccactggacaaaacagagataatcaatagatacattaaatatgaaaataagtttttggcaattggcaaaaatattttctttacaatcacttggaacaaattaatcatttttacagagtcaccccatttccaacactccacaccctcattttcttccttcaatatcattttcttccttaaaatgaccaataaaaccaacaaaaactatatggaaaagaaaaaaaatacctgaaagaagaataaaatttaagcagcaggctgttgaggaatcattccagcttttctagcgtaagcgaaaatgccaccagcctcgataacaggcccagcatccccaataggcttcaatgtgtaatcttttccagtagtgtgattgatcaaacggctctcaccaagctcgatcgtgataacgtcaccagtcctacactcctcgcagatcctcacctccgattccagcgggtagacttctccggtggccacagagttcctgaagaagattctcgcatacgactcagccaccacagctgtcgtcccagctgcgcctagagccacaggcgcatgctccctagatgagccgcagccaaagttggcgccgccaatgacgatggagtacttcgacttggtctcccccggctccacgaaccgagcttcgtaagacgctgggaggccgattaaagcgtaggatccgagcttctcgtactcggcgggtttggacgggaccagggtgaggtactcggcagggatgatctggtctgtgtcgatgttgtcgcccacaacgtagcagaggccgtggaacgaggtggcattattggaggatgaagatgattgtgaggcggcgcgtgggacgacgagagaggcgcgggaaggcgcgtccgtggagtggagggttaaggatttaatggggttttgggcgaaggcaggaattttgagagtgtgagggggtgagaagagaggagagggtttgtgggaggaggtgaagctagggtttggggagatggaaattgaagctgacagtgttgccatttgggattttttgggtgtattcttgtctgtggtggtgtctgtgtcaactttgtggaaggtgctgaagttgaaatttaactacaacagttgattatatataacagcaaaaacactccaatgcacataaaaaaaaaaaaaaaaaattatagatataacatcaaatttacaaaatcaaatgtttacaaaaaaaaaaaaaaaaaagaaagaaaatttacaaaatcaaacaagccaagtctaatagtgtatcctcattatatactgatgtaaaattatttgaaaaatttattgatacattcctatctattt

SEQ ID NO: 188510 - DNA, 4391 bp, Cannabis indica
ctatgttgctgcctcaaaccacatgaacctaaacaattgttagagtatgaaattaagcaagctaacaccccctttactgagttgagtatcattcactacaagcaaatgagctttgagcataatgaacattggaaattcaaaggcaattgttaaattccaggaaagtgaatgattttaaacccattagtttggtagctactctgtaaagaaattataagaaacaaactattgaattcataaaattcttattacatacattcatggcatgtttacctaaggtgtcacactagacagcgcctagtaaaacaaggcccataaccagaaacataaataaatacccatcacattaggtctgcgtcaaaggatttcaagaattaaaggagttctctaacgtttaattcatgtctactttatgaggatactatatcatctttccgtacttacctgtttccaatcaataaagaatttctcttaccaacaaaaaaataataataatctcaggaccaaataagaacattatccaaggctaactggctaatgaaaaaagcaataccttttctaagatagaactcctcacttcagcataattagaaacggaatccaagtccatcttaccctcaactcttatggcatattgcagatcacgatcaaggttgtcaatcagttgctgaaaatcaaagttagcaatgtttttgcgtcaaattacatatactattaaaaatagatagtgaaacacccaaaattaaaataaaaactggaccaaggtagcattcactatgtccacggaacatggaaaaagagcagcataaccaatcacgggtatagagaaaggggtcaattcatgtcaaaccataatgaccaattattaaaccagagcaattaattgtgagcaagatgacatgcctgatatccagatggatcaagcttaaaactagttaaaagatcggatctaaaaactccactttcaaggcattccacgtgaccacctatatatgtctcactttcaagaagacggttattatgaaacttctctgattcagcttggtgcttgttggggcaaataacatttgccttgtatgcctggaataaaagaaaagttgccttgaatgagtacacgcttatgaagtgaaaacatatgaaagaatgcaccacacaaggaaactcaaagatctagtgaaaacatatgaaagaatgcaccacacaaggaaactcaaagatctagtgttgtagcatgagtggaaaaacacacctggaccattagaagcatttcacagagggtcccactacccttgcgcaagacctcatctggtgacatcggaataattgtcgcaagagagaaaatgaatggatgaacataggtcatatacaagtaataagttgaaacagcatcggaaacagaatatgaggccatcatctgtaagaagttaagttgcatatacattagaaatatttctcatataatgtacaaaaacaaatttgagtaactaaacggaaacacagataatatgatatcacctgagatattccaggaaagagcagccttaggattctaaggctgtcgatttatctgtaggtttagacagtatatctcagactaaatttttttaatttaaatttcttctctaattttgtcataatttgtaagactgattttattttctgttgagcctatctatattttcccctagttttattctgttgaaaaagttctgataaaacaaaaacataagtgttctgctctcttttcttttccacttccagctttcatgaacataaaccaagaaggttacaaaaaactaggcaccatcctttgcaacataccactaagtggtaaagaccttttattgagcaactactcacacagaaacttgcctttgatgggatatggagaatttttttccaaaataaataccaaaggctcaaatctaggtaagcaaattcatcactttttgtctgagagaacatttgtaagaaaatgcctcaaaaatccagactaaaatctcttttttaagacaaatggattgaaagcaaacgaatgacaaaaagtaccaataatcactaaagattgtgcaatggaactgcacagaaaacaaaatactaaactcttacctgtggcttttccattgcataacgaaccatatcctcaggattcacttccaggggatcatatcccaactttgcctttgttacagcctgaaacaataccactaattataaactttctagtagtgagaacattaatagtagcttgattttaaaatagaaggaaatgaacaatgtcaatcttttttcttttcaggaaacaagaagttcattaagtataagctattgtaatatataattttttttcccagttcattaacaataagagataattacatgaaacatactacacacataacaaacacaactgaaaagcaaaagtggcagaagcacccgcaagagagcaaaacaaaaaacacataatcatatggaagatattgtttgatgtcttgtaaagcataatggtataatgataagcaaataagcaagttatattagatcttaaaccttaaggccctggcttccctgagggagataactatcacgcttgacccaagcaaagcaatcaagatggcaagcaaatttagcacgacattctccttgaatcttgtcacattgaaatccaacctcctgataataatagcaaccaaaactgttagaaaataggcagaaaaaaatatttaaacaaacagatatgctgaaaaccaatccagaagcaaatataaagcaacagctaactctagtaccatccaaagtatttttgtgctagtcaagagttcataaagtaatatggttatgtagaatattaggcgtccataccgaaatgataaataacgtactgacttgaattgactaaatatagaaaaactaaaactaaaatctcaagatgtcggtattaagtaaaagctcagaagttacatacatcactaagtttaaatccatgatgggctgctcttctttccaggaaaggccaatcaaaaaaatcaccattgtacgtgacatatataccaggcttcacctcccgcatatgggagaaccacaatttaagaagctctagctgcaagatgaaaaatcttttgcaaaattagtagtgcataatatattcaataaaagacacgcacctccttaagcaatctaagagatgaaaccacatttggtaataggaatattatttctacaagacttcattacctcgttttttacatttgtaaccttgaaatgcccttcaaattctggttttggagtgtattccaaatcctctatatcatcaccaacacactgcaaacaaaaaacaattagacgtgttaaagtaagccatgagaaaacaatacatgtcttgctagttgctacatatcatttactcaggtacatgtaatagatgccaagtacctagatgaccagtgcaataatgaagcttacataggaaccagcagaatgtatatatagtatggaattttaaataagaaacattgaagaaggaaagaaattactagtttgaaccagtcacaaatacctctctgtttattatcagatacccttgtccgtcaaccatgtacgaaatcatcattactaaatcatactcagcatctggaaatttgaggggaagcttggtggtttcaatatcgaatgcacaaacacgaacttcagcacgctgtagaagatctgttctcctctccaccataacatcattactagatatactaacatcgtaccactgtccacagcgtacatctaggaaacatatgtcacaggagaaaaacaagtttatttaatagttggaaccttttcttaaaaaccaactccccaagcaacagaatggacttaccattgtcaatggcaaaccgaacatggtaaggaacatcgtactctcggaggtcaacaatgtaatccaaaaaatcttgagaccttttttctctacaaatcaggcacaataatattacacacgacagtaacaaaagactaacttttcacctaagaatcttagtatcagattttcaggccaatgaaggaaatcgtaaccttcaattgtaaaacgaaaaactcaccttttccctgtcaatattaactcataagcttctgtagcatcagattttgcctggtttctttcaacaacgtgcaatagatctctcttaacactcattagttgctgaacagtgtcgaatgatagttttagataggacttgcataaaccagacaaatgatttttctgccacgaatgaacacacatatcagagtacattaactagtataagtggataaaagaaattttagattagttccgaaagaaagttaaattagttcaaaataataaaactagtagaatttagtatacaattaacctttttttt

SEQ ID NO: 188511 - DNA, 1342 bp, Cannabis indica
atactgtacactagttttactctagctatggtaatttagtatttgcatctactcttattttttttaaaaaaaaacaagttaatatttaatttttgtattaagaatatcaaaatttaaaataaaataaataaatgtaatgcatttgagccctccacgtgtctatatttatgagttaataacggaagtggtagtaacggtgtaagagaattgtaatattaggtatttttgaccaccaaaaataagtattagatatttaagtgtataaaatcgaaaacattagatatttataccgcaatttactcaagattgtaatatgatgttgtaattagttctcctaaaataaataagtgagtggtctaaatgataaaataatttaaacaaattaactcttacaaaaatatctttcgacgcgggaagttagcgcgtgtatcttcacggtgttacgtaaacgacctgtataaataaataaaataaaaagttgaaatgcgcgtgagataagagaaaggtaatagatattttgatgtcatgtatgattggggaaaactagagatgaatccgtgaattacggatccaggtggggccagctgggagtttttaatagtaagagtttttgggtctgttaaaatcggtggtgaaaaacacgcccacgtggccgactgttcatctccctatttttattatattatttattttctctaattattattattttttcgaaaaatagttattaatattattaatattcggctggttcctcttttcgtactcttcctcagacatccactgtcaataaaatcatcttttattttaactgaccaatttgcccccatcaattctcaattttattatgattcacattaaaaattaaattctcaattattatcattatttattttattgaaaaaacattaaaaaaataaaaataatgtatctaataataataaagagtatatcaggttgccctctacacactacccaatctaaaattcaaaaaataaataaaaatgacaagaagacttgcctttgacaataagacttttcatttttgttcttcacatttatgtcataaatcttatttatatatatatttcaagccactaaaaatataaaaataattatgcttcatatatattaaatgtttaaagaatgtttgagaagcaaaatattacccatattatatttttaacttaagtattgaaattaatatgtccatcttgagtcaatccaattatataaccaaaattttaaaacattttttacatttatattaaataaaaaccacaactcatctaattttttaatatacatatttttcttcaatcaatactatttataaaaaaaa

SEQ ID NO: 188512 - DNA, 2838 bp, Cannabis indica
tggactctggggggtctgaattattttcaaacgagatagtgaatttgttcgaggatatgattttgcaatcaactcctttcatccagcatatacccaatccccccgatagaccaatgggaggaacataatgcattccttcaaaacataacttattacatagtcttagaaacttactttcttgaagcctcacttccgagagaagaagaagctcgagatggtgttgacggatcaaggtcgccaattggcgaactgtcgtggagctcccgagaccacgatagttccaagcaatgattttcatggcgattctggagacttttctgggcaagtctccgaagccccaaactgaaaatcctccgagttgatgttcccattagtggtattagaattcgtcgcttgttcctccaattcagtaatatgacatccggccttacttttccccattcgttcaattacaacaaaatggttatcaaggtctaccttaaggtcgaaagttttcccctcccactggtgatggattgttgcagcaactcctttttttgctttagcccaatttcaccatttgaatggttttggcgaagctgagagagaagctccagactttggaggccgtcgccttctcttcgggccttcattagaattcttctcagaagtggatttgccacggggtcttccccttctacgaggggtatgagtatgttcatgacttccaggggagaaagggggagtgttcagagatttcttctgggtaggagagggcctgtcgatatcctctttcgcagagggggccagatgtttaggaatttccacgtataaggaagtttcctctacggatggatgtttattcttggccatatcaattgcttgagctgatgggtaaaagagaatgccatcagaggcctttcttttccttgggccctggagatgctcatccactctaaagtcttcaacatcaataattggattgaaaaattgtgggctctctgtggtacttatctaccgttaaggagcccattaccaattcatgccctttctgttgggcccaacagctagaaggccatttgatcacgcaggcctgggagctaagtggagaagatgtgtaagggatggattgaatattgtcttctgaggctggccctattgggcttaggtatcccatgaaaaggactgctctcgttgaggggggcagaagtacatgcagtaccctgcgactgattatgctttttcggggtggtctgtaaagtaatgccatctctatgctccttgtcctccttcgacatggaagtttgcaactcattttggttttgagtgtggttttgtggtgagttctacagtatccctttttcaagcaatttgcccgataaggtaatattggtgagaggcattggagtgttgttgggtgcagcatcgatcaggtcctggataataactcttttggcattattaccaaatggggcgaactctcctatacccggtaggtttaccaacagaagttgggtaatgaccgcctctgcattcgacggagcgttggctggggcgtcgtcagaatctttaactatccggcgcttagatggtaactgaagacggcattccctcatttcgtcattctcagcatgttgtatagccttgtgcaccttaaattgattacgcaaagtcgggtcctttcccagctgcttctgtaaaacccaatcttggaaccatttggccaggggagtggtgaaggttgatttttcttttgcgtcattcttgagccaaactccatacattggataatagttgccatgggcgtcttttacaattgttggagccttgaagcagcatccttgatcatgattaaggattccacatttaaaacaaatctttggaagcttttcataccggtattgaatccataaatcgttcagtctctgtcttcgaaggaaaaaacccgagaagatgggtgagtcaaggtctatcgtggctctgaaccttaacgtgctcattcccactgcatcttcaatacccaagggtaactcgtatacaggtgaagccttggcagcgagttccttaggtttgaaaggttccaggagaatggggggatgctctccacattcacccagattggcgttttgttaaacttcacttcggctggggttagccaagcaggccatggcattatgacgatgagagcaccacaaacaaaccatggccttctagccaacacgttcattgcatcatctctatttgcaaagttgaattgtatgaggcctccctcaatctctttccatttccatcctttaatggcgtgccaagacattttgagtgatccttggatggcggctttctcaaatctgtgtttgctgataatcttcccaagcaatactctattggattcctgcagttcgtccacctcgcaaggattgagggtgaaggtgagttcatcctgggatatttgaactgagtcttcaaataagttacttacaccagagggatccatagaggatgcgactagcaagaatgtgggttaagagcaattagcaacaattctcttatgcactacagatagcgaggcccctattgagcatttcattgagaggaaaatctttgaagacttacatgccttgagttgagaccactgttcaagagatacttggagaaagactccattgttattgtcgttgtcagttgttacacaaatcaaatctctttaaagaaaatagcatatatatattaatattactgcatagatataaaatctaagaggtatatatatatggcttgatctggaagaatagaaaagtagatttcttatgctgccttgagcatatacaaatcaaagtagtctctccaggctttaatttg

SEQ ID NO: 188513 - DNA, 2987 bp, Cannabis indica
aagtcttttgctttcttgaccctcaaagtaattttttttttctttttctcttgtttggttctgtaattaatcatgtttagttgataagaaagatatgggcattttccaaacacaacccatgttctataatctataatgcaactcctttttgctacccttttgtttgcttcttcttgttttggacctttctcactctcactttctctgatatgtgtatctgggtttccttataaaccattgatttgctaaaaacctctggggtttggggggtttaaagttccattttttatttttaatttttgcccttttttcttattcaagaaaagttcaaaactttctttggtgttttagattttgtgggcatttctattttagccacttaaataattttttttaatgacagaatggtaaaggtggcgtttttttttttctttttagtcttaaggtttttcttttactgttctggaaacttgaagctgaggtgggaagcagtgaagagagaaaatttgtcttcttgagagttgagagttttggtgggtggcattgaagggtttttcttcttcttcttttggctctttgattttgtttcctaaaacagaagcttttccagcagtagaaggcaaagccaagccaacaaaaaatggaaaaattgttatggctatgtcttctgctagttgggtttttgtcaaaatcacattttgttggtgctcaacttcaagatcaaactacattgtcagccattaacaaagagctttcagtgcctggatggggtaacaaaagctcagattactgctcttggcctgggattacatgcggttacaaccattcaatggtcataaagcttgatctttctcaccatgaactcagaggtaatgtcagtctaatttctgagctcaaaggtttgaagtggcttgacctttcttacaataatttccatggttcaattccttcaacttttgggaacttgtctgagcttgagtttcttgatttgtatcttaataaatttgaggggtctattcccccagagttgggtaacctcagaaaccttagaacattaaacctctccaataacttgcttgtaggagaaataccagatgaacttaaggggctaaagagattgaaagattttcatatctctagcaatagattgagtggttatattccattttgggtggggaatttgaccaatctgagagtttttacagcttatgagaataacttaggtggtaaaattccagacaatcttggctcaatttctgagcttcaattgctgaatctgcattctaataagcttgaaggtcctataccgaagagcattttcggtttagggaagcttcaagttttgatcctaactcagaataatttgagtggtgaaattcctgaagatattgggaactgcacaggtctttctagtataagaattggaaacaatggcttcactggtaccattcctagaggagttggaaacattagtagccttacttactttgaagcaaatgataataatctctctggtgagattgtttctgagtttgctcattgctctaatttgaccctcttaaatttagcctcgaacggttttactggaacgattccacccgagcttggaaagcttatgaatcttcaggaattgattctctctggaaatagtctgtttggagacatacccgagtcgattctcgggtgcaaaaatctgaataagctggatctaagcaataacagaatcaatggtaccataccagtggatatctgtaacatgtctagattacagtacttgctattgggtcagaattcgattagaggagagattcctcatcaaatcggaagctgtggtaaactgcttgagttgcaaatgggcagcaactatcttactggcactatcccatctgagattggtcacattaagaatttgcagatagctctgaatttgagctttaatcatctacatggggcacttccagctgagttaggaaaacttgacaagctggtttctcttgatgtctctaataatcagctctctggtaacatcccatctgcattgaaaggtatgttgagcttgattgaagttaatttctcaaataatctgttcaatggaccagtgccagtttttgttccatttcaaaagagtccaaattcaagttttgttgggaataaaggactctgtggagagccattggattctttatgtgggaatgctgatagccttgatcaacagagccatcacaaggtctcctacaggatcatcttagctgttattggctcgggtttgactgtttttctatctgttaccatagttgttctcctatttatgatgagagaaaaacaagagagacaagccaaagctgctgcaggtattgaagaagaagtggtaaataaccgaccgacgataatagctggaaatgtttttgttgataatctaagacaagcaatcgatctcgaggctgttgttaaggcaactatgaaggattcaaacaagctcatcagtggaactttcagcactgtctacaaggcagttatgccatcagggctgattctagctgttaaaagactcaaatccatggacaggacaatcattcatcaccaacataagatgatcaaagagctcgaaagactgagcaaactctgtcatgacaacttggaaaggcccattggatttgttatttatgaagatgttgctcttctactgcatcagtacttaccaaatggcacattggcacagcttcttcatgaaaccgctaagcaacctgattatgaacccgattggcctacaagactctctatcgcgattggagtggcagaaggattggcttttctccatcacgtggctattatccatctcgacatttcgtctgtgaatgtttttctagatgccaacttcaggcctttggttggggagatcgagatatcgaagctcttagatccatcccgaggcactgcaagtattagtgcagttgcaggctcctttggctatattcctccaggtaaat

SEQ ID NO: 188514 - DNA, 3778 bp, Cannabis indica
actatgtgtaatcaaattgaatcaatttttaattaaattttaactgatttcattatttgccatctaattcaatacaattaaaattcagtgattcaaatttaatctaatcataattagatattcaatttattataattagattagtttggtgtaattggactggtagggatgttactccatcagttcctgcacaagattctacagagttcagttcatcacagcctattcaagttcacttgattatatgtaatgattgatactgttatcacatatatactaggaaattggttagggggtaaaaagttaaattgcatcattcctagtatcttacattataaaagtgaagtaaaggctattaagaaatccgatctctaccataaaagaattgtaaataaacaaggctttcctctgtatactaaaacttgtaagcttttataaggtaaagcaagatagcaaactcgattactctcaacggcacaagctgatgcccctgataaagttggtccctcttaaagatctcctttccaacactccaggagaagctcgcaaaatatgaatattgaaacaaaagtcagaaaattcaataaaggctgtacccaaagaactggctgataatgatggcgaatccaagagcaatggctacaatggaagacgcccacgtcagcttctcagtaattctgggaatcctatcctttaatgcctgactacatgatcctatgaatactgtgtaacttcccattgccacaacagtcccaaccaaaaacattatcagaaaggcagcacctgccaagcgagaaggtaaagcaagagcaggtaagaccatcatcagcgcatctggctgcaacccgtggacaattccagtggcaaaagtagcaaaaccaatcctcttcttaccaagtgaaggactttgaattgcttcataaaccccgacatcacactcaccattttctaatgcaacacatggagcagcaacttctgaagcttccttgatgcccatagcaccaatgacaagaagtgtaaggcctactactcttgttccccaagttcggataatttcaatatgaagcttatccttgagcaacagaaatattaatccaaaaataacctgaccagcatcatgcccacagccccatagggctccaactgctgcactttcaatcctggaacacccaattgaaagaggagccaaagcagcaagatggtccggccctgataaagtgtgtaagcaaccagcaaagaaaccggtccatgcactacttagtagttcagtctggatcagtgctcccccaactgcagcagcagcagcaggaccacctgtcctagctgcagtttgaaaagttgcaagagctgcaggtgcgaaaattggttgaattaagatcatagcaagcgcagaaagcataatgtatacccctgcactagtggcctgaaacacatttgcaataaggaaattgtttagcatcttcacattttttggtcaatgatgagatggaaagtcgatcatagcacaaagaatcccaaatcacataaattttctcaccccataagatgagacaacacataaaaaattgtcccattaacaggaactcttgcaccataaaatcagaagttcatactcaagcaacaatgtgtctcaaactcaactgtcaatgtatcctagatgctcatagaagataaagaaaatactaagtcgaaagcatttgttaggtacatgggtttaaaatctacaatcatcactagctcatcgctgtcttgttaagctaaagtagaatttagccctaattttcacaaacattttgaccaacaaaaacttacagcggaaagaatacaacataatctataattgaagaaagcttctcaaccattagtatagattcttatttataactcataactaatttagtaggacaaagagaagatgaatcaaaggtcaagttgctaaacaactgtccacacgcagcataaccacccaattgccaattctgaatttccaatttgtatactaaataattctttaaaattataagtcaacatttacaaactcagacgagagaaccaacaaaagtcagaattattggttctttctagtacaatttctcagcaaacatagacatacacaaaaccctccaactaaattagcccaaattctcattcgccattgcagttgcatcaaaacaatgataaaaaccacaaaaggctaatcccaaaagatcgacataaaatgcattagcaaatttattcaaaaattaagaaactaatccacaattacgacaaagttcatcaccgttttgtgtggctaaagcaaaatcattaaaaattaaataattgaggaaaatattttaccttgcttctttcaaaagccccatttgagatctgtttgagattctgagattcaggcaccgactcatttgaagagccatgaggggaagaagaaggagaagcagacgacgaaaaacagaaagcctgtaaactatttgacggagtagagaatgacgaggaggaaggagaagaagcttgagatttgcagaacaacgaggtgaggcgccttaactggggaggtgaagacgggagaagggtgagttttgtagagtcaaaacgagggagggaaggagagggtttgaaatagaatttaaaaggagaggttgcagacgaagaggaggagaggagcctgtccatggcttccttctgtgtcagaaactctcctccgttccgtctctgcaaataataatttacatataattttctttgtgattattaatagaagaagccattagattagagtagagcgagtcaaagaaggttggtgagaaatgagatgaggtaattaaaagcaattagaattttgaagagattcagattttgaagatagataagccgtggtatgatgagttctcaactattggacgaagacgccaaccacttgagcagctcctcatcaatgtggttaatccccacgttgttccctcaagcccacacgtacactcatcgcgccaccacacgcgcgccacacgcattttcaaatccatcatcacataatcgctccctcacgtacggccatttttctccaaaccacgtattcattctttaaagtttaaaccctatataattcttatttttttttttaaccaaattcattatcattattattttttgtaatgaccaatttattgataataatcaaaattgagtaccgtaagagcactaaatgagtaaaatttgagctactataactaattttctaaaatataaagaaaaatatttaaaagaaaccttccatcaaatgagttaaaactgcctggaaaaaaaaaagtaaaaactgagttataatacattttttttaacttaatgaataatacttttctataataatataaatattatattaattttattaatttttttaatatatgagtgtgtcataatattatattaatgtattagatttctattataaacgcaatttttttttaaaaaaaaaaaatgtattagatttctaaaaaaataatacaatatttaaatgatatagataaaaaatagatggtgtaatgtaaaagtgtgaggtaaaaaaaattaatgaagtattttaaagaataaagtagagaagagtgctctaaacctcctataatataaataaaaaataagcatattaaatctttcgggcatgccttattcagataaaaaaaaatcaatacaagctctccaagtcctgttaggctttgggacgagaataggattggctattcacgagggataaaacacctcgcgtataaagtcattgact

SEQ ID NO: 188515 - DNA, 1769 bp, Cannabis indica
ggggtagctcagttggtagagcggagttttttgagtttgtgagacaagtgccaaacgacaaagcaatagacttcataagtttaagatcacaagtcggttcgtttcttttccctaggttgataacatgacactattttttttaacttttaataaaaagtttacttcaaaattaggagaagaattctatctaggaaagtgaacatgccagacaaacttgttcctctgtctcctaacctaacccaaaaacagaaatccatgctctacttctactcatattctgatattgcgtgtctttatagaccaaattcatcacacactggctctgccactcacaccacactagtaaggaagtaacaactctttgacacaaaaaaggcacaaacgacacagattgtaacactgtaacaacaggtgtcgttttctgtaatggcgtactgaagttaacaaaaattaattacaatacaatacaagattaggatgagaaggaaaatcttaaatgaatccaaatcttgaaattaatttaattccgtagtagtagttgttgttgagcttccgtgaccaacttcacctctgtttggaaaagtagaaccgacagtgagtcaatggagaagtagacgaacccacctggcgagtgagtcacgaacgacccgaaactcgctccgaccacgcagtgccacgctggtccgtacgacaagtcaaactcctgtataaataaaacgacgaccaacaacaaccaccgttgcaatatcaataatcagaattcagaaacccaaacaaacattattggagcttagtgtacctttttgagagctctagcgaggagggtggggttgggcttcggacgagtttttgttgtcgtttttgtggaaacgacagagtcgaggagcgatctggtgcttctcaaggcgtgttcttgcatgtgggttggcatgtcggatgatctcaaccgtacgttgaagcttatggctacggcagccaacttcacatcttcatttgcggaccttaattttagcgaggcagctttgttttgaatttgcatggcttgctgcttctcttgtttcaattttccatccattaattgtatatatatatatatatatatgagacctataaatatacaaaatggagtttgtgttgaaaagaaagaataaagttgtttcagaatgaaaggtgcacagaagcagagttggtgggactgggagagttggaagtttgactcgccttttctgaagaagaattttccgagtttttggggtccaccaggcaccacaaaacgcatttgatataacaagtaaatacatgcttcaatgcttcctaataataaatagatattatttttagatttatgttttataaaattatagattttattttttatttttgtctatttgataattcatataatttaaaaatagtataaattaaaatactatatatcatgaaattaacgaatggggcttttgattatattaaaataaaaaatagatagacattgagctcaaaattattttgtagtactttaaaataataaaaaaaaaatagctaaaagtatcaatttagatttagagtgtcatattataattattaaaataccaatgtaggtttattatttactaatggcttatttgatacgctgtataaggattgcattgtattaataataaataatattatgtatggataaatcaatgtattgtattaattattacgaccaaaaattttaatgcataacaaatagtttcgatttagcttatattataatattttac

SEQ ID NO: 188516 - DNA, 2926 bp, Cannabis indica
gttgcatttagtaaacctgagcctatgaggcacacgaggcataaacttgtaagtaccacaagtacatcaggaatacaacaaacgagtgtcgttaattgaaagatgagatagaaagtctcatcgcgcgaggccacttcaagcaatatgtgaagagacagggcaatggacataaccagcccaatccgcccaacaacccaggcaacaaaggattacaacctccacctgttgaaggagaggatatcctggttatctcaggagggccacatattgcaggagagagcaataacacccaaaagggcacgtgaaggtagtgaagaacgagcagtctacatttgctccagaacctttcaagaaagtaaaaattgaagagcctctgattatattttttcggaggaagatgaaaagaacgtgaggtaccctcacgtcgacccattggtaatcaccatccaactagccaacaagaggataaaaaaagggtgctgatagacaacgagagttcagtgaacatcctttacaaggaaacactgaaaaagatggggctcaaaaaaagctaaattaagaccttgcatggtgaatctttgcggatttactggcgacagtgtcgctagtcaaggaataatcgagctcgcattaaccttgggcgaagcacctttatccaccacgataatgagagactttttggttgtcgatctgccatcgacttacaatatactgctgggtcgtccagcattaatcagactaggggcagttagttagatcaagcacttatccctgaagttttttagacaccaatggggtgtgggagtagtgcgaggtgatcagatgctggctcgcgaatgctatcgcatagagctacagcacagaaaagccagtcaccaattaatggcaatattgacagaagtaggcgaaaagaaagatgaagatcttgatcctcagattcaagatgaaagaaacttattgaagcccattgaagaattggaagaagttgttctggacccaagaaattccacaaagtttgtttacattgggaagaatctggatgaacaattgaaatagcagctaataagttttttttaaaggcaaaccaagatcagttcgcctggagccatggagatatgatagggattcaccctaatattatctgccatcatttaaatgttgatccaaactacccagcaaagagacagaagaggagacccttggattccgagagacaaggggcactcaaacagggagatgataagttgttggtcaacgactttatccgcgaggtgttttatccctcgtggatagccaatcttgttcttgtcccaaaacccaacagaaagtacttgtatggattggaataatccccaaggtagtgaaataagaaatttcacaactttatcatcaggcaaggatttaacaaaagtctccatgaaaccttcttatacttcagaggaagtagcattgagaatggtaagtatattactactatatgttgatgacatgcttctcatcaacaaggagaaagccaaagttaagaatctaaagaaagttttgaggaattaatttgacatgaaagacttggaaaatgcaaagagaatataaggaatggagttgagaagaaactgaagagaaggaaagttgactataagtcaacatggctacatcaacaaagttctagagaagtattctatgacgaatagcaagcctactaaacaacctatgacaactccatacgtgtctaacaagcactgtcctacttcagataaagaaaaaaaacggataatggaaggagttccgatatgcaaatggagttagtccatcataaatctgatggtttgtacaagacaagacataacccatagcataagcagtttgagtagatacttagcaaacctaggaaaagagcaccaatttgcattgaagtggcttctgagatatttagcaggaaatggtcaagaaggtctactttacttgaagacagggaagggaacaaactcaatttggaggggtttagtgactctgactatgttggagacaaagactcaagaaggtccacatctgccttttaattcttagtttgtggaaattgtgtaagttagaaatcccaacttcaatttgtggtggccttatctactacaaaagtagagcttatggctacaactgaagccattatagagtgcctatggatacaaaggatgttaaaagaaattagtctgctgaaggacaacactgtgatctacctagacagttaaagcgctattcacttatgcaacaatcacatgtatcacgacaagtcaaagcaatttgatattaagtactttttcattgggaaaaagttacacaagggctggtaaacattgataaggtaccaacagaagaaaatccttcaaattttggaaaagaagtagtgacttctcaacaagtttgaccatttcaagtcactacttcggattggtgttggaataaaactctagtagctacttttgtgatgctgctacttagttaagtatcctccgatgtggaatttgttggtttcagagcacacttaactaatttgccacgtattaatgcactacaggataaagaagctaagttagttgttaaagggggttattttagttatttttcagttacctttctttcttgcttcttgtaataaccaattctgttatattggtttacttctcagtatatattcagctctactaagctcattgttagttagactgaattagagagagaaagagagattcttttgagtgagcttgagagagaaactctgtactgggagagtgagatagttctgagaattgttcagaagagagagattgagggagcttttgttcatggctgccttagtcgatgtaaactcgagcttggattgatcttagcgcataacactgaatttgtgattggagttcagaacaagagattagac

SEQ ID NO: 188517 - DNA, 5056 bp, Cannabis indica
agtaaccaattgttacttgttctgtttctgaaactaatcaaactcttcatattcttcaaagatctgtttttcttcacttcatcagtcagtgtgggggaaaatacagaagaacaaaaaataatatttattattaagacatgtaaatgtaatttgtatctgctgtaatcatttaagatgtatttcatatataaagatacatctaaccctacgaaggagcttagcctgatactgtaactagcagcatttttttttctttctttttactttctattgaggaaaaaaaaggaaaatattttcattttattttttattttaaactaagacacatgagaaccagctcaggtacttggttggtattcttgtttcttttgtcgacaccctttacaacaggaggaacaagggagcaccgttacctctgacttaggtggctgaagatcatcacatcatttatcaacaaatgccgattcagccaagtcgatggcacgagcaagagcagcagctttgttctgacactcacggtgctcatcatctggatcactatcagccactatcccagcaccagcctgaaggtaagctacccattcacggcgcttaccagcatccttgtacgagtacatggtgtcaaaacgggttcctgtcggaaacacaatggtacggagagccagtgctatgtccatatcaccagtgaaagacacacctccgaatccaccactgtagggtccacgcttcgacacctctaattcatcaattagttccattgccttcacctgcatttcattaattacatatatgaagatacaggttatagggtcaaaggagaaaagtatactgtaattaagcataacttaaaaaccatgaaattcaagagagggagtggaaggaggttgcacggttctcgtttgttctttttactttcaccataatttcaacgcaatctaatgctatatgcatagttaaaaaaataaaataatagagtagatcatgttagttaattacctttggcgctccactgacagttccaacaggcaaagcagcacgcaggacatcccagcaattgagagaatcacgtaaatcaccagttacctagatatggaacaagttagacataccatctattcatgaatttcagcacaagaaagaaatatgtacaatagaactcatatgcattacaactgtggcccacgaaattaataacatatacaataaagcataatgtttcatgtcacaaagtaaccagactccgagcaatggttctcaccgtggagcttatatgcatcacatgggaatatcgttcaatatccatcaacttttcaaccttcactgaaccattctttgagacctacataaacatttggcattatcaaaattgggaaatgaattttcatttcaaattcgtgccaaaggtaaaaatataaaagaaaaattttcttagctgctaactaatatatctttgttcttgtaaagctgggtagaaaattttgtggtcttcaaccaggattctcaaattttgtagaatcattaaaggaaaaacaataactttattgttgttacacagaaaaggatgcaggtgcagcatagagcttcacattgtgcaagaaaaaggagtgacaacgtatccagcaaccaaacaattttttcttaatttaattttcatccctttatataaaagacaaacagcaaacatgacgtgagtgcacctttctttatcttttatcaatcttatgattattaatatcgactaggataaaactatttctgaacatagaatgctttttagttcaatgaaatgagataatgcacttttaaaggattataaaaagtaatgatttcacaaacaaagatagggtgtgtatgacaaaaaaataatgcacacacttaagaaaatagaatcatctgagaaattatgatatgcaagaagttcaagttcattttgggcttaaatatatgtccacattagaaagatatagctcaaggaacaacctttccaacatcatttcgacccaaatcaaccagcatgacatgttctgcacattgcttttcattagcaagtagctgtgtcgccaaaatttcatcttcttcagttgtcttccctcttttagcagttcctgccagaggtcgattaactacctttccctgttcacaagaacattaatagacacaaatatttgcattgcattattccctgccctggtaaaaaaataaaaaagaagcatgaactaaacaaaacgaagttaaccttctttacacgagtaagaatttctggacttgatgccacaagtatgcaacctctaccctggttgagataacaaaagaattcataagactaaaaaacagacagaaattaccatagtgcaaaaatgttaaaaaaaaagatattaacctgcaagtaagccatatatggacttggatttactattctcaatgctctgtaaacctcaaatgggtcagcaaatgttcgtcgttcaaaacgctgagacaatacaatttggaaaatatcccctgctagaatatgctcctttgcaatcagtaccgctttcttgtactcttcacttgtcatatttgaagtcttcagagaaggaccaaaaccacgagtatataaatctacagaacctgcactcagccttggactaaaaattggaaaataagtaaataatattttgagcaaatcatcatatgattcaatgtgtgatgagattaatcatcataaatgtcactcacggttcagtagtttgtactctagcaagtaatgattccaagcgtttcataccatccttgtaagccatttcaacggacgagtagcggtcaagccttacccagtgaataacatatactttctgaaaatggaagaaaaagccaagctcttgggaaaaaacaaaaaactcattgacaaacaagtgagctcaaatcctcaacaaatgattaaatgagagaattcattccgttatcaagtgatactaatattaagatatactgccttctatggattttgatgagccacgtttcacaattatactcacggtcaattaagatcgaaactgtcaattgagtactcaatgaagacaaaaaaacatattccaaaataatttgcacaggatggaaaatgcaacaaaaagaagcatcaaagctagatttgcatctttagtaccttctccacatgatcaaagacaatcacgtcatcataaaggcctacgtgaatatcagggaggtttccatcatccttaggagcctttgaaaatggaatttttcgcttttccacataccgaacagtgtcataagaaaaataacctacccaaccacctgtccacagtaaaactcgtcgattaataacaagaaaacactccaagatgttaaaaatattgaaagggaatacaatcatcttattctcatcaaataaacacagtaatctgttgtggtgaatattgatacagtaagccaatctagtttaagacctgcaacattttaaaggatcgagtatctcagatttgcaacacattggtattattcatgatcatgtattccttctcaattagaagaagaaaaaggtgagaaacttacttaccactggaaactatttcaatatcagcttaagcatgggaatagataatataattatacaattcaaaattccactagtatgtagttacaaaacaatgttaaaaagcctcatacttttgcatagaagttacattaccacaaaatgcatctggaagttcatcaatgagttggggattccaaccatcagaaattcttgcagggataaccattgggtcatccacaatctcctcagtcaaacgcccttcttcatgatccattatggtgaccttattttcttttgctacaatctccattgttggctgagctccaacaacactgaaacgtccctatacaaacatcagagcattgaattacatgtcagtgacacgaaattgaaaagtaaatgcaaaaaaaaacaaaaaaagaagcaaaactcacaacagctgagtcatggaaactgggctccactgattcacatagaaagcttggagcttctctatcatcttccttaacgagacacctgtatgccagtatcggagtaagctggtccgagaatatgcattggtaaagtgggaccaaattccctttcttcgccgcttcttggaattttctcgaatcatcaactggaaaacgacattaaaaagtaatcaacaaatgaaattttaaaaaaataaaacaatttcagcaaatcatagctccttaaattttcattttcctgatttttaatgtatatacatgtattgtgtaaaaatatataactaaacaaaaaacgacacaacaaagcagaaaatcctcgaagccacttcttttttttttatttcaaatatttcaaaaacatgaagaagaagagaaaaaaaaaatctctagaaaacgctgcacatgcaaagaaaattatcttctgataaattccaaatgaaaaagctgaaacactctgccattggtaaaaaaaaattaacaacatgagaaaatcaacatcaaaagttgtacctttatctaaattttatcatttttctcgctagccaaacaatccgtaaatatcattatttatttatttttcttattgaaacaaagtagagagatagtactagtcaactactcacccagtgagagactcggaagtgagcagcaattcaaggtgagcgaggttgaggttcttatagtggtgagtccgccgatgacaggtaccggagagtggcggcgaaatgaagagaaggtgcaaagcgatgacttcaacgcgtgagactgcattttggggtggtcggttaccggaaagtgagaggtattttgaggttgtgtgtttgggtttggggttcaatgcttgtccatatatagtgcaagagttttgtaacggtaaacaataaagagtgaccagaattgcttcctcacacttaccatttacaaatgaagaaacattttgaaactcgtgcatgtgcttatttagacgagcattcctattggatggtaccttatagacgtgtcgcctttagatagcgatactttccaaagttattacattcaggta

SEQ ID NO: 188518 - DNA, 4678 bp, Cannabis indica
ttttttccacattgtaatagacaaggataacaactaaggataagaataacaggcagatttaattcagaaccatgttaaatatacatttattatttctatgacatatttattacgtaaactatttttggttaacgaaaattaacatacttaaacgttaaaaatttattaaaaaaaatgagaaaaataagaataaaattaatagatgtattttaaatgattttaccttaataaaaaattaaaaagtgaaagaattaagttaaaagcatttagagtaattttataatgatacatcactagttcatatcactccattatatgtatacattaaaagaaattgactactcactcttacatataattaaatctataatttatatttattttttataaaggaaacttaacaaattaccgaaatcaaattttgagaaaaagactaacgaattaaggctgaaaaaattttgtaatacattatgaataaagagcttaattaacaatacactcctttctatttctcccctagcatagtacataaacaatctctaaaatagtaaaattaaataagagacatgatttgaaagtattctaattagccttttccctttctatggcccaattcaagatttgcaacatatttaggtagagtggaaggagatatggacggaattgaatttgctgggtaaaagaaagaaagtaaatgtaaaagaaaaagaataagttagcaaaacatataagagaatctatattggaatagatgcgtactatgatatgacacacccaaaataaacaaaattgtgaaaattaataaacaattcaagcatatctagaaagataaaaacttcattaatcactaataagtccaagataaaactttaaacatcatataatgctgttcattgtgaccacaaaagaaactaacataaaattaaaccgaacatcagagctcaatttcttattgacattagagcattttattgggacgactaagaattgcaatatctaaatttatctagtttggtggagcgaagaaaatctcagaagtagtcctctttgatcggaattccttctctacatcagactccacattgaatgcagcctccagcacctgtggagataaagccttccacactgaagtccttccagccaaatgggtgaaaatggggctgcaattaacaaaacgaatatattagtcaaataaaactcaaaagggtgccaggttaccataatatatatgtacatatataacaaaatcatcatcatttagaagtgtgagattgtgacttactttggggttgtgataatagagaaccattccaaaccttctggatcagcaatctttgaaacaacaaaaaaccttggcacaatgaacaagttgccacctttaacagttgtttccaagacccttttgccatctacgcctacaacttgaacacggccactgcccctaacaatataagtaacctgcagagcagagtcacaagaaaatccgggagagcacatagcgctaccatccaacctcacaaggtcagccccaagcccaacctcaccaaccaaagggaggttcttagtgttcagtacaacgacccttcctcctttgataatatcaacatctaagggagcctctaagcagttcaaggccattccttcgcggtgctccttcttcggctctggcatcttgaagtcatcagaaagcttgacaatgcccttacccgattgctttccaacgagggtcttaactacattctctttcaagtcccatgctcggccaacaaactcagttgagaaaccagtgaagattccatttgatccggtgaggaaaaagtcggtgaactcaccagccttgtgagctttagaggtatcccccataaagagaacaacgagctcagtgtcttccttgttgtaccaccatgtcacaacaccaaaaggaagagcaatagtatctccctccttaatggcgatgaccttctcttctgactctggaagtactattccagcaacaccactacctgaaaataaagaacaagatacattaatctcccaattgtcaaatatcaattactcccttaaataacggcgctattgtattaaatttaaaagacatggcatagcatactacattgcacaaaagctactcgagaacaattcacttaacatcaggttgatcttatgaaataaatttagtgaaattcataatcttgagttacacataaagagtttgaaaacaggggtttacaacaatatgaactgaaaacagatccagaacatgtttaaaaaagcttgcagattcacggaggcaaaattaaagtaaaactatcccatacatatatatatactaaatcattgggttttaaatatataccctataagaaatcgaataacggatgacatcacattcacatagatctaattaatctacagaacatatcacatatcgctcaaaaacatctgaattctcaaataaatttatcaagaaatcattaaaaaaaagtcacaaagacgactttacaatataaaatacagcctacaggtcttctaacaataagagagaaaacacacaattgatattaataaaaggattgaatttgacttagaaaacaatcaaatctacatagtgatcgcaatcatcgaatgaattaaaatataccttgtagtacgtaagcgactttagatgaatctgaataacgaggaagagcgaagccatttttctcgagagctagcttagctgcaccaatgttaccctgacgaagcatagggagctccgatggagcccaagagtagtaggatccaccatcgcctccgtacaccttggtggccaacttcggggaaagatcaagctccattctcaaacaagaattttccttcactttctcggaatctaatcagaaagttaagagagtatggaatttgttttgttagcggtatagaacgtgtgaggatggaggagtgaactacaggtatatatagggaaggtctagtaggatttcacggtcactgataccaatttgtaactgaattattttttttaaataaaagaataatatttttgaaaatttgaaacagatagcggataattatttaaatttaatttcaatataaaattattacgtttttggattttttttcatagaaatttacttttaaaaataaacagtttaagatatttatgtttatggggttggtagatttgattaagcataatattatgatgatggatgaagaataatatgcggaccctaccactttgtttaaatataaaattattttttaatcatccactaaattatttttttaagattatatagagataaattagattaaaatgagatcaatttaaaatttcaaaattcaacattctcttcatctaaattaattctacaaaatattttttaaaaaagttctagaaataaatgtgaataattagattttttttaaatatcaaagtagatttcttttgtaattaatgcagattagttagccaaataaattttaaataattagatattaaccgaaatattttaaataaatagataatgtttttgaataaatagatagtaaaagatagtaaattaaaaaaataaaagttagtttttttttatatatatatatataatttctgagaataaatttaaagttgagttgaaattgtatagaataagagattacatgttgactaaatacacgttacaagtgtttaacctttgggtttaatagattttgatgccttataccttggagtaactgataatactgttcttattctgtttattggatttaaaaaaaatgaaaaaatcgtccaaagaaattgagttttttatttcctaaatttccgttcatattttatgataagattaacttagaaaaagtaacagaatattatttatattaataaagaaagaaaaaaaaataccgaaatgataaggattcgaattgccatccaatagtttatcaatcaacattgtacttttcagataaaaaaaacattgtattgtattttccaatgaaacaaattaagaaacaccctttcattgacaaccaaaaatatgatcacaaattttgtgtacctaggttatgtttttaatttttaatttttaattttttttatgtgtatttttaaaattttataaatgtaaaaaaattatttattatttcttttaaaaaaaataatatttaaagttttaaaattttaaggaaaataaatataaaatttaaaaatattaaaattaagcataatctcaacattaaaaataacaataaaaaataataatattataaataatatattaatatttataggatttttagatcaccacttttgctctcacttatgagagcattttcttttaattttgattggtttagtaatgaaggtgcataagattaagatgaattgtggaatatgttattagtttttttaatgttttttatttttttaatattttttacaaaaaatgaacaactttttattaaaaatattaatgaacattaagattaataacctaaaactattttaagctatctaatttaattatcattcctaaagagtattaatgtttttgtttttttttgtttttttggaagggtaagagtatttaatgttttcaaagtaagaatcttttcattcaccaataaaaaaaaaaaagaaccttacctataatcaatacattatatatgaattgaagag

SEQ ID NO: 188519 - DNA, 2061 bp, Cannabis indica
ttttaaaaaatatatatactaatatatataattttttagaaaaatattaaaattaaaataaaagaaaagaaaatatttgaaattaacacataaattaaattaaaaatgtagaaataaaaaaaaaaatcaagaaaactacaattatttattatttattagtagggacttaatgttgtcaaataactaaaagtttaagaactgatttgacaaaaactaaaatttaaggaccacttatcaatatttatatatttaaggaccaatttacaaaaacaaatttaggaaccgagtttggggaccaatatgtaattattctttttctcatcctagttgtcaaaatttcgacaacgcaacctgtataactgggtccagaaacaagttgaattaacaaagtgtacatgaatttttatatacatatggatatattatatagtaaattgatgtaagagtagtatataaagctgtcccaaaattatccattctaagaaaattggcatacatacaacataactatgtcagaatatcaccattattttattttcgatatatttatatttatatatgataaatttccataactagaatgtttgttttcttgccctctggctactaggaagtgggtattaaaaataaaaaaaaatggttgttgtttgttataaacggtagttaatgcctaagatatatagctagtttagctaggtatagaaagagagagtgagagatatgccccacttaattttacaaccctcatactcacactatttttctaactccaacgtaggtagttaggtggtgtatatatatgagtatacatacacacacatatatctctggaatcctagttcatcagtagagctagctagttccaattttaattattatgataaacttattctacaacacttattgtatttttctgtcatcctcctccttcgatcaatccttattaaaactcatcacctttgttctttcagttgatttctggcctaattaccttgttcgctgtatttatagctactttcattgagaaaaattaaaccagaaagtttcaaatattccggaattcatattttacaatattaatatatattgattgatcaggtgtgaggcaattaattcaacccaaaattgggttggttttgttgttttttattttacacaaaaataatgaactacttacaagaaattgaagggaaactagtccacgataagctaacagagggtggcggttgtggtggcggcggcggcggtggtggtggtgatacaacaacaaggatcagacgaatatgggttcggggacccataatagtcggggcgggtccttcgggtttggctgcggcggcttgtcttaaagaaaaaggtatcccaagcttgatccttgaaagggctaattgcatagcatcattatggcaactaaagacatacgacagactccgtcttcatcttcccaaacaattctgccagcttccactcatgccattcccatcaaatttcccaacttatccaaccaaacaacatttcttggattacttaaaagcttactccaaccgtttcgatttgaaacctattttcaacatgaaagtggagagtgctcgcttcgaccaccgaagcggtctttggcaagtcaaggcctctactaccaccgccgcggccacacctggggccgggctagatagaaagagtactaattataatgatgatgggcgtacagagatggtaatcactactacaactgagtatgtaagccaatggcttattgtggctactggggagaatgcggaggaatcggtgccggagatcgaaggaatagagagctttggtggcccaatcgttcacacaagctcttacaagagcggtgagatttttagcggaaaaaatgttttggtgattggatgcggcaactcggggatggaggtttgcttggatctctgtaactataatgctcgtccttcgcttgtggtgagagactcggtgagctaattttattactactcaaacataaaatataaaacaacacacacatataacatacatattctactatgttatcatttatatgttact

SEQ ID NO: 188520 - DNA, 2617 bp, Cannabis indica
tatttattatttaaatacaatacgacttttttacggtttattaaaagaacccaaagtgatctaaattaaaaatataacaatcatatattcatgttgaactagtgtaaaataaattaatgtaaagatgctattgataatattgtataaatgttaatttagtgtgattaaatctacataagtaaaagatgctatataataattgttagatagcctgacaataataatgtgtgatagcttatactgatttattgtataggttgttttcaccggtataaagtgttgattcagtgaaatgatttactattacccaaattgaatcatataatactatggttctaggtactctaaccacaaatccacagtgatgttttcccccttccactctgaaagggtcaaaattaagctgcaacaaatgtgcatgtctcttatgttcaacatttatctactaacatgttaaacactgggatacataatctatcacattctttttcataacatgccaccgataataagttttcaaatcttgatacattttggttgtacctggatgtaacgagtaaggagaggtatgggcttcatctaagatttcctttctaatcccgccactagttggaacacgaacctgatccatgtactgaagcatcccactatttaaaattgaaaagtctttagcctgaccagttagaggtgggcatccgatctaatccaatatttttttcctcatctgatccaatctaattagtaactaattggatttagaaaatcatcattcgatccaatccaatccaatgtaattactacttggaattgatcgattttttaattggatatctaattacatacctaaattttaatattaacttaaaaatatagaagaaaaatatataaaaattaattatcactttttattaagtttaatatttcataaacatactattgtgacaagtgtaatgtagccaaaaattttaaataattaaaacaacaatatttctaattaataaaataaaacaaaacaaaacatcatgaaaataaatacataaaacaaccaagtattacaaattcaacacacaaaaaatctaataaaaatataataaatatgtattatatttttcaatattttttattatataaataatttttaatatatacaaatataattggattggatcagtttttaattattttgagattgacatccaataaccgatccaatccaattagaatctaacttttagcatccaatccaatccaattgtcattggatatccaactttttgtaattgaattggattggatcagttcggttcaattggattggattggatgatgcccacccctacggccagctaaggtacacatctccaatcacaccataacttttggatttttttctcaaactaatttccaggtgctcttgccccgagaatttatttgattatttttcttcatactccttcaatattttttatttttcttctatttcaaacctacaaaataaaagataccagaaaggatgaaattgctcaaaacaagagtaaaacttaattaaaaatatactaagattaacctaaaatagtactaaaaaaacctaacactaagacttcttcctgagacttaaataactcagggtctttcatttgtacatttctaacaggtttgaatgaagcatcaggttactaagtctactaaccataaactcgatactagccctagccatctcaattgctaactgaggggagattaacttagtactaaacacctactcgggacttattctactaaaggcatttgctactatattaaccttctcaggatgatacaaaatctcacaataataatctttcactaactccaaccactgtctctatctcatgtttaaatctttatgagtaaagaaatatttaagactcttgtggccagtgtaacttttacatttctctccatagagatagtgcctccatattttcagtgcaaacaccacgacaacaagttctaaatcatgagtttgataacactactgctcatactcttttaactgacgagaagcataagtaattaccttgttagcctgcatcagaacacaccccataccccataccctgtttggaagcatcacaataaatcataaatttctcttgatctaatggaaaggctaacaatgcaactataattaaccgctactttagttcttgaaaactggcttcacacttatctttctacacaaatatctaattcttctgtgtaaattctatcaaaggtgtgaaaatcttgaaaaatccttacaaaacaacggtaatacccaaccaaactaagaaaccttctgaattctgtagcagttttaggtcttggccaatctctaactaattcaatatttccccgatttaccattataccatctttactgacaatatgaccaagaaaagatacttgtaataaccagaactcacattttttagacttggtgtatagcttttgttctcttaattagggtgttcttcaaaaattagtgtctcaactctcgatatctgtttttcgatttaagttttaattaatttagttttttgattctcatcatcttgttacatatatgggatgatgttcttgtattggtgtagtg

SEQ ID NO: 188521 - DNA, 2068 bp, Cannabis indica
tctgggaattggatattcatctctccatgagtttgatggggtgtatactctcatataaaattgctgccccaagtactgccttgcccaattctccgacctaatgttccacattcctacattgtccaaagccatgtagattgccgtccaagccttgggataaacctacacatttaaaacatgaaaatatagtttcaaaagtaaagtacataatctaataaattgtattaagtttctacatactatggactatctaacattctctgaaaacgatggctattttggtttactaatcttaaatggctcaatcacagataacaattttggctattctttgtgtactggtttttgcttgctcatgattttgtttaaaatgtagaaatatggtgtaactaactataatcttataaatcttaataagtttcttggatgtggagataaccttctaacaaacactagtcctaaattcaaacaccaagacttgttatcttgtctatataatgatacctgaatagtgcaacgagccactccatctctcaaattgtagcgcaatctgctggctggagtccactgtccaccgtccattctgttcatgatcaaaataaatcccatagttaagaaaactaaaaaggaaacttactaatacaaagttttgcaagagaagcaattaagtaaactatatcttacttacccaacaacgaagaaggaatagccatcaatatgccaagactgaacttcgttttcccagttctggaaaacaatctccacgaattcatggaaattcgcactcaagaccgctgtctggaggtaggcaccaccaccagtggggctggtgggcatgcctccgaggttgaacactccaggaatcttaaagtaatcagccagtttcagcggcgtgtcgggtgcaacatacgacacgctgttcactgcgtacctttgtttcccattgatccaagcatttgagttcgcaagcatgatcgtacggcttggcttgatcataccgtagtggtacgaaccttgaggatttggtcttggcccactagccgttagattacgcctaacgaaacaaaaacaaaaagtttctgtctttagttattttctttgctataaaatactaacagagtcagagactatgaatatagtttggtttggtttagtttgagtacctaattgatcttgcctgattaacggaccaagcaatctgagtggtgggaccgccggggacagggccagaaactctctgaaaagagttgctgtagtgaagaacagcggtagtagtaagtaccttggtggtgaaacgagatgaaacgacgacgtagtagtcctttggaggctgattagcagtgaccaaaacagagtaggattgccccagatgaacatcaagtgaggcaaagctattctgaattgtatgagacccttctacctctacaagtttcagagaatgaccttgaattctgaagttaatggatgtagtaagccccacattcgatattctgaatctgtatgtctttcctgtaaatcaaaactatgttattaattcaaatgggagtcttgtattatctctctaggtgtttgacacttgtgatcgacacacacaacaataccttgatcaacggtgaatgtgtagccattccaacctcgaccgttgataagaagtccatcaggggaaggaaggtttcgaccactctccaaaacttgtcttagtctctaaagaaaacaccaaacacgatcaaattattagaccaactaaaaagtgaccattttgatactaaaaaaaggttaagtaagaaatgttacatagtgatttgtcttgtaccaatccccagctaggactgtaaagtctccagcaggaggaggaaaagggacaggaatgcgaggacggctccatattcggatgccgccaaagcctccggcagccttgtggaacaagaatgaagggaaatagaagaagctaccaatttgatctttaacttgaagaacaaatgtgaagttcctcctcggcataataggacagtttgtgccatatacaccatcttgccatgagtttcttctgtgttgcaatccatccctg

SEQ ID NO: 188522 - DNA, 1468 bp, Cannabis indica
aattcaatcaccttatttgtaaacatgatggatcatgtaataggtatagaatgagagaagaagaagagaatgataatacgtaattatctatgagagaggaagaagagaataataataactaattatctattttgaaggtgttttaattttttagtttccactttttatttattgttacaaaataaactttaaaaaatgtcttgctaatttcaaaaaaataattgcttttaaaaaaaggaaagaagtgatttattttagagaatacatatatatatatagtaaataatgtacttaacgtgttggtatattctttactatctttttctttaaaaataaaagatatttaaattttgacttaaggaggccaccaccatatatagtgaattacatattaattaaaaaaaaattatacatgataaaatagaatatataagttcttggggggtcatggcctctatacattgtcaaatacctctgcccctgcttatatccactacttcagagtgtagaccgatctgcaaggggtaagagatgatgtttggtgtagaatctttcctgctacgttgataggcctagatcaacgatggtacctcaaggtttgtcctgggtcaatatattcatggaaagtgcttgtgggtgcttttggaagtcagtttcctcaatccaaataacgctagatcgaacccagttatttggtagatgtgaaatagcaagacagcgaatacctcaagcattacattcaatagttcttagaggaagctgctaagaccaaaatacttagagagggcgccatggtgatgtcactcatagccaaactaaaggagataattcatctaaggttagaccttcatctcaaagaagtctacaccatgaacgattttctggacagagccgatggcttttatcaaacttgaagaagttaattcttgagccaagagcttaaaaaaccagaagaagaaattgccagactcccctgctcctgacactgaaacacagcgggcaatgggaaaagaggaaagaacagggggaagagatagaataatggtggtaaataggctaactcatctagtaataggaaagctagaacaggagacaggttcaacaagaagtacaagcctagatttacaacatactctattctcttagccccaagagaagaaatatttctgacgactcagtaaacagtgtcgtactgcaagcctctttccttcaaagagtcagggaagagagacatgaacaagttctgttgctacaaaataattacagtcatgacactaatgagtgtaattagttgctacaaagaatcagggaagagagacacgaacaagttctgttgctacaaaaataattacagtcatgacactaatgagtgtaattagttgctacaaagagtcagggaagagagacacgaacaagttctgttgctagaaaaataattacagtcgtgacactaatgagtgtaattagt

SEQ ID NO: 188523 - DNA, 3993 bp, Cannabis indica
tttggatatatttagggcgtgagaaatcactgatggattgatcttcaccttgtcttcatgcgaccaagcatatcgaggtttgctcttagaaacttgatcaatctagattttatttctggcgctaaacctcgattaatttttagtttcttgaccagcatagagagatggatctctacttcttctaattcctccactagtctaaaactgtttacaggatccccaaagttaggatctatgtctgcgtcctcgccttgggtaaactctcaatgcccttagctggactcactattagagctcttggcgggcaggtcttcctttttcttttggacagaatgatattgtagcatatttggtcagactgttggtctccctttagccacctgaaacaatgtttggtcaaaaacttgatgaataaatgataaatagacgtgactgcttttaggtcatacagagctggctgccccatcatgacattaaatatagatgctacatcaataattatgaattgggtcatggctatattctctgcaggactttcaccgattgtcaatgacaattggatgtatgctaaaggagttagtccttggctcgagaacccgtacatgaggtgtgtaaagggtgttaagtcttttaaacgaagccccatcttctcctacacagtcttgaagatgatgttggaggagactccataatccaccatgcagagtgctaccatcatattccctatttgtgtggttatgaatagagggtcattatgaaggaacctgacgagagtaacaccttcataagtgaaggtgatggcaagctcttcgacctttggctgtattgaatttatttcctctacagctaggacttcgtttctttgctcatgacgaagggtccaagcgtagcggtccaatgctttatttgagtgcccagtgatgtggggtccaccgatgtgacttgtaaatggccagcaactagtgagggcaacatgtcgttattctgttggacatgttcctagttttggttgacttggacatatcgacgtaggtgaggactgttcctcttatcaagaactcgatctcttctttcaagttcttcactcattagtgttgtggccaaaatctttataatcaacattactttgtgggatccctcttattgatgtattttttcatcggatgggcttcttacacagaacaatggcctgcatggccatcaggatagttttatgaaaccattagctcggcctaaaaactcactcatattcttggttgatcttttcctaatgtccctcgaaagatcactcataggtaggataccccctagaatgaatgtatacttcccttcttccgtcaggcctttgaactttgtggcctcaatcatgaacctttggatgtaatctatcaaaggttcttctgagtatgctttatttccaccaagtcctccaattaggaaggtatctttctgcaggatgagaactgtgtgtaaaactcagcagtaaaagtgtctcaggaatcaaatctccttggggacaacttaaaataccattgttatgcagtattacacaaggttgttataaatatcctacaacgaacatcctctatcaacccctgcagatccatctagatctcaaagtatttgatatgggccaaaggatcttctttcccattgtacattttccaagttggcatcttaaacttggttggtaagggtaacacgttaatgcgcagagaaaggcgatcctcaagccctgtcaagttcaaggttagagatatctttttgttggataggcgttgtataagagtcttgagttgatctagctatgcttgcattgtaggatcagctcttgtcgtcctttgtccaacaagctcttctcttgggttaataggaagttagccatacggattggcgagaattggcctattctgcgctcttgaaggatctttttagggcgagatgtatccatcccagttaattcttcttcggttttagttatcctaaagatcttctccaacctgggggcccattctatcaaataaaaaatccatgggcctcgggttagaccgcatttgagcattccaaggaggaacaccgttattgcacccgttattattatgacttctctggttagtgcgaacatcaatatggtggctattggtgccatcctcattgaggttagggtaggattctctactacgagacctacttctgctctgcctgtgtgggacatcttgccttcttttcatctctaggtaggtcttggaactgaccagtcctaccatatacccttttaggcaagatttattcataatttagttggatgggaggtgactttatttgggaaatagtggggcccactgggcatgaggtttgcccatgatccctagggtgttgagtttcccccaacacataaggagacttcccttcggaaggggtcccttatcagagcagttctttaatgcaggatccaatcctttcattgatctgtctaatcagttcatttgcctccctattacagtaattcagctccgctggtggcattgtaggattttggcttgtcgattcatccattcctggaattcgcgtctctactgggcgaaagcatcactcatagcagcgcatgtttcttcttgttcataatggaggttgtatgtgtgatcatgcacctaccctacgacctttcttagcctagctagctcagaattatcccccaagtcaacatggggtttgttgacacaggggtagccaacacctagtctagtttctctagtgtatacctgggggtagcccttgttgaaggaaccctcatgatactttgggcaggttgtccaacattaactgagacctgcctaatatttgttaggcctttctgacattaatcgagcctatctattgggcgcccattggtgggtttgcccgaggtggccgggcagggttggccagattatcaccaattgctgaaacactaacattgggatccacaaccaccagatcataaggttcagtggacacacttctccttgtcaagaccattatcgggtgaaaagagatgagatattcgtaagaatattgaaactctcaatgaaagcaccaaaaatattgactgggaaaatagccaaccgactcaaagtctaataaacgctaactaaccaccaataaagagttaagaataataaatatttagaaaggacacacaaaattgtagatgttcgttcccttaatatgttggtaatgacctactccttttttttgtattgattgtgagataatgtcacacatatccataaggtaaatagagtgaattttagctacaactgtgaaagtgtttacagaaaatattttctcgcaaagtgctcttaaatgcgtgaatatgatttcaagttccttcccttgtgaatttattcactatttatagcgggaaggttgttacaattagctccgtaaaaggagtgattagaaagtaaatattcctatattctagatggcagttatgatctgttgaagctcctattatcttgggtagatcaatcagatctgtatttgtaggatttagtttgagatatttgtagaagtttgttgaagaagaaatgaaggctcatgtagccttatctgacattcctatcatcatttcttttggccggcatattggccactcggctagaccctcctcgagacttgtcttttttgatgaagttacttatgaagcaatcgtggaaggtacattgatttgtcattctttggccggcacaataatgtcccgactagctgctatttggaacgcaatctacaatcaatggacactagcatcatatgggatctcccaggtacatttctacccgaaagttcctagatcatgccacgtgtaagtaccacgttagatgtaaaagttttgggctaacaatactaattccaaatttgtgagggggtgtaaatggagttagtttaaatgagttaagaagttagttaagggttttagatttctattatggttgttatgttttcggtctg

SEQ ID NO: 188524 - DNA, 1767 bp, Cannabis indica
aaacagagggttcaaaatggtataaccttaatatcacacattcagtaacgtatttacgaaattacatataaaaaggcaaaggtataaaaaaaatatttacataaaaaaaatatatatttaaattttctattaaaattagaatataaatgtaaatattataatataaaacgaaccacactaaaaacatatataagttattttttaagattaaggtgggtcaaagacaaatatatgttaatattttttttcccaaacaaaaatataagttaataaagttataaatatagaataattgatattaatttttttatatgctaattaatataaaagcaaagtcatcaaaatttgattgacaaaatctttttttttttcttttttaaaaagttaacatcaacatattatattgacaaaataatatgaataaagagttgatttaatcaaatttatatccaccttgaatgtatgtacactaatttataaaaggtcacaaagtagagatatttccagctaaaaaaacaaacttgaaatatatccaaaaaaaaaaaaaaatcataactcaatgtctaagttacaatcgaaatccttgtaatttaaatgtaattttatttaaaaaaaaaaaaatactcttatattatcatcacatctacataatatttgtttgaatgagaggaattgccctacaaaatcattaaaacaaatagtgagaaccctttaacaaacaaattgagcaagagaaatgtatataattttgtttcttttttggcattatattaagtaatgaatagttttaaaaaatacaattatttttaagagattaatggattaatatttggagaatttaaaaacaaaatgcttaactttagagaattatttaaacaaattttaattttaatattttttttttaaaaaaaaattataatagattcgattcatgttagagtgacatgtattcaataagcataatacatagtgatcactaatataggtatattctaatcttgagatagtgagtctcactaaataggtatattgtattcttattcttggaatagtgagatgtcaatttaagtgattctagggaataaaatagtggagaattttttcaccttttattttaattacttttgcatcattattgcagcataatcttttacttttcttttcttaaaaaaaaaaaataaataaatgttttttttgcttttacgatgcactctcttaaaaaagatgtattgatgtaccatttatctatttcaacatccaaaaaaaattaatctatttttttatattcgtgtacgttaagttatttaagatattatacaaaattttaaacaattcagaataatttataatataaaaagtaatgttcaagcaatttatttcacatgcgtataaatataatagtcacgcgtgtaatagactgtttgaatcatattttcggcgtattaattttttttttttgaatacctcaaaattttatagaacgttttaaataactataacgtacataatcatgggaaacaaaaattaactaaaaaattatttcaaatactaagacaaataaggatgcatcgatgcatcccttttaaaatgtgtattgtaaaattttcttattttttttacatatatatattttagaaaaatctttctaccatcagtcgttacaagggctatttttttaggagaaaagtctcaaccactaaatatcaagagtagcaagcgctctaaaaaagtaggaacgagaatttattcaaacataatatctacact

SEQ ID NO: 188525 - DNA, 4377 bp, Cannabis indica
catcagttgcttgatctagagaaggaacatatcgaacagaaatatctttgtttagaatttgatccctaacaaaatgaagatctatctctatgtgcttagaacgggcgtgaaaaacaggattcacagctaaagtgtggcactttggttatcaacccaaataactggtatttgatctatagaaacctgaagctcctgcaacagtgatcgaagccatttgagttcagcagcagcatttgccaatgctctgaactcactttcagtactagatcgtgctacgacctattgtttcttggcagaccaacttatcaaattgtctccaaggaacactaaataccctccagttgagcgtcggtcatctaaacaactggcccagtcagcatccgaatacacattaagagtcatagcagaggatggtttgagccataatccatccttgacagtgccttttaagtatcgaagtaacttcttgcatgcctcccaatgagtggaagtagaagcatgaaggaactggctgagtttgttaatgataagtgctacttcacacctagggtgcttctgtaaagcttgatgtcatgaaacggttcaccttctgttaaggacaatttgacactcatgctggtaggattaggactagcttttgcaccctccatatgtagttttactaacaagtctgtgatgtatttggtttgagacaaatacatcccagtatgatcacgataaaactcaactcctaagaaatagtgaaccgagcctaagtctttcaaagagaaagacttattcagattagcaataagtcgtgagataagagttgcatttggtcctgtgattaatatgtcatcgacatataccaacaaaatcacaatagtatgacctgtcccatagacaaataaagagctatcagctcgagagccctgaaatccccaagagacgagtgtttgtctcaacttgtcattccaagctcgtggagcttgtttaaggccgtagatggctttttgtagcaaacaaacatgtgttggtttatctggatcttcgaaccctggaggctgagacatatatacaatttcattcaatggcccatttagaaaagcatttgtgacatccaactgagacacattccaattgtttgtgacagctagagataacactgttcatattgttgtaggtttaacaactggactaaatgtctcttcaaaatcaattccagcctcttgcaagtaaccctttgcaaccaatcttgacttatacctgtttaatgagccatctttgttgagtttgaccctgtgaatccatttgcaaccaatgacattcatggagggattatagggagcaagggtccaggttttggcctttttaagagcacaaagctcactgtccatggcaccatgccatttaggatttgcaagagcatcttttaaggatcttggttcagagggtagaagggattcgggtaatggatgtttggttgctatgtaggactttggtttggaaatgccattttgaagtctggtgcgcatgctatgagttcaggtagggactgggacagatacagattggtcaggaacaggtatagcattttaggattggtgatttgttgtttgtggttgatgagatggtgcattggttggacgggatgaatctgtgtggggagtattgatagggacatttgctgaagtgggaataggagggtcagatgctgcagggtggggttggtacacatctgtttggccattttgggaatgaggtgggacagtgggctcattttcattggttgcagtaggattgagaccaataggagttgtgttaggacagtgagtcatattaggagaagtaaaaaactgagcagatggaaagatagagggagaagttacctgtgtatttggtgcctttgagaaagctggaaaaacttgtgcattgaacacaacatgcctggcaatgaacaaccggccttgtgaattttcacacagaaatcctttatgtgaggaggagtagccaaggaatatacattgttgagttcgaaaatccattttatatctgttatatggtctgtggtgtggataacatgcacacccgaatggctggagtatagagtagtcaggtttttggcccagtaatgtctcgataggagtgctgtattgaagaacaggtgttggtaacctgttaatgagaaaaacagcagtgtggaaagcatgccaccagtagctaaagtctaagccagactgagcaagaatggtgagtcccatttcagtaatatgcctgtgtttgcgttcagcacgcccattttgttcactagtcttgggacatggatgttgaaagtggattccttggtcacttagaaaccttgaaaaaggtctgtattctcctccccagtcagcctgaactttcttgataggtagattgaattgtttctctaccatagctttgaatttgacaaaggtgtccagggcctgagacttttgtgtgagtgataaatccaggtgtatctactatagtcatcaacaaagtgaatgtagtagatgtatccatcattggatttgatatgagatggtccccatagatctgtatgtataagctcaaggggttgtagggctcttgattcagtgctataaaatggttgcttgtggcttttgccaagttggtaggcatggcaaaatgaaagttgttgtgtgttgcctttgtggggaatattggtaaggatcttctttaggacagtatgggatggatggccaagtttgtgatgccagatattgatgtcaagattggtactagactggaaaatagtaggactgtaggaaggtgaatgaaaagaattatctttattgataagagttgaattacaattgatgtcattggttacattggggaattgtaaatgactggtacaactcattacagtgggataatgaccactagacacacaacatggagacccttccttgtccgaattcttggagcattcttctagcacatagagaccatttttaagagtccccttgagtaatacttgccctgtttgcttgtccttgacaaagcagcatgatttgtgaaattcaagaaacacaaaattgtcattggttagttgagaaacactaactaaattctttgtaatttgagggacatgaagaactgaatttagtttaatagaattaagattgcggccagataaagaagctaaaccaatattggaaatgagaagcttcttaccatctctgactgcaagtgcttcagatcctgggtagggagtggctgagtcaaggtgtgcaatgtcattggtgacatgatttgtagccccgtgtctacaaaccagccagagtcatccccgaagtcagggatgaaagatgtagcataggcttggggatcatactcagtttcatattcagttatgaatgctctgggagttgagttctgggaatttgtcgaagctcctggtttgggggtaacccaggttttgtcaaacctgtaatgacacaccggtgccgtgtggccatatcgaagacaaagctgacagaggggtcgaccagaaggatttttgactcctgtttggtggtttggcaccattcttgaagaacgtgaggggacgataggcattgtttcttgcaccagtaaaagcgatgttggcttgaagtttcatagtctgatcagtaagggagctgtggtgttcaagacgattttcgtgcgagagtaacaacgcctgaacttcttcaaaagtgagagtgtcactacgggtggtgatccctgatacgacaggatcatactccgtacctagaccgtttagtagttgtaggatgagatcttgatccagaattggagatccagccactgcaagagaatcggcaatggcctggactttgtcgacgtagtccgagatggattgtccgccttttcgaattgtggaaaactgattcttgagctgaagtaggcgtgctttggattgactcgagaacttctgttcaagagcacaccacacagcatgagaggatgagaaacttgcaacagatgcaagaataccttcggtcatggacgatcgaagccatgacagaaggagttgatcctttcgtttccactgctgatattctggatttggttcgccggtgagaagatgttgtagaggaggatttccagcgagtaagatctcatccagatcgtgtccgatgacggtagggatcacctgagatttccatgagagaaagttagtacgatcaagctttacagtcaaaacagaggttaaagaattagagaaaggattccagttggattgcaactggttaggcctggcaggagctgaagttctggtggcctgaacaggatcagaggaggtagactccattattgacgttagtcgacggcgtctgataccatgtaaagtttcagagtatgaaa

SEQ ID NO: 188526 - DNA, 2027 bp, Cannabis indica
tgtacttaaactaattgatcaacaaaggaaagccatttaaaaagaaattaagacagagacactgatcataaaggactgttctataacatctagaaaatgatgaagaagtgtcaccctgctatacaaacaattaggcactgtaaatcccaagaaatgtagaaaaaagagttagtattattcttttttgtctatgaaagtgttaaggcacctgatctatgagacgaccctcaattgtccatgcaattacataaagtaggccatggatagtaaacaacaccattgtgagatgtcccaaccatacatggtatcttgtagcatgttcaaatgggatatcgataaggcgaagaagaactgatccccttgaaactggcaggaacagtaatgccaagcaaaatatcccaactgaaccaagatgaagtcccatagattccaagaacaaagaactgcaagaaaaaagatgcagacatgtatgaagaaaatgtagtaagatagattttgtataagtacaaaaatattaaaaagtatgggactttacaaatatttaaaaatagagaaatatgatgtaatctaacaattagatgcaaaataataatgataaaaaaaagtgagttctggtgatgcattaaataatgtagagaaaccaagtgtcttgactattacttaacttattttatttttatttttttgacaaaaagacagaggtcacttgtcttggagaactcctcaaactctattatttttttttttttatgatgtaggattggagttctaagttaacaaattagtgaggggtgattatatacatatatgtataagctaattatgtttcccatattactatgtttgagtttgggcttaaaactgtggcaataataaacaaccttagacacaataaaatctaatatggtatttgaaagaatcctaaaatggtaggtaaactattgaaacacgattcaggatcaaaaaattacgagtatacacattgccctaattgatttgaaatatgcctaagaaaataatacaacaaatcgatattcatcaactgaaaactcttgaataaaaatcaataatgagaatatgtcaaagcttaacttaagctctgataccatattagaaatttgaaaaacataaattttataagaatgtcaaaaacaccaccttgcaagacaaagtaccattatctatttggtttggtttactcaatttgaacagggcaaaaatgacttgctcgaaaattgagcttggtagtggttggtcttgcccaacttgcttaagaaattataaaagttcaaaaaacctcttgctcaatgcctcctaaggcttgaaggcttctaaccccttagatcaaacttgaccctaacccaaacccctctagctagttgcagctttgttaccatttcacttccatcttggagccaatcctctttgcttgttgacgctagagttggtaaatattgtgtactaattttttagtgtgttagagagtcttacattgatattgtgtggacactaaatactatacataagatacatgagctactcttctcattgccaattcgttttgagatagaaccccatgcactttaaccacacactttcaaattctaacatagtgaaactattactgatattgtcatgtttttagaacacgatcttactagtgaaaaaatttagaaggaaaaatacttatttattctttattaattgacacttcgtattgaatcaaaagaggattatgtatattttgaaagatttatatgactaatacgcactcttgaatttgctcactttttttgtattctacgaaatgatgaatcatattatcaaccatgtaatacttttaagtgagattcttaaattttaatttgtgtgattataaacaatgacatataatagtgtacaaaaattgtgtaatttgggagtgttatgtattattactcatgtgtgtatatattgctttatatgttgaaaagttatttcatagtcattagataaatgatatgattattagatagagtaatcatttc

SEQ ID NO: 188527 - DNA, 1872 bp, Cannabis indica
tctgactaatttgtaattagtcttgttgacctaatattaattaatgttaagaggccacgttttgcacaattagtaagtggttatgattgttgtgtttaactttatgatctttttatgtctatttgtcaagtcttagtgaacacgcctcaagaatgtttgactcagttgggtccgttgaccagggtcaatggccagcttgctcaataaatgaatttgaatatatattttctctctacacacaattaatgatctcaatattttgctctaattaaattgacctaaagcacaaataatgtacagtaacgatatatatgtaaaaaaattagggttttttctatatttacatctcattataaaaaaactgttatttttagtgacaatttttagttataatataaattttttataactaaatgtaacttttagtcacggaccttttagtcacaacatagaaataataatttataattagtacttacaattttttttatttttatttttagtcaccagttttgttgtgactaaaaataaaaaaaaatatataaaatctatagcaactaatatgcaagttaaattacaatccaaatttacataacatactacataacgaccaccaaaacaacctaaattataaaaataaaaaaatacaatatggctaattcccctaaaattaaacggtttaataatatatataatattttgaggtgttatggcattggtagtggtgttgaaagatataaagaataataaagaagaggttggtggaatggaaagagacttactcccagggaacatctcccactagcatccagtctccatctttgtcttcataaattggcacaaattcacagctctctccatccttcaacccctctcctgctcaattaatcaaatatactttcaattatttaatttcccatataattttttttaattaattttcttaaaaatgattgatgaaactatatagctagaattgtgttaaattcttcaaggaaattccttacatatatatataattattatattagacaattaattaattaatttcttccgttcaaacgcatatatgcaattaatagacatatcatttgctatatatataaatattattaattattaaactaaaattagtgtctaacacctgaaatttactatcttgtagtcctatatatatacatacatcttgtatgaaagttaacatatgttcacataattaatgtttatatatatccatgatcgactacttaataacaattaattaagatatatatatttaaagaaaattattaatagattaatattagtaataattacctatgccaaaacagccaaagagattttccaaggcaatggcaagatgagaataaccacccttgttatgcatggtactcaaatctaatttacgaagaaaaggagcaccatccatgctcactttcacgttcactacacaattattattattcttcttcctataagaacacactggaggccaccccacaacaccaccactcacttgatgatcttcttccactttcatcatcatcatcatcatcttcttcttcttgttcttttcctcatcaccatctcttatcttcttctcctcttctgatcctcctcctccttcgcccaccatctccgaaaacaccctcttattcgaccccgccctcatcgctcccgggagacctagtctcaactcagttatttcaagccctagaccttgatcttcttctcccatattgttgatcacaaataatatagatagttttgttatattaagttcctttttttcaattttgtgtgtgttgagaacttgagagatgagtaataataataatagtaatatgaatgaaattgagaaaaagggtttgt

SEQ ID NO: 188528 - DNA, 2604 bp, Cannabis indica
aatgccaatcttcttaggggacataattcagatcctagaaaaatgttgtattttacagacacaaaagattgttctaatttttaaatttatttttagaataatgccatatgttaacaaaaatgagaaaaacataactattttgtcttaagaataagaaacatgcaaatcatagcgaatcctttggattgcctctgcagcatatttaatatttttcaaagtaatcttattttccgtactattagtatattataaattttaataatatgatgagtctgaaaatgatttgagtttttcttttacatgatattcttcagttgtattatttctctttaagcatttattttgttatttacagtttttatatttaatatactatatggccctctcttagctagaaaagtactattgggcccagagaaaatagcagtccatttaaattgggccaaggacttaagttaggtcagattgcagagattgataacttttatgttaataggcttgatgattatcaagcacaccaacctattttcatagaggaaaccctttataaataatagcttccaaattcattatatttgatatataattttttttttcgtaaggatatacaataactaattatttgtatataaaggtatatcaattttctatagaaaaaaaaatcatttgacaaaactaaccaagtcaataaaaataaataaataaataagttggtaggcaaatctcaataattatgagaaagttatagattttttattttacaaattttcttgtaatttgctataaattttaaagtagatgaatacaaaaggggcgataaaacttccccaaaagttctagtagcctcagtggcggaatcagactacgaaataaggaaggaccaaataaaatgtattttcacctaatttttttaatatgtaatattttataaatcaatatgaaaagttaattagctttatacaacatatataaaataatgataaataataaaggacaccttatagtgccaagtaatataaaaagtgacagattattattggtgtaaaataatatcgagtcctaaatattttaatttaataaataatataagaaactgctaaccacttataaaatgtcatattaatatggtattagataccataataaaacatatataaagacacataaatatatatcatacaaaattactcttcaaaaataaattatattaaaataatttttttgtcactttttaccataaaatagataactaatttgaatgtgctattgggtttgggcttctttttcaatttcaacttcacaatttattattaggcttagcaataagagaattatcacattttcctaataagtaaaatctaattatcctaatttaatttatatattatgtatattttttttctaaaaagttagggggggccatggccactccatagatacaagtagttccgccactaattatactaactttttggtccctaagctttatgcattaacaaaagaaaataacattgtttttttttcttcttttgtaggtgtaacaaaaattcgtgttcatatatgaagataattttgtttttgttgttttaataatttattttttttttatattgaccatatagcaaaattgtggctataataataattcatgagcattaattaatatccagtagtaatgacccacattttaacgttcaatgaataacaacttttcgaccaaattgataaatttatgccttttgattgatccagcaaaaactttgcataaaaatataaacatatatatttttttaaataaaaataaaaatatatttattatataataaatataaaaactaggtatcaaatgtgaaagttggacattgttaggtgctttcagtagtactactcttttggtttttagggttttttttaattgagtttggaggaatgttcaagcaaaaacaattcattgttgctggcaaaacttctagttcaaagagtttgcaactataaaaagtaacatcaaattgagtctatttttcttttattccttttttttttcattatataaaaaaaaaagtggtgtggaatcacaagatgcagcagcatatatactagggccaccaccaatacattgtataatttttataaaaactaatatgagagacttaatagtacactagacataaagtgtaatagaagcttgttagacttggaccaaaaattggtatattttttaattttaatttttgactgacacccttttaaccttatcagcttttgagtcttactatataacaaattcaagtcttcattattcgttttgattgaagctttcttctgtaaggcttttcttttaattaattaccatgtttttttatttttcaatatcaaatgttatttggttggtatatcaaaaaataaaaataaaaataaaaataaataacatacacaaactgtcggtagattgaaatgctcaaacaggattcttccactgttttcatgttataaaaacaaataataaaatgacaaaagctttcttgttttttttaatccatgaaaaaaataataataaaaaaaagagagactcattgtcagaaacaataaatatataaataatat

SEQ ID NO: 188529 - DNA, 2674 bp, Cannabis indica
aaaaagattttacctaattaccaaacaaatcatgttctcggtgaccctgcatctgatccagatgcagatgaactttcgctatcagaatctgcaagaataaaagcatgtcaacgtgagataaatgaagcagataaaacccagaaaatgcatttggcatccccgtaccactagaagacgatccagaactgctagagctgctagaactacttgatctactcctattatcctcctgattatttccttgagctggtggcgaagaggaaacaatgttttcatctgtttagataataaagaaaacatagttcatcaatttgtagaaataataaatgatttcaattgtcattaaaaaccaagctctaaaatttaacctgtcttcttttctttgggcacctctgccacaatttgaacctgggactgcaaaaagaaaacagaaaaataataaattaaattagacacaaccagaaaagggagcacttttagtaagtacagttaaagactttaccttcacctgaacattctgcatagtttgtgctctagcttggttggcaagctcagctttccgcttatttttgctcaaactcttcttgtagttggtcacaaacctatcaagctcccatagtgtctcggcatcaacgctatcaatgtcaacttcaatttcatcatcatcttggaaaagtgatgaattccttttcttaataatctgtacaatggcatctagcttttctgaaggtaggctctgaagatttgtgcttaatttctgcttttcatcataggtcatatcccttttatggggatcttttgccttaggcttctttaaagcaggtgtcctagcagttggagtaacactcataggctttggtctgggatcaccgtagtgtgtcattgattctgacctatccaaaatccttctcatatcaagaggagaaggtaatgaaggtggaacctttctaggcgtaggtgttggaaggcccccactataatcaaacccaaaccgcatctctcgattgtaatcagattctattatcatccacctctcctcaaaaatctttgataactgatcggccatgatatgaacatcctggcctggtggattataggtcatggcatttcgaaatgtaagtctcacatcctcggcaaattcttttggtgacttgtaccagttcttgttcaacctcgttttaatagtacccaagtccattggttgcttgataatggtatggtagtcgtgcaaaccaagacctgctgcatctacaggatcattaaacacccaaccatgcttgtgcttcatcaatttatcaagcaaagagctacagctcttgaaaaacttagttcccataccaaaaccatttcccaaatctccaccttgcttcttcccattcaattttgacttcttattactctctgctggcggaattttatcctttgctagtaagaattcagaattgcgataaaattgattcgccttgggtgtcctcttctccttttccacaatatcaaagccctgactattctccaatactgatatattcaactggtgcaaaggtcgaataggctctcgcgtaacaccaacagaagccacctctgaatgagaacgttttgatccaccattgctgacacgttcatttacagacacatgcaaatgagtacgtccagcaatctgcccttgtttctgttctatctttttcacccaattccttactgtttccagctcgctctcaagctttctccgaagctcctctgcctcatgtttcgactgtgaggccaaactaactgtaacccggttctccacaccctccttcaccgagccattccctccaggagggtccctagagtttggaatgacatctgtaaccacaggttgtcggttcaagctcgacgaatcatcagagacagcatctaatctcgaaaggaggtgttgtgacaagttcccatcttccaactccagagcctgcagccgcggttgagttgaattctcgttgttattgcactcggtgtccttgttgctctcgttgttattgcactcgttgtccttgttggtgtcgttgatattgcactcgttgcccttgttgctgtcgttgatattgcactcgttgcccttgttgctgtcgttgatattgcactcgttgcccttgttgctctcgttgatattgcactcgttgcccttgttactctcgttgttattgcactcgttgtccttgttgttttcgttgccctcgttgtccttcttgctctcgttgcccttgttgttttcgctgccctcgttgtctttcttgctctcgttgtcattgttgctcttgttctccttcccatcgttgcttttatcgttcttgtcgttatccttgataacattgtcaacggtggcggtggaagtacctgattctggcgctaacacggtgctactggtggtggttgtggtattgatatcggctttgtccttggcgatatcgttgtcgttggtgttgacgctggcagtgatagtgttcttcttgcctttgaatacttttcttctgtagaccttgtgcgccgaatacctctgcttctctctagctccatcacctccttcaacagtaggctctgaagccatacatgtacccctccgaaaccctaatttcagtttttttccccgtaaaatactcaagattcaaccaatccgatttagggttttagacctaat

SEQ ID NO: 188530 - DNA, 517 bp, Cannabis indica
gatgcatgtatggcctctcattttcttgttcttgggttcagcccagagactcttcgaaacgatttgggctgttgttaaattagtgtttctatccaagtccaaccatggtcatgcagtacatcacttttgtggttaattagttctttttatccacaattgataggacataggactgacgaataaaatatattatattttatataataataaaatataataaatgattcttcacgtgatataagattcattcgtttcattatataaatatatgtaaaaatagctagattagtgtatagtactatatattatataatatacaaaaatagaggatttgaatgcgaggtagacaatacggtcagcgactatggtaaaaaggacgatgtcagcttctctccacagccttccttttagcaaaggcatcatcttgatgtgaaagctgagttactacatcccacgacaccaccattacttctctttttcctaattctttctcctttcttgcttttttttttttttt

SEQ ID NO: 188531 - DNA, 7057 bp, Cannabis indica
atttgaaacattaaatatttatgacagaatttactttattttttaaatatagagatcatagtaaaaaattgtaataaaagattgatagtaatcctctaattttattttgttttatctcattttatgagaagaaaaaaagatggtttagttgaaaggttttgggtgagaaaagagtgtgtgaagagaagagaagagaggaaagatgattttgcttcgattaccaaaagctcccatggccatgaccttcttcttagctcaaccttcttcttcttcactctactccttctcccattcccatttcagtctcatcccaaaaccccattcactcaccattaatccaactcttaaaccctttcaccttctctcatctccaaaatcaactctttcaccttcccaaccacagaccttatccacccccgacactacacacccccaaattgaaacccctcaagaagatttcgatacccaaatccaagtatccctcgaaaacctcttcgtgcctccggaaacagaaattggtgatggtacttcagccctgacctcgagaatcttgaggggctctaatattgttctgagcaagtacgcaagggatgctcaggttgcccaagctgagttcgttaagagcagtgttgccactgaggattgtccctctgatggtcttcctgagttcgctctcgttggtcgctccaatgtgggaaagtcttcgcttcttaattcccttgttcggagaaagaaacttgctttaacctcaaagaagcctggtcagttcatatatatatatatgtgtgtgtgtctatatatatgatatctctgtctgtgtcaaattgaataacttgctgagtattgttaattttgtagggaagacacaatgcatcaaccattttcgaatcaatgatagctggtaccttgttgatttgcctggatatgggtaagaaacaatattgatttacaaagctgtatatatatatatatatggtttggggtgtctcagtacaccctcctaaagtttcggtataacactattctggttcggcatccatgagagttttttaggccattttttctttcatgttcgttgtagcaacaaaagatttaaaccttatttccgacatgtaaactatgtggagttttctaaaactttattatataactacaatgtactttatgctgaaacaaatagagtgtaccagaacactcctttcggggtgtgttgtacaacagatttttcctatggtttgttatgttacaatttttttcgggtacaaagttctgggtgcttttctgttttgggttatatgcaatttgtttggtttttaatgaccagaaatttaatggttttggctcctgaaatgaagtatagaaagagattaattctgtttcttttatgtagttgatacgaaaaccagtggtcttttacttaacttaggattataatttgtgtaatttggaacagatatgcttctgcaccgaaggatcttcgaacagattgggcaaaatttactaaagattacttccttaataggtcgaaactagtttcagtattccttctcattgatgctagcattcctgccaaaagcattgaccttgagtatgctagttggctggcacagaatcaggtaagatgattaaactattaggaaaaagaaatccatatcgttctctaatccaaatgttaatttttataatgtaggagctgttttcatacttagatgctagtagttgttttattactattgactagttgggataattttgtatgcaaaatagtcagatttcaattataatgtccatggaacttagtttgatttccacatgtttgtcatatcgatttattatcttagagttaaagggaaagagcttaagagaccataattccactctatttggacaattcattttttgagtctataaaatatgttgttttcagatccccatgacattaatcttcacaaaatgcgacaagcgaaagaagaagaagaacggaggcaaaagaccggaagaaaatgtgaaagatttccaggagttagtacgtggtttcttcaagacagttcccccttggattatgaccagcagtgtgacaaatcagggtcgtgacgagatattactgcatatggcccagctacgcaactactggctcaagcactagttgctgcagcatgaaaattaggtgcggctcggttgccttttgttgccttttgagggtatattataagtattgacagtgtatttctatattttaacaaaaatttacatcagtggctactttcttttcaattgaccttctgaaaattcttttgactttgccagcatcaaaacagaaggtagaagaagtggtgagttgagctcagcatttactcagagcatgtagcgatcccagacccgttaaagaaagggccaacgatggcgaagtgaagtatttttcaaggtgtaaaatggacagagaaccggtcttttgaggaaggtaaattaggtgtgtgtttctttaacatggttagttataatagatacttacacacatagaatgaaattcaaaactataagcctttcttattgtgaaagacttgttctttttggctgtgttgtacatactatatttcttttgtaaaagaaaaagtaaagatttttaacttaaggataaaattgtagtttatttttatttgtaagatttttacatttatatgatttgtttaacattttttgccctcttctaaattatttcttgcacacttcaacttcaaattttccttttaatagtttttatatgtaatgttagaatagcaatgttgggcttttatccctatgtatgatttgtttctagagttttgttagtttggacattattatgtttttatttgtctagatcacacatattatatgcttataaatagagaatcaactaaactaaaaacacgttaaattcctctattttttaaagcttctttaaaattcactattcaagctctacatttatagaatattatttatttttctaaacatattttattaattatttaaggttttaattttacttttatatgaaaatatgtgtaaatattaatattatatgtttgaaattaataaaatacattaatatttgaaaaaaaaaatagaattttagaaaaatagagaaagtatggttttgatgatgtattttgaaaaatagagtaaagaagttgatgagagtgctctttacgtattatggaaaaggttggatgcatccttcattcaaaattaaatttcaaagtcattggtgtaattttttgcggaagagttttttaaaaagctaaaagttgaagtttgccagccaaagtcctttgaatttgaatcaagctttacatgaagtaaatgctaaatattgatcaacaataagcaaaaaaaaaaaaatactaaggcttgtgaagcacaaaaagtttaaaacaaatctaagcaaaactataaactaaggatgcttctaaatcaagattatagaatagtaggtgaatgttacaaattgcgatattatagtgaccattacaaatatcaattagcaatcaaacacactaattagaacaattataaaactagtgaaacatcaaagttaattgctgttgtgaaaaaatactcagcaagaacaaaacataatcaagaaatacaactctatttaacacgctcttcaaaactttatattttctctctaaacagctctctctaatctgtaattgtattatgttgaattacaaagcaaaggtcttttgtaggctttagttccaactcggacatctgtgtcataacagacagttagtttatttagttaggatagttaagtaatcttaatatgtgaccaatcacaacaattgtacatgactttttttacccttacaattacttgcttatgtctttgcaccccctatgaaactcacttattttttaagacatgttggatagttcttgcatgttacatataataagatgtttgtcaatataaaatgtgagaccttatttgagtgttaaagtttaaatgttaatttcatctggtatgttacaatactttagggtctttgcattttatattaatgtttaaactttggcaattcaactccatttgctcgagttttaggatactacattaagaatgatatgacatgacaggtttcatatcccctttgtctaaggttttgttgtcgcttttaggtgaaagacatgataactaaatggtaaaagctcttcaaaatttctccatatttgttgtcaaaatctccataattcattctataaagtactttttctttcgctttttgatgcaagttctaaacccacgatgtgacaaatctgtgtatttttttcattttatgaagtatttttttctttcacttttgcaagttttaactcacaatgcaattgttctctagatgagtatcactataaagtgtcatattattacgagcgcaacaagcgtataaataatttaaaagttttaattttattttatttgatttttctaatcattaattaattttcagtctaataattttttaaaaaatacatatttattaattttaaattacacatgtggcactaatgcgataatagtataaacatttgtcttggaagacaaaatttaataattttttttttacaatattgtgaatagttcgggaaccatttatagtgggttgaaaaattttgaaggcacaataatatggatcatagttcaaagataaaaatcttaaatagccataaaaaattgaagtcatagcatatcttaggagagaatttcaaaaagaaatgatctttaattagcaatgtatatgtaaactctataacaaggcccttcaaaaaacatcatatcagcacacaaaatcaccctttactaaaacaaatcatattagtaagaacaaagaggcaatcatagaatgattttatatttttatatacaaaatacacgatgtattactctactctgatggtgcaagagccgattgcaaaacatcttcaagatacttctcggccgcagcatactgccttttcttgtcttcaattgctaaagcagcaagcgccttatcctgacaaaaaaaaaaaaaaaagtgatgaaattcattgtctgcgaagcttcaaacacgaatgaggatccattaaatgaaatagggcaaattaccggaggcaaatcctgatagcttctcaaagtatcgagtatgggctttgttttcttctccaactccttcctatgttctgctgtttcaaccaataccccgtggcttatttctgggagatagcccacgcgattaagcatagcctgtcaacaacataagctctcagcacaactcaaatatggtattgagtataaaatccaatgtacagtttctaaaacagtttcaaggacttgtataagcagccttcaccaaatgacacggtaacaaagggctatccttttttttctttaagttattacttatcgatcaaccactgaggcattcaactatacccagatcagatccgcacaagtttgtatgcggtttttcagtttaaacatttggtataacatttacagtcactctctaaaaacgtggggatcgcttaacctagttttctttcaacaaatgcttcttaagaagcaaaatgactccattaaattgacctacttttcatactcaactacataactaatcttttatataagaactgaggagcaaatcaagaaagaataccttgtagttagaactctgttgcaaatattgtctctccttggcagccataacagccaaatttgtcttccaattctccatttgagcctcacaaggtggtacatcatcttctaattgcgcaagtgttcttaataaaaagtaaaacaaatgaacaaagaacaccaaacagagattagcatctcaatcaaacacactaacattttctattactttcctaccataagtttcaatagacttacctcttcaaatatgtcaatctcgcaatggcttttcgtgtaaaatcaagtaaaatctttgactctttctccaccttaaccctcttttcctccacactagtcttcctcaaagaaatatcccccattgctacaagaaaactaaacccaaaaccacaccatttcttccattaatcacttctaaacaaaaaccaaaaacaccaattcacccaaaaatagagggggaaagaactcacctgcttaactcagtatctctgatgttcaacaaattggccacatttgccagaacctgaaccgacccaacaacatttgaagccataccctcctgtgccaaacccacattctccaaaatctccctaattctcgcagctgcaactcacaaaatcatacatttctcagagagttctgtaaaaatagtctttacaaaatttttgattagtaaaataactctccaaaagaataaccacatttacttgcaatgagcaaccgaaaattactaatttgcaacaataaaaaggccataattatcgcacagagtaaattcaatgcggtttcttttgcaaattttacaatttcaagttgttagtttcacaaatttccccatttctccataattttccaaaatcgacgaaaaaaaaaagggtagaattagagagtgtgtgaataaaccttgggagcgatactcggaagctttgagacgaaaatcagaagcgaggatcttagaagcttgggtcttggcttgagatagagtagcaaggttatgtaaataagcaacagatcgaggtgtatattcaaaatgtggaacttcctttcccgcttggccaaactcatgagccaaccattgcttcacctctccaatccgagacgcttccgatcctcctccgccgccgccggtcttggccggttccgttaaggaggaatcgctcatgttactacgagtctggtctaacattagttacagagataaagtgttgaatgaattgaattaaagcaaagaaaaagatgatgtggattcaatacctgaagtggagattgttggaatcggcgatgggagaatcggagacggagaagaagacaactctgtcgagaccagaccagatttgctctacccttcgattagtttttacagtttttttttttttt

SEQ ID NO: 188532 - DNA, 3145 bp, Cannabis indica
gtgaaagggctttgtaatgcgtgaagtatttttaagaaataaacaatataaatttaccaaaataaagaactaaaggcgtgaattcatagataccctctttaaaaaattaatactaagacatgcttcattgaccgttggaaaaggaataaagaacaaggccctttaccactctcagttttctactttaaaatggataaagcttaactactatactagccagattcaaaatagtggtcccaaaaagaaaaaaggaaaaaaaaaagacaagtttattaacaaatagctaccaaaatgaacatccttctctttctaaataaatgtcttatcctcttaaccatatccaatcttcattctcctgctgaccagcctcagccacaatgtgaattaaataagagagagtggaaaataagacaccatacactgaatcagatttcagcttcaaaacaatggactatagagcagtgacacacaagtttaagaagactgccaatcttttcgaatttcgaaagtgtaattgatctccaagtaacatttgttgtcatcgtcaagaaactgttaaaaaagaaatcgataagttaaaaacaaaaatattagaccaaaaacagtgaatttaaaactcaaaaattgacagttttgatcccagacatgggtggccctcaaatttgaattccaaatgaatgtttgttaaataatgcacatgggtctggcaatatattgattctagtatgctttagtacatatattgaccctgcaagtgggaaatgcattaactaaaccaccattttaaaacaagtgacaactaacaccattaatatcaaatatcaattagtagtcatcatagttttttctcagcatcaagaatgagaaatttttgtaagaaatatcattatttttcaagtttccacaagatatgaaaaaaaaaatgatgataatgtgagaatattttatatgcggtaataaattaatgatttgatttataaaatataattaattaagaatttaaaatattccgacaattaatgtgggacgaaaattaataagtatggaaatttttgtaagaattttataaaaaatatcattattttttaagtttccacaaaatattaaaaataaaataatgatgatgttagaatattttgtatatggtaataaatcatatttatttaatttataaaatataattaaaaatattttaattataatcaatatttaattactaaatactttaattacctaatttaattttttgaattaactatcaaaatattcaattaatgtgacaaaatactgataattaacatcaagaagagaaatttttgtaagaaattttcataagaaatatcattatttttcaagtttctacagaatacgcaaaaattgatgaagatggttcatagaacagtggtacacagaccttgcttctggctgaatatgaacctctggcaaatatgcctgacggagtagtttcttcaggcatctcatgggtgtaagcttcagactgaggactataagttccaagcatctcctttgtactatcaactgcaacagtgattaacaaaaagaaaacatgggatttaaggattgtaagacctatcaataacataatatgacaaagcttcaaaaagggattgagagagagtaagagagactacctctaaccccagttttccatactgtatttgtgtatttgagacctgaaacaatgttattgctgacctgaaaagtgaacatcaggctataacggctaccttcctttaaagtaaaccaacagcctttgggattcccattctcaggaattgtgagacaaatgtccggtctaccaggggacttaattgcaagacttgagatcttaacttctggttccagagtttctgcacacacagaacaaaactgtttcattggaaacagataaagttgtttactcttacttccctaagtcccctagctgaaagaagaagaaaccaaatggaattttccacataaagaaacaaccttaatgtctgcattgtttgaagaagaagataatgccaagaaacagctgaaatataataaactatatgctgattcaaaatatagaaattcaagaactccctatactaatttgtagttttactccactttcctattcctaacatgttaaaagtgtagagcataattcaaattccagattctacctcccaagaaaggaaaagctacaaattgagcaatttaagatcaaaaggaaacaagaatttgacggctcaaaatgcttacctccaacattctccatgtccacagtcccaagaagctgctccttccatctccttaaactctcatcatcctgtaacatcaaattatcaccatgaagaaacaatggaagagacaatagaacaatttcttaaaagaaaagataaattaagagataatggaatcaaagaagaataaatacaaaccttatctttctccaattgttctttgagtgtgaattggggacccgaattcaattttctttccttcatcatcttcttcatcctcagttgcataaatggaactctcactcattgttctgctcatcccagatgatccatccacagtttcttcatcatcttcttctttacccttttctgtttttccctttgtctcttcgatatttgtttcagaagcatcattgtctttatcatcaaaacccatacttttggaatttgatgaaacaactccaacagccaaagacattcacagtaaggaaaaaagaaaaattaatgaaccaaaagggtatatacagagaattatactcacaaacctagtttatgagcaagtacagaagtgaagaaagagagcccaaatacccacttataagaatctctctgacgaaaacaacaaaagggaagaaacccaatttgagaatacagaaatttggaaaaggaatttagcatatcaagaaaggtacgaaagggaaactttggtcaaagaaaacccacaaaaaaggtaacttaccaaaaccaaaataaggaaagtaaccccaagaagggtgacccttgtagcaagaaaaatagtgaaaaaatcaaaatgaaaaaggaatgctgactggctggctgttagcaaagatcagggagagagagagagagagagagagagagagagagagagagagagagagagagagaga

SEQ ID NO: 188533 - DNA, 1252 bp, Cannabis indica
ttcaattaatgaggattcataaaaaattaatataaatgttattgttaaaaaattattagtatacagttctctgtagtaactcagaaaaaacacaggaggttcgcataaatggcataatactatgattatcagatatccaattatatgtagtatgttcatcagctaaacaaaggatgtatatgcatcattcctgggaaaggtgtaatcctttagaaagctactaatcactcctaaatcctaaccatacgcgtgcttccttctcactctttcattcaggataagatgctcttttcatagagataataccctagcttctacacatcaaattcagtctctagaaaaatgacaaatggcaatgcagataaaaataaaaatgaataagttactaaaactagaaacactcaaattacataccgaatgaaagtgtacaaaagcaaacccccttgaaacatgagtaaatttgtctctaacaaggcgaaggtcctgcaagaaatcattaagacctctccttttatatgctaaaataatttattaaaaacaaaacataaaatctaccgtggaagtagaaacataagcgcaaatataggaaaagtaactcagaatttacaaaccttaatcggagcatgcttggaaaattcataacgaagcatttcttcatcggcattttcatccagtccacgaacaaccaatacatgagtaggacctaagtagaaaatcatttaatcacatacacacgtatatttaaatccaaacttagttgtaaagctaaaaatattaaaacaaaccaaccagcttctaatcctttttttcccaaaggtgttggatttgactgagaaatgtctgcggggggagcatcttcagatcgtgcttcattacactataaagaataagagaacactttttctttatatatatgtataaaagagaacttatacttacagaaagaaagagatcactttttttaataagagaaattatactaagagtgaaaggaagagcttcaaatagtacaaaaagaacctgggcaaggaatgacaatttagttatagcaatccttaattaaaagtgagaataattaagcacaacccgcatatctaaatttcatattttagatactgtgctgtgagtgtttggagagggtgtaattatcatgaagctggaaacacacaaaattattccacacatgtaaaacaagccattctcatcagtttagaaattcatttaagatcctgcatcctgccctgtaagaact

SEQ ID NO: 188534 - DNA, 2867 bp, Cannabis indica
gtgtttgggttggtgagagaaaaattggtgcaattggggttaaaatttcgtatgcagtcacctctcatgggttggcatttaatattgatccagatttaaactattttaagcacatagtgccatgtgggattgcaaataaaggagttacatcattgagaaaggagacaaattcggtgcttcccgccgaagaaataattcaagagcagttgatttcttgtttcgcaagacaatttgggtatagcagtgtttcgtggaaggagaatgcgtctgtattattgtctgatgattgcgaaattgaatgagataattattctttatatgattaatacataaggttagatcttaatatctttccaagttttcaaagcttgagaatttcgacttgtaattaggtaagccttgggaccaaagaccatcctaatggatcttattgactcaagttccatgaaattgtttatttaataaaataccatcttgtttactagcacgtttgataccgaaaatcatgttactttgttttctaatttaagttatacattgtttgagtatgcattcaaactcaaaggattgagttaagtcaacactgttcatctacactagtgctactaacatggaccacatgttttttctttagagaatctttttatccacatgtatttcgaattgtagtcgaaaaataacaacttgatagcttgagcataggagtttcatcatcagatcttgtaatgtaattctcatcaacttattataagcaataaaatgctttctccataccttgttaatttaagtagattggttgactaaattattgatgcaaatcacttagtttattcaagcaaatcctagaaatgattattctaataccctttggagaatgtagatggattaggtttgggttggttcactaatgaatgaaaccactttctactctccgaaatccatgttctgttttcattttcgatattaaacatcttaaaactttatcttggttaaatttggtccataaaaattctaatgaaatatttttcttgagtttcttcaagtgtgcaggtttccgaaataacagtcaagaaatttgactttggttggaaattatcagaagaagaaagatttgccaaaggaaaacagggaagtttcctatgaagatgatgatgtggatttcatttccacagccaactttagctgtacttgtcaaactcattatgcttttgggtactatttttacttattaaaacaaagaagtacaagaaaatgagaggtcactgatttggtctcatgtgatttgtcacatgagtcattttataaattaatcatttacattttatttttcagacaagtcagagaatattatacttaacttttgcatcacatgatcagcagctactactactactaagttctaaagaataagcagaacaaacaaggaacaggtaaaatatctaatcatgaatactatagtatttccaactcttaataattatgcttctactatgaatagtcagaaacataggattttctgtcattttgtcaccagcctgtagaaaagttttcatctgtcatagtaaaacactaagtaactttttcagcaagaaactgtttgactaaactagttgttggttccaaatcttgtcagcaagaaaaattagttatatattgagctaatatctatatattaagcttaccctttagcttaaaaatttcatataacatgtatactatcactttttttagataattagaacacttcattgctatcttctttttcttcttattgcccgatctcagccatgaaaacgattcacatacatctggttttgttctttgtcttgattctcatgcaaactctagtgacttcttcttcttcattgtcacttctcgaagagagacgaattcacacaagagatagaaaccaacacagaagattgctgctcgttttatcagcttcaaatccgaaagagttgaataaaaagacattggaggatcctctgagatctgttgagacaagtctaaaagcagcaccttctagtgaatccaatccaattcataacaagtaactaggatcaatacatgattagagatctcgaaaggatagagagactggtatctctttctcttccccgaaattttgcagtttctgtacttcgtttttctgttgatataggtaggagaatcagatctctatacattttttttcatttttaatttgtttatttaaatagtttggtttatatttctgtagttctttaattttagtattagattcacaaaagcatgagaaaactgtaactgaaatcaaagattacaatgttatcattttgttagtgcttgtttccttgtacatatacttacattgctcttctttcttcattataaacaaatgaaattatcagcttacaaatttagagatttgttgcttatatgtataggttggtttaaagaatgaaattattgagtggtgaatgttgcagagttgagtatttcgggttatgtctcggtcccatgacatttgttctcccctgttcgccctttcgggtgtactagcttatcggagtaaatgtattgtacttgatctgtatttcggtttgagttgagtgccttcttatgtttgattgaaattttcatattgagttgatcttagatgaatcaaagttgcaagtgtgaactcattcaagtttcactacctttttaggtaggaatctaaaacctttacagctaaaatgattggttgattctttcttatacttttcatatgaggggccaaggccaatctcttcatgggcattttactcttgttcaattccttgtaattttcaggcagaagagcaatgtaatagaaagaaaaaatggaagaaaaagggccactaatt

SEQ ID NO: 188535 - DNA, 1878 bp, Cannabis indica
tttttcttttttttttaattggttatttacaacatttaatggaacttttcttttggcatggagcttaaatgaaacttatgttaaggtgttatttcaatgtttcatgtttcatgtttcatgtcacaggagtgcatttattggaatagttcaaaagggaggtttgcgttctttgtataaggggtggggagctgtactttgcaggaacataccacattcgattataaaggttagatattgctgcatattgaacttgcagtcaagccggctagacaaaaagatggtgcccttcatttgtgttgtgggagaatctgtatcatagtgcctatatcaaactgtcttctttatcacatgtgaatcagagtctctctttgttcctatctgcagttttacacatatgaaagcttgaagcgattgacgttgtcgtcattaccatctggcactcaacccaacacgctacaaacggtttgcatctgtttctctttatgttttagactgctttgtttttcttccttaataaattctgataccagagatgaattttcattcctccagctattttgtggaggactagctggaaccactgctgctttttttacgactccatttgatgtggtaaagacaaggctacaaacacaggtttgtaattcatatattgcaaagtagcttaccatgctacatagatgcaacagttggttaagttcacagttttgggcttgtagaaaacttaattggatctttgctaagaataatttcaactactacttcacgttaattcatttgcttttgatctcttctctgttcttatatggtggatattctgcagattccagggtccacaagccaatacggtagtgtgattcatgccctttatgaaataggaaagcatgaaggtttaaagggcctttacaggtaacttcatcttatgtttcattgagttattatctctcgagagtttatttttatcagaacataaatcgtagcgagttcaatgtactcaagtatactatttttctctaatattgcctagtcctattattaggggactggctccaagattggttatgtatatgtctcaaggagcactcttctttgcatcatatgaatttctcaagaaattgtattacttggagatgccacagcccgaggctgaaagaatacaaaaccaacaaagcatggatgatgacacagttgtactatcatcatcatcatcatcatcttcccaaacatcatcaccagcttcttttccacaaaagctttacagtttgcgttcatcatgatttttgggcatagagataacagaagcggagtgtaaactagtctggcgagaagtttgatttgatttgatttattcatttatttattttcacatggtaattttgcgaatgtttagctgatagataggtcttatttcattgatgttgatttcgtgtgttgatgacacgagcttatggtaatgtgaaaaataattgtaaaataagaaaaagtgcattgtagctttgtacaatttcccatcataaaaaagcaatgcttttgtgttaattcagaacaaattatcactttacagtgactaagggtgcatttgttaagagtgaatctgagtgggccagatttatccccattaaaatcgtttatttttttttcttcaaccacttattcccccttaatacctaccgaataagaggtaaattgtagtgtgaatcattttaaaacatatatataacctttatttttttctccaactattttgctttgtctttagatgcaccttcaatcaaatgcaatatcaagcattaatgtatttcattttttttttaaaaaaaaataatgtacttttatctccctctctctctctcttcttttttttttgtctatatattg

SEQ ID NO: 188536 - DNA, 3572 bp, Cannabis indica
caaaaatactaattagccttattgtaatttgtgagtttgtttttcatgagaatgttaattttgtaattttattaatatattaatgtatgaaaaaagttacaatatttgattgacttattattattattattgttgttattgtgagtttttattttcatgagtattaattttgaaagtttaaatagtgaataatattttatttctaatatttttaaatgtacatattcagtggtaagttcatctttttctattattattctttatttttttttctaaataaagataaaaataaaaatgttaatacactatattgttgttgttttcatcttttaattttccaaataaaaatgtatctctcattttttttattgcactttgtaactttacttaatgtttacatgcttatatattaagcaataaacacaatgaattatactttcaaatgtgaatactaaaaaattaaaggctataagaagtattaaatcataatataaatgaaaaaaattgaacctgtaaattttcacattttcaataattcaagtggaaaaactagagagaacaattgcaacacacccctcttacacattatggctctaccaaccaaatttttctttctttcactcattaaaagtatgaaatatcattacaaagtcacaataggtgcattagctttgtcctctgaggatggagccgccaccgcaacattattcttctcaatattgtccgcctcaactttctcgtcctttggcgcctcctccttgggctcctcaacagcctcaaccttaacatcgttgtccttaggtgtctcaacagcattagtggcgtcgactttatcatttgtagcctcaactttcacatcaacttcggcattggacacatcaccttctaccttattggcacccttagtttcggttgagttctcactctcctcgtccttcttctcctccttctcctcatccttgttaggagtttcgctcttattctcaccttcatcaacagtcttctcctaagatcacaatgtaaaaaaacaaacacaaatcaatacaacataacatgaaattcaaattcaagagtacttttagttaagataattgtatacttgagcaacagtctcagtctcagcctcagtatcaacctcagtttgagcctgttccagcttagctggagactcgcttgggagagactcgcgctgggcgatgtcagactccttttgcacgctcgcacatcctcccattattgacgaaataaaaaatgtgggacaaatgagcgagtcttcggaggtgaagaggaagggggagaaaggaggttgttgtttcttccctttttttattctcttgttgcaaatatgtgaattgaggcaaagaaaaatagtgatggtgaagggagtaatatagggtaagatagttgtaataattaggagattttgttggtgttcaacctggcatttgtggtgtgatttattttgggtcaatctttgtatggacaagaagaatttttggagggaataagggtaaaaattagttatgacagttagcttattatgggaatcaaatttgtcgtttaaaacaatgatatgttgtcttcttggccatttgatcatcttcgaagtaccaaaaactagacaccaatgacattgacaatgtatatacatatattatttatggtactaataattatagttaaaataatataaaattactatatcaaagcatatgaacctaacttttttttatggttttcttttaagagattgttttttcatatgcttttttgtttttaagaattaacacttaagttattaccacatttccatcaaaatatgaaaaatgaattattaccacattaatttttaaaagactcttgagaatttttgtttccgaactatagcatatgtattattgtgtttttgaaattgtcaacccgttaaaaatagttcccgaactattcacattgtggtaaagtgatcattctatcatgttttgtcacatgtggtaaaaagtataatgatgtagcaatttaaaccatttttataccaattccacgtgtctaattaatttgaaaaaataaattaatttttttaatttaattttacttaaaaaaattaatcattaattgattttagcttaataatttttgaatatacatattattttaaattatacacgtgacgtctatgtgacaatgatataaacatgcacgtcatcaatttgtttgtcacatatgacaaaatttgacagaaggaccactttacaatattgtgaatagttataaactattttaacgggttaaaaaatttaagggcacaataatacagtagtaatgtggcagccatttaatatcataatattaataaaataaaaaattaattatagtttttatttttaaaattgcttgataaaggcatttagactgaacggttaattgcttggacttggaccactatgagagaatctgttttaagaaccacatcagcccaccctttacgctttatccaacttaaagcctattcgatcccaattacttcagcaacatcaaatcgaaccaaccccaccttcctaattgaaacaggctcaattagatttctctcttggtcacgagccacacacccgacaccaaaacacattttatgcttaaaaattgctccatcgacatttatcttaaccttatgtatcacaatttttctccaatgctcatcaccactaccaaaaactacattcagtagaggacctaatttctatgcttgatcatttagtcattggtcaagagccaaccttgccgatctcactacttctaaggcagtactaagcttattgttctaaaagacatcatttctagccttccaaatcctccaagtcaccatagtcgcttcagccacaacctcaccatttcccacactaagtagactagaaaatcaatctgcaaaaatcaaatcagctgcaattttaacaacactcgaaatgctccaacaggaacgagcatagccacacccaaccaaatgaaaaatggtctcaacttcaatgttataaagagggaaaattaagtccacaaaggttctcaattccttttattatatatatataaaaaaattctacgattcatcacccacccttctcggtggtggaggtttaccgtcgacaagtatcatcctttcatctccactttctttctcgtctcatcctatgatcacatgcaaaaaaaatccagaaaagcaaaaaaaaaaaaaataaaaaaaaaaaaagatgaagaaggaaaaaaaagaaaataaaaaaaaaatgaagaagaagaaaaaaagttgatgaggagaagaaaaaatgataaaaaaaaggagaaaaaaatgaagaagaaaagaaaaatagctctcctaaaaaaaaggagaaaaatatatatttttatataaaaatatataagggatctaataaataatgtggtatggctactctctcaaatatcaattggttttgacattattagtttgtccgcggcgcgcggtttgaggttggagagggtcaaataatcaagtcgtatggagaatggatgtgagtgagacctatacgtagaaatcacatgatcgg

SEQ ID NO: 188537 - DNA, 2629 bp, Cannabis indica
gcatgcttcatgatttcgctgacgcagtcctgaacacgccattcaactattagaatcatttatgataaaattataaaaaatccaattccaatgaaattttataaacgcgaagtgacactaagttttttaaaaaaacaatagtgaaacagagaggtatcagcattactcaagtcagtcattagtccaaagcctaagagtaaggttgatatcaggatccaagagtagtggacaattgtccaaatcccaagtattgtccaatgcaccaaactagccctaccatctcttcatagctagtaatcgtagggaaattgcaatgtttacagaaaaacgagtatcatgattttggacaccaaaaaggcataagagtatgcagttgtacagaacaacacttggtactccacaaacaattcaatctaccaggtaaaatttataatgttgtgtgtgctctcttattgatagctgtgcctagtacttggtctaaaaacaaagaaaaaaagaaatatcagcatctcacaaaacaatgcatgcagtagaaagcgtttatgtaaccatattattctataaagtgtcctgcattgtttaaatgagatgattacaaaaactacaactcgtcaaagaaaaccagaaagaagataatcttcgattctacatccatctcatgaagtgattgtgtcaagaagaatgcttaccagaagaaagggatccctcccaagccctggaccaacaacaagacaatcaaatctttccatccacttatcaacttcagcaagaactttatccgaaatggattttttgtcttcatccctgaaaacattacttccaataatcagactaattgataatgaaggttatatgcagaaaattgggagggcgaagagataaagaatcacctgacactgtaagactcctctaaaattggatgcacaattatctcaggactgtagctttttataacaggggcagcatctttagtacagaaaacatgggacaaatccgctccctaatgaaaatagatgtttccatacaacaaaaaggtcatgtatagatcaaacaaaacatttctttgttttcctttcaatttcattttataagcgttaaaagagaaatggaaacaatagtgaagaaaagggaaagagggagcactaacaattttcaatgcagtaatagcagcaaagtatggagcaccagtgtattcacgacaaccacctataacagctatctttcctgagaaacacagagaatcccacaacacattagcataatgaaccacctttacaattgacaagaacatattaaaaagtcactgtatccccagtaagtagcattgattatgcaagcatttttttttcaattgctgtcttgacaacataatatcagtacagcaatatagttgaatactctcagaaaagcacacatctttaccacttgcacacatgcatgcacattacacatgcatgcacattcttataaatatatatatatatatatatatgtccatatattttggtcaaatacagaaaattaaagaggtgtctactaatgagcttacctgcctgccccttatgcttactgggatcaagagtaggagtaattgctctcaaaatgttctctgcagcagcttctaaattgggttcacccatagctttcacttcttgcaattttttctgatcaccttgattactgttaccttgaagacaccttattaaaaactcttgtcttctgagaacagctggggaagccaatacacagtttgttgcactgaacccagaattcaacccaagtttcattaacatgaatgagcaaacagcactgctaagcatactttctctaactgaacccagatactaacatactgcaaattaacacattgttcaaccgaaacaaaagcaaaacctgcaaaaactaatgtgtgaacactacccaaaataccaattgataagcaggaaggaacccagttaatccccaaaacaaaaacctaacctttaaattggaagaacaagaatcaacaaactaccgactcgctggaatgattcaccgaaatttgatggctttctttcatttgggactctgtcttgttctagaagaggggtgtcccacaaaatatgttgggaaaagagaagactttgatttgggatccaccgttggatggtcaaaatgggcatattattacgctattgccacctcaaaacgacgtcgtttaacatcaagcctatatactttcccttttgtatagatcgctaggtacggtgggggaagttgagcgaagaaaagagaaaatgagagagagaacgaaggtgaatgcaatgagatcgggtgtggttgttatcggagccttggcattcggttacttgaccctgcaacttggtttcaagccctaccttgagaaagcccaagtcactctcgaccagtctgaacccacttcttcatcatctccttccttagaaccccaatcaacctcaagctctgaatattagaaacaagacccagcactgagttaatcacaacccctcttaatttttctatttttacttttcttttctaattgggtattttggtttttgattgaattgaagtttatgtcgacatttatggctcctggtgctctgaaagagaaggtatgttgatttat

SEQ ID NO: 188538 - DNA, 1253 bp, Cannabis indica
gagtaagcttcataaaccaggttttttttttatacttctcaacttcaattacaatatttaacgcatatattcccccatctactttcttgtaatctttagctttctgtcatgtgaagagagcattattttgtttgtttgatcaaaaatgaacaaagctaattagatactgtattgtaaacaccaaaatgaaatgagagataggatgctgctatcttaatattattctagttaatttcttccattatcttatgcaatttatcttgtactattttcgttacttttattgtcgttaatttgtttcgaattcttggtgtttctgacacgatctagtatcgatcgtgctaaggaaggtgagaaagaaaccatcaacaattaataaatgaaattccaatataagaaaaaatcacttgtatgaactaatttaattgaaacctcaaaaagcacaatgaaattacaagttattcagtagtaatagattcacaaaatgttagccgttccaacaaatctagttttcctcctgacaactcaattcgagaaacaatggctacaaagtctaccaaagaaagagcctgaagcatcaacaacaggtttagtaccagacactattttcttcaagttcagtgatccacggctgaaggactagggaatgccattggcaaaaatcaaggcaatcgcccgaacccatccaaagtcgcaccactcatccatattttcaagagattggatgtcgtctcctgcagtgtttaatgtgacaatcaaacactgatcaataggccgttaaataaacaataaaatttacaccatgggggaggtaggataatttcccatttttattaaaatgtgaaaaaaccacgagattaatacaataaaatgatatttatagcatttttttttcaggcactgaaaaaagttggaccacctctcaaaataagctgtgtgaattaagtctccctttacctctttggtcggctacggtcttcctcatagtccatcactccaccaggttcagagaagacctcctcatgccctcggaactcaatgtcggcctgcttacagtttgtaacttctgccacgacgtaagtaagacacatcgaccacaatatcccacaatttaataacagactcttcatatactcatgttgaggaggccaggggtcttaaatggcataagaaattcttttacatttctcaatcgctcaaatagttttctctatgaatagcaagtttgcttttttttgcaagaatatgaatag

SEQ ID NO: 188539 - DNA, 1307 bp, Cannabis indica
ggggctgaagatgattttcaagttaactcttagcaacattggaggcagttcacaaatggtaagatttcttatcaagatgctaaacttttgtacttggaacctatgattcaagatggaaggaagatagctagggttggtttgaacaaggtacaaactcaatcggcattttggaactcagtagtgatatgtatggtacttggagctaatcctccatttactgtctttgagggattcattattggggaaaattggggatagctcagattgttagaatgaatgctcgttttactattattaaatttaatgatgaagctacaatggatgtagtgcttgaagagggtgtcctacagtttgattggaagccattcatataaggccatggacgactgatattgatgccttgaagatggtcaagtcggttcctctctggatcttgtttaaccttaagtttaggtttgcaatacgtggggaaccaagtgtcttagtgccatagttagcactattggaaaatcgataattgttgatacaattacgaaagaaagaactatggtgaaatttgctcgagtgttggttgagatggatattactgatttgcctccccggactgtgcaatttcttaatgaacatgacagacttgttgatcaaaatgtggaatacgaatggctgcctataaaatgcaagaattgtggtggttatggacatggaatggcagattgcaggaatgaggaaaaggttgaatgggttaaaaaggctaaaaatacgatagagaagaaagaggagaaagctactgaggcgaaaactgaagttagtttagaaaaacatgcacttattactactatttctgaaaataaagtgacaaatagtaagattgctaacagtagcagtgggaatgaagctaataaaagctctacttggcaaaccccgaagaagacagttgcaagacgcttaaacatgaggaatgacatgaaggatactatgcaggaagctgaaactagtcaacaagacaaattaaagaatgcttatgaggctttacaagagcagcctagagaggattttaagggaggtacttctttatctcattgatggataattgtaaaataatgtgttggaatgtaagggagttgaataatagtaccaagcaggatgttgtagtggatacttgcagaataaagaatattggtgttatggatttagtggaaactaaaatgaaaaatcataaagttgaagacatgattaagactcgattacagggatgggattattttgctagttcagcctctgaggggcgaattttgattatgtggagg

SEQ ID NO: 188540 - DNA, 2781 bp, Cannabis indica
ttaaaacgacttggagcatatacattttcttgtcagaagcttggtcaaatttctgtacgcatatattcgaaagatgatgctgaggaaccaattccttctttgttgttatcgttgagcggtaatgacggctataggaacaactcagtatctgaagctggtggaatgttcctatttagtaacttatttcctggaactttctatttgcgtcctctgctgaaggtacccttctggattaattggatttcttttctgctttcttttcccttttttcttttctgctaggtacttctaatttggggggttatgtaaatcctgcatggctactgaggaatttttttatctgtatgaattctctgtatctattagtctttaggttgtacaatttctcaaaaaaggtttttggtcagcacgtttaatctcaagctttagccaggaatgataggttttgttgggctctgaacattttatattttcataaatttctagtttttcacaagtcacagttagaaattttgtaatgcacgatgaccctatgttttaattttttctttaatagcttcacttggcgaccttatattgttcttgcaggaatatgctttctctcctcctgctcaggcgatagaacttggttccggtgagtctaaagaagttgtcttccaggccactcgtgtggcatacaggtatcatgtttcagtctcttttgttattttcatctagttcctcacattgaactctagtcatcttaaaagctattttcgaaagaagaaaacatgcatttatttgtaatgtgaagttaaatatatgtatatatatatattttctagtgtaaacgatatacatttgtcatttgatttttgatcctgtgatcttgtaaggacttattaagattgttttattctactttcagtgccatgggtgtgattactctattgtctggccaaccaaaagaaggtgtgtcagttgaagcccggtcggagtcaaaaggctactatgaggaaacagtgactgattcatctgggagctatcgtctgagaggacttcttcccgacaccacttatgtcattaaagtggtaaagagggactgtctaggaaacaataaattagagagagcatctcctgaatctataagtatcaaggttgttcaatctttcctccataaatttgatatccaaataatactttctaatgttttgtttcactaatttgaccatgctgaatatgtttgtaggttaaatcagaggacacccgaggattgaattttctcgtgtttgaacagcctgacactactattttaagtggccacgttgaagggaagaaaacacaggaactacaaccacatcttctggttgaaatcaagtcagctagtgacacatctaaagtcgagtccgtcttccctcttccactttccaactttttccaggtgaaggacttaccaaagggtaagcaccttgtccagctcaagtcaaaacttccatcgagtacacacaaatttgagtcagagattattgaaattgatttggaaaagagctctcaaattcacattggcccattgaaatactttattgaagaagattatcaaaaacaggtatcatttttctctctaatagattagttgatacttgtaaccttaatgctcattgtcagacatgattgaatcatttttttttcttttttaacaggagttaactgctgcaccggtgtatcctcttgttgttggcctttctgtggttgcactatttatcagtatgccaaggtactatgcagtttgattttgatttcggactcctgatgtttaatgacaagataatgattattattattctcttatgccatgaaggttaaaggatttatatcaaactgtgggaacacaaacaccgggatttagcgcggccgcaaagaaagaattgcgaaaaccaattttgaggaagaagacatactaattaccagacaattgtttttgccccctatacaaggaaggcatcgagatccagttcgtctggtttcaaagttttcattagttgattctaaccaacatttacagtagttgtagaaagcacattatgataattttttgatgtgggcttcttttaatcaccactacccttaggggtttagtttaaaatatttattatcttccaatttttatctacgtttcttactaataaaaacttatgttgtatcaaaattttagtctctatttagctttctcattagtttttggagaaatttggggccataatccttaagtttcaattaatatacatttaacctcctgtattttttttttggcaaaatccttaacttagtttttgtttgcaaatcaaatgtatcagttaaattgatccaaataattttaattattttaataactttcaaaattatttacaataatataaaaaaattaaaagtgataaattttttaagcatattataaaataaataaaaaattaaaaaataaactgaaaaaaacctgaatttaaaatccagattctttctatcaatctatactcctttctcttttcttcttctctccctcttcttgcacaggtgactgcccagctcgagtgtgcaagatagcaaaggcggaggacggcagatcaaggaaagagacaaggtactctggtcatcttgacagagaattgcgtgagacaagggttcttggccactcgtggcctctgttctcgccgacatcgatggagattttgaatggaggtcatcatacaggttgatggaagcaaaagagatgagagcggttcaaatataagtttagtgattttcttc

SEQ ID NO: 188541 - DNA, 7094 bp, Cannabis indica
taaagaccttgcatgttcaaaacctaatatatatttttaatggggtttatcaagattagattttgaagtgcatgtgtttatttgttttaagattggcgatatgaaaatccaaacgaggaagatgagggtccgaagctagaagatttcttggggtgttgttactcatcaagctcttctcaccaagaagaatcagcaaaaatctattgccaaaataacaaccaagatcatcatcatcatcatcatcatgaccaaaataacccagaatccatgtccgaaatcacagttaatctcgcttcgagtttcaatcctaataatagtagtaacggtgtggagatggaactagcaatagatcaaaataatcccacaacaaacacttcaaacttaatccaatcttacactcatcactacaacgataataatgccatgtacaaatcttggcttacccaaacgctgccttacactaacgccgcctctgaaaaatcagcgtctgaggcagacggcggcggcggcggcggaggcaataactttcagactctttctcttacgatgagtccaagctcacagaacggtggtggggaaatttcgtcgttgcaagtggccacgacggcggcggtggaaggtggccggaaaaggtcagggggaaagtccttaggtaaagaacctgttcctcgaaaatctattgatactttcgggcagagaacttctcagtaccgcggagttacgaggtaacagtagtgtgactatttttttaataatgaaaaaaaaaaaaaaaaagcaaaagtaaacactttaatctttttctactttaggatgagaatttagaatcttgggttttgtatttctttttatatatttttaggggattcggttttaagggttttttcctttaatatataatatctgtttttacgtaaattatttttgtgattaggcatagatggactgggagatatgaagcccatttgtgggataatagctgtagaaaagaaggccaaacaaggaaaggaagacaaggtgagactagctatgataaaataagtatattttttaatattaaagaaaacatttttatacatgttttggccattttttatttaatagggaggaaagtgaactgtttgtttgttcaagaatcttgaatcaaaggttgaacttaaaaaaggatgttctcttttacatgttttttgtttgcaaaggagtaaggaataatattatgctaactgtttgttacttcgtttcatgcattcctttggggggaacgacttgtttcacttgatcaaaaacttcagtttaccttggtaggtgaaagctgataaattctcattcctttgtttggccatatctatttggatgtttgcttttatatatttattaatttatttcttgcacttagctttttcctctaaaatcatttgtatatatatatttctctcaaagcatcgaaggtgtgctagattttgttttttaaattttcatgtcctaacgttatagaatcaattaatcaggtggttatgataaggaggaaaaggcagcaaaggcctatgacttggctgctcttaagtactggggaccaacaactcatataaatttccctgtaagtttttgcaaccaatattattattgaccaactcatcctatctagctgtttattttgactttataaattctcagttaagcacatacgaaaaggagctagaggagatgaccaatatgacaagacaagaatttgtagccaacttgagaaggtgtatatatatttctatatagtgtataagtataaatttatctacatactataataataccttgttactttttccaccataaattttgtttttgccgtttttcttaaatgataataagtatcaagtttggaccttttttttatttgaacattattattgtcaacgaacttataaacaggaaaagtagtggcttttcaagaggagcttctatgtacagaggagtgacaaggtatgggagaaagccaactttaataatgaagcttttccattatttattaatgcctttgcagctttttttttctttttttctttcttttaaagacaaaatgctattaatattattagtgcaataatagagaagcagtgttgggtatatattggacatgccaaattagtaaaataaggtcaccatcggtcgtacacatttatcaaatttttatttatttttcctttcttatttctttaatggctggtttctttctgccccgacagacaccatcaacatggaaggtggcaagctaggatcggacgagttgctggaaacaaggatttataccttggaacgtttagtaagttaatttttatccttaataacctcttcagtcttttttttaactataattattatatagttaattttttaataggaaattgttattatttgagcctcacttgttttaaaattctaaaattctaaaaaaattgtcacaatagttaccaatctttgtcattcatgctaggatatgtaattaagtagttatttgcagcattgttatttatttatttatttatttctaacaataggcacacaagaggaagcagccgaggcctatgacattgcagccataaagttcaggggcacaagcgcagtaacgaactttgacataagtagatacgacgttaagaggatttgctccagttccaagcttattgctagtgatctcgcaaaacgcaactctccaagagatgtttctgttgcagtggcaaccctcgacagcgactttaactctcgcgtgccctcgacgtcctcaccgcagccacttttggccataacaaacagttgtgaggcctcggacgagcttgttgacatgatgtggagtactaatactgctcccaatatggatgatcgtcatcaccagccccaagagattaattccgagaccaacaatagcacgtcgtttgcggcgcctttgaatggtaggaactcaccaagtggtggagagtttggggaaggaagtggcggagaattcgctcatgcttattttatgcatgggaatagtagtagtggtaataagtacgagcagaatggcaatggtggaaatattggtttggttcaacagcatgctcctatgtttgcgctttggaatcatgagtagtggaagtcaccagttaatttgaatttccaaaaacagattttgtgtagaaaatgtggctctatttaagttataggttgtaatggtatgttcaagtactatcctagttataaacttagattgatttagactttttcaaaaaaaaaaaaaaaacttacgattgatttttgtgctagaaaatggaaagctaccctgaatatgatcaatgtggtatttaaaatatttatgttgctttatattgtacttaattttcaactcttttggaccctctatgtttctatgatgagaaagtgaagtagaaaaggttaagaaggttgagcatgatgtttttcctttggtggttatttattattaaatgtgatatatattacaaaccttgtccacaagatctcgtatttgttttttttaaaaaaatctgatattaatatagtctgaaatttttatcttttgtttaagtcttctaatgatttatgcattattatgatatctgtacatttaaacatatacaacttagttttgaagatgatccacgtacgtaactatgtatcagctgttagtacgacaggggttctatataatgatttataaatcattctcatgctttcatgcatgtaataagttgatgggtaaggttccagtaccgggtgtttcagtaaatttttatttagttcggtatttatgaaaatttttagtctaaattttttaataatacttattggaaaaagttttgagttgtttgccaataaattttacatatattattgtacaggcatgataaataattttttaattttattttcagtattgttattttattataaattatttagaattttttaaaattttaaaaataatattacataattacaatacaacctaagcattcatataaaaaattagattaaaaaaaataaaatttttctaagttaattattacatatttacgcaaggggtttaaagtgagggtgtttgaagttacggtggggttgcgtagcagaggatgatgatgctccctctagccggcgcaacaaataaaacaatcggtgtacattcaaataacagtacgtacgttaataaggctgggaagataccagggtgcatagtgaccaggtgcaccgcaaggaaaaaagtcaaagaagtggggggcccttttgactatgacatagagagaatctaagcagtaaacactttacagtgaactgaaaggcgtgtcttaatttgcgtgcccttttgacgcaaggctttattaacttctatttactctcatttcctttttttttttttattattttagttttaatttgttagtagtcagaggcctcctctgcccgttttaaagagcccatcaatctacccaacctcttccaatccggccctataataatttatattctacatttttttcttcttttattagggtcaccaaaaataattaattctgccaaaatgactataatataaaatagataggcagttctttaatttttttgtttaatttttttaatgttattttaataaaaaatactattattttttattattttatcaaattaatttgtattaatttaataaatttaaattataaaatattatcaaaataatcaaatgttaattaaagtagaaagtataattagaataaaaataataaaaatgtctctccactctaactttttaattactttaactaaaaataaagaacatgagatgcccttaatgaaaaattattattattttatttttaaactagctatgcctcacatatattcttcatataataaataatattatacaaaatggctaattatagagcacgtactacaaatttgtgagcacttcaaagtcttaaatatccatatatattcggatactaatgtctatttcggtaaagaacttgtgttcattagttcatattttatctaaagcaaagtaaataaaattttgcatgttattttttatgaactaaatccacaagaatgaatggccttataattaaaggaataccagctactactactactatatactggttagctaaagctatattgtttagggaaacgatgacctagctgaaggatatatatttatgcttttaattgcctagaaacacgagaaggaaactgaattgaaaaaaatgatgtaaattttgatagaagtgtatatgtacggacatgtggggttagggggtggggtaatgaaaatttagatgtatagatatgggagcagaaggaaatcaacataaatctagctaaaagaaacttgcagctcagcacgggacatttacgtacacatacgtatatatgttatagaatgagacaatatatagacaagatacctcagcagagacatttctctatcattacttattaaataaataataataacctgctctctctctctctcaaggtctctttctacgcctacgtactaagtattattaatagatctctcctcctacgttttcctatatcttttgattaattaatagcccttagatctccctaccctgttagctgatcacctcagttttcagctatacattatatatatatctatatgttccccacggttcctctctctcaatcttaattaatttccagctgggtctatctacctagagtacgtattctagctgttgaataaaaaaactgtcttacttcgcggttcaaacttcaaatacattttgttctttatttctttcaactctgtttacaaaacgtgaaatgaaaagttaatagttacactacttcaaatggcattcatttgagaatttttttttattatttttggagccattatgaaatgtaacactttatttgtaggtgtcgacagttaattaattagatactttgaattatgtcaactggttctatttgttggctgtattgtgaaaaataatggtaaaagtgtataatgactttgcgtaaggcgcctgatttggttgttgctgatacatatatatatatattttttatagaaggttgttagatatttaaatgtgtggtattaatatttataggattttgggattttattagctcataaataaagcgtgggggtatggcattgcaccggtatttgttgaatttaatttctatatattctaaattttacattccactgaaagaaacggggttttagctagcttttcggcacaagaaacccaaataaatgactgtaattattagacgacaaatctcactgtattctgtaaaagcagtttaaatttgctcagacagctgaataaatatgtatgtactaatggacagaaattcaaaaattatggtactatatctatctcattaattatctctcttaagatttttttaacaaaagaaaaaggcaaggtgctgaaaattattaaagaagggcatgcattcatggtttcatcttagggtcacactaaatctagttgttttggtttttaggtgtaactattataagaaacaaaatgcaacaatttccaaggcgtatatgggttcaggatatgggaagaggttgccttttatcctttgggttttggcccatctgtttcaatattccatcctcatccatttgcacttgttacgtcaatttaccattttgccatgtaaagataaaacaaaacaaaatcaaattcaaagttggatttcgatttcgatttcgattaattaattaaataaaccctgtcaagtatatattttgttcacacctcaggatttgatttgatgatccgttatgtgtcttaattttgttctttcttctttatttttttttatataaaaatagaaaataattataattgtgtgattgagaggtattgtttgatgggacaggaaggaatagggaagacagttcgtgctgtcactgtaaaaagggcactgtggtaaactgcggctggtttgctgaagcggccaaacatgcttcttgctctgactgcatcgtactaagagctacgcctctattgcctaatcactacaatacaaaacaattctctctt

SEQ ID NO: 188542 - DNA, 3181 bp, Cannabis indica
tctaaattacttttttaagatttattaaaaaaaaagtgttaaatgtttttcatgtttattttgagggggtacaatttaatagttgtcaaaatttaggaggcaaagttgttaatttacaaaaagacgtcgtcatttaaactgaataatgggacagaacttaacagaatgactaaatttctatagatgtaaaagtttaaggaaattcttaacaagctgaatattttatagagataaatcagtattgtcgaaaatttaggagtgaaatttactaattattcttctttttaaattagtagaaaatttatattaatattttagaaaattaatatttgtattaaattaatgattaaattagtgtttaacataaataattttatattatttaaatattttttattttattattttagttatttattaaataaaaatataataaattattttgttatatattatgatatatatttaattatatatgatataatattttattttataatttaattatttatttttcatttattctacaaattatttatttatttatatttattattatatatattattttaatttgttttttttttaaaaaagaaataaataaaataattcaatttatttttaaaccaaacacacgattactttaaacataatctaatcttgtccaatgtccaataccaaacggacataaaacgaacaaaaaatgatagaaaaaattataaagaaatctgaaatttacaaagcagatgatgaagttgattttttttttcttttttttgtgaacgagcatgtttagtagtttggtttgtaaagtctttaaagataaaagagttattatatgtaacataataagatcccatagctataacataacaaacaactcatcctaaatacttcacaaaaccgatccaacacaaaaggaattcacaaacagttttattatatgttcatgcctgtttgatctgttgcataaccctgaattagattttcttcttcacagtaaccaaatcagtagtagaaccataggctctgtgcaaggcttcagcacaccaaccatgaccatcgtccactgtaggcatcctaacttccatgaaaggtgttaccagtttataagaacttggttgtacaacaccagcaaaaactctcagcacatttgaagcatcaatgtctaagcacacattgatattcgaaatgcctttaggcgcgggaggaattccaacgatcttgaaataccctagcagatgattttccctcacattttcatgcccttccccctcgtacacgatgatgagtgcctcggtttggttgtcttggacagtggtgaaagtcatctctttccttgctggcattgtggtgttcctggctatgattggcacgaatttgcctccatctgcctgaattccaattgcaagaggtgtcacttgtatggttaacaagtcaagatttccaaatgggtcactaataccagaggccactgccccttcaagggcagccccacatacagcagcttccaaagggttcatcccattataaagctcttttctcttggaaacattcaagacaagatcttttactttaggaatatatgaacacccaccaacaacaattgcatcattcacatcctcaatttgtaccttggcatcatgcaggcactggattatgagagactcacatttctcaaataccgttttgttcacttcttcaaactcctgttgatccaagaccttgtttatctttaacccatttcccaagtcaacatcaatctgaacactggactgaaaagagagtttgtggattgcatcctgagttgcaactctaagcaaacccattgcttggatgtcgctaattccatggcttgagaaaagggtatcagcattaggcaacagatgatgcatcatattctggagcaagtcttctccaccaatggtagctccagccaaggcttttatctgggagactcctccagctgtagcagtcacagctacatcacagtatccagcacccatattgaaaatgaggccaattttctcactgccactggccatattatcatgggcggtttgttgttgttgagcatataacaatgccacggctgttggttcaggcatcagtctcagtacatgaagaccagccatggcacaagctcgctcaatccgagtaagctggaatcggctgaatgaaactggaatggtgaggacaacatttcttattggtcgcttaagctggatttctgccattgctcttagctcaaccaagaagattgccaagacttcttctggtgttgttgatctccaggcattgttcaccaaggctgcgatgaagggtcggacaccaatgtccaatgtttgtaccaaaaacggaaggcttttgctggcatgaacaacaggatcggtgtcaaccctgccaatcaggcgtttcatgttgaatattgcagctccagaaagcaattcatgctcatgagaaagttgattgctgactccaccggaagggacttcatctttgaatgtaacatatgacctcatcatcttctggtttctggtgttcttaaggagctccacctgggagccattccagaaagcaacactgcattgtgaagtgccaatgtcaatgccaatcgcaatttcagggaaagcagatgaagatttctcctctgctgtgttttcactgtcggataccacggtgtatgctggttcagccattcttgtatatctacaaatcacagcccggatggtgaatgtactcaacctatcatagaaagtaagtagaaagagagtcactcaactcttcatgatatacatctagccactcattgtgatacaatgtaagcatccgtaaatatgcaagaaatatagaactaaaatgaacacaaaaataatgttagtcttgtttactcgagaaaattgtcatttgggtcatacaacaaacacctatagggtgtaatttattgcactttcgaaatagacaatgcaaaccccacaagcgtatgatctaataactaataagtcttcatactaacgttgataaagaaatatttaacattttcttcgccagcagaaccaagaagagaggaaaatttccctacctaaaaacagttggtttagttttgtaatgatacatgaaacatggcatgaaagacactaattcaaagaaacccattcgcacaaaaaaaaaaaaaaaataa

SEQ ID NO: 188543 - DNA, 1248 bp, Cannabis indica
ttaaaaaaaatacaaggtttaatcttaccaccacatgatccaatccaaaaatatttaagaaagaacattgccaaactattgatattttgaagggtgattattgcaatagaaccagctaaaaaggagtagccagtactactaggacacaccaacaacatattacatatagtaatatagttttgaagcccatgaacgcatggacaacatttgcaggctctctcacctgcaaaaagatttgaaattactacaatttaatcattttcttttcttttttgaaattacaaggatttggaatctctaataatagattcaccaacagcatagagcaatgagtgactaccataccattattattatatgaatttcttatcgatatcaaacttaattttgatataatatatttctctcaattgtcataaaatagtgggttattcgaagaaaaagaaaagaaaaaactgaaaaagatttgtgagtttgatatgtacaaaagaatccgggtctagtattaggtctgaccatttcatcatcaaaacagaaacatagtgattgtttactatttttctttttgcagaggaaaagccataagtggccagtgaatcccgtgatactttaatctgcccacataaagataaaaattatggcatttttatcatcacagtcagtcactcctctcactctcactctacccccacaccatctctctttaatccttcttttgtctctatcctcacatctccactattattatatctcataacccatttcaatctacactattcacaacactattctttctctttctatctataggaccgtattcctataaaaactctcgtttgggtcaaaagggtagtagggaaatgacaagttcgagctcatttttgaggcagttgagtagtgggaagagtgaggattggaaatcgacatccaaaaggtggggtgggaacagcaagtgtaggagtagtgtaggtggtggtgtcaaaaccatgggttatggtgttagccagtgcgaagggggtttgtcccaaatggaaggtatgaacatgtatggtggatttgggacagaaaatggtggtgggttggttatgaggaaaagagtgatggttgtggtggatgagtcttctcactcgaaacatgccatgatttgggcactcactcatgtggccaacaagggtgatttgctcactctccttcatatagttccttcttcccataaggtggttgtctcctctgaaagggcttcttctg

SEQ ID NO: 188544 - DNA, 2835 bp, Cannabis indica
atgtaatcaatggactaaatttgtacaaattaagagagggtataaaatttgatatgacttgtattattaagaaaaaaaaatgaaattttcccactaaattcaaattacagtcataacgttccaactagtaaatttcgaattctaattctaccacgacataaaaaaaaggtctcgcaagggtgtggtagtgatacaagaataagaaacaaacaggggtattattaatccattgccgggacgaatctatctctatcgggtcaaccaaaaatatataatagtagagagtatagggaaatggtggggctaggaaattggaatgcgtggaatgggattagggcaaaaataccgatccttttcttgagaaccagacagatatagatccaaacacatttaatgcagctcatctacccttgtcagactctatagcattaaatattatcaaataaattcatttattcattttttatttttttaccttttattttactatttttctttttgaaaactagtgggatagtatttagtgttgctaataattaagaaatgtttgacatatgtaaatgcaagaaatattggtggtcctttctctttaattcatggaggttagtgcttcatagtgttaatttctagctttgtaattggttgaaatgtgtttttttctcttttaatattatttttggtttcatcaagttcaaaatctgacaagaaaatgccaaatgtaaagtttcacaaagcttttaagaaccctagttgcccgtcagtccatgcctatatatgtacaccaaaaagaggcccattacattcttttgccctcttcctacgtgttgtgtcactctcatctcaactcaactctcaatacacatgcaaaatagttaaatttgaaatgaaaaataaagaaagcctgatgagtaaaagtaaatcccagcatttttctagcttgttttcttgaaaagtagtaatttttctgaatattatttaactaaaaactttattagtcactaaccttacctttccatttgggtcacttaatctgctttcttgtaacatactccatccaattattgtctcttttcttatgaaaaatgttgccagctaaaatacaaagactaactcaaaaaaaaaaaaaaaacaacttgaagttacttaattgataatcttgtatgggttttaagattattaaagtgatttagctgttaaatcacatactaaaaactgatatagctctttgttacgttaatgtatagccttgtatgtagcacatggaacctatctcaagtactgtaattgcagatttcgacaactgtttttgtccatttcctattggaatttagtaaataccacttgaagacttctctatactcttgactgaagatataaattttgaattattcaaatgtttatgatacccattcctcaaaacagagaaaaaaaagttatttgaaaatgaaatcagttgatgtttgggacagtgagtccaaacactttgtgacaataatattgagagcttactattttcttctttgttctctcattgcagttttgggtttgttctaacggctttttgggtaattagggtatggtttgctttaaaacttgtgactttttaactgaacgagaatgacaaatagctaaaatttgctcataaaaaataaaattaacaaactcaaagttatgaaaaaaaaaaacgtgtgcaaaaagtaaaaattaagcaattatcaaccaacaacattttcaaaaataaataaataaataaataaataaataaataaataaataaaagaaaaagaagcgagaagagacaaattaagggcattactaatataatatgtgtgtacctctaatttctacataaattatatattatgagttataattaatctcactgtaaatatatttttaagtgggatcatgatatgtttatttatgtatcatataatatataatttaaatgtacaaattagaaatgtatctatcattagccgtatgctaaatattaaaacataattaatcaaacttaacaatattggtattttttttcgcaaagataacaatatattggtatttaaaagaatgaaaagttttttttttttttcaaaaaaaaatgaagatggttgctgtgttgaaacaagcattagattccttaacacatggctaagaagctaggcccaaagattggtcttcttctaggcatagcaactacccaccacaactaaaaaaaggggcagctgcaacatttaataaggggacaggtatatgtctacaaatttatagagttttttagagcaaaataagcattctcatatagaaatgaaagatacaggagctcaaaaaggagaaatgccactgaattgaagggtcacaatctttacaaattgttcttaatgcattgtattcctttttgaagaaagaaatttattattattattattattattatttgaaagaagaagtttattattcatttggaacaaagcataaataaaccattgtaattctgcaaaaataaagtgacaagtagaaaactaaaaggataaattgtgattttgtaaggaaaaaaacaaagatcaataaaaatatagaaaagaaaatagagatatttttctttttgtgttttttgtttttttaaaaaaattcatgggaggtgggttgaagctttgatgggcaattacataaaggagaaccaaacaatctgttgctctggtctgtgacacatgatttgcccaggagaaaaaggtaacgctagaaacaaggaaaaagtaaaaggtgacttaagaggtaattataggtatggaaagcaaacaaagccagccccctctctctttttctttctctctc

SEQ ID NO: 188545 - DNA, 5940 bp, Cannabis indica
tctgaccaaacaaataattgtcaacaaagttgtttgatgatttctcaaattcaaagaattcctcttactttctcttactttattcacaggtcgtccacttagctggatttggaaagagataaaaggaaaaaagggggactgaaataaacttttttccttccattttttcaatcaaacaaaaggttttaatctgtttatatcaacatgagtgctttatgtaaaaaaaaatccaactctccattctagattagcatggtaatataacgagtatctttcctacacacactgtggggacgtctacaaaattgtttccaacactatcaagcataatagaaaaaaaggctgattgagtaaaaaccatacacttgcaagctattatgcactaaccaaaccatacctcaggctctatagctttctttgaagtatcacaaataatcgatcgagctaatgcaaccctttttttcattccaccagacaattcagaaggcatcctttcctccacatcctgatgggataaagagaacaaaaatcaaggttagtgcatgtgagaaacagaaccacaggacgccttataaaggccaaaatctagtaaaagcagcacatgggcttttggaaatgtaacttctattctatcagaataattagacatttatagctagaatattacctttaatccaacagcagccaagctttctgtcacaagctttgaaatttgatcaccaggcatgcttgagttctcatatctatccaacaaaactcaaatgtatcacttatcttaggagtacaatattaaaatcacaaaatctaacttaaagagatgctattaaataaaacaagggtagtgtaggttttcttacaggaggaaaccaacattttcccgaactgtgagagaatcaaaaagtgccgcgctttggaaaacctgttaaattatagaccagtacattataaattacataatgtgagaaccaactatacattaaactacatatgttttaaacaatatttaccaatccaattcgtagcccagaaatctcctcgtcactaatcaaaccagctctttttctgcctcggatgtaaacttctccctgctcattgaatagtaagtagagtcaacaaatgagatcaagcaattctataatgttcaaaattctaaagctcaattaagataaagatgatttaattgagtaaggacactctagggaaagcctgatccaaataattaccttgtctggggttagaagtcctgcaataatctttaaaattgtagattttccagtaccagatggcccaattatcccaacagcttcaccatgtctaatctatacaagagaaaaggcaacagtatataagaaaatgtaatgcaacactacacaaaaatcatcaaccagaaaataaaatagacaatgatttggtattttaacagatgaaattagattcaccttgaagttcacacctctcaatatatgcttctctccaaatgatttatggacgtctcgacactcaattagaacatcagaatcaccataatcaggctcccgaaccctgctcaactcacctgacttaaatgaatcctaaccacataatctctgtcagtccaataagaacagaaccgcttcaaatcagagtgcaaaacaattatcaatgaattttcagcagaaatgtccataaatcaaagtttcacagttcacctccactccatatatggcttttaataaatgaattattcaatcactagtacagaaacaagacaactagctcgaactaaaacatatgcttaaaaaggtgttcaaaccaatctaatggaattctcatgaaagaataacgctagaaagaaagcaaaagctatattaaaataggggcaaagtatttacattgaatttggtagcaaaggacccatcattcctcaagttctggggaggcgccatgcaagaacaaatgatcttatcgtgcactttcttctgcctagaaccgctataaagcattgttcttccgaacagaacagaccggagagaatcactgggtataattagaggagctacccctgtgcttgacagagaagccattttttttaattcagaaaaattcagcttattctgggtcaccgaaatttcttaacttgaaccagacccagatcaatttatcgaccaaaaatcaccttacgaagcaaatgagattctgggctctcgtgaagtagaagccgaaacgaaaccgtgtttcaggtctctcacccatacaaaaacccaattcgctaattttttggcctccttttcgctgattccttttatgttattattactactttaatggcttcaacacttcatcttcaaccaaagctggtcttcgttgaagaactttttattttatttttactactttaaaaaattgaaaattttattagtacttggtttgggtacgaaaaggccgctagattcgggttgtatccgaacccgaatcctataacaaaacagatgaaaaaaattcgacccgacccactctctactatctagattctagaagcaaccaatcaccgtcttcctctgcttctaatctctaaacccctctcacttgacaaaatctcaagcttgcttgattttgttcaattggatagaggaaggagtaataatgcatcctccattaacgcttcacaagcatccgatgtgtgccgaagtgagtccatttttcactgtcttctctttcccttcaattttggggttttatgtatttgttgtttaatatagtccttcgaatatatagcaccagatctttacatattacttcatactagatatatgtatgtgaatatgatctatttttatatttatattgataagaaatattgctgaaaagagcaagggaaacaaagaattcctaggggaaaataaaaacataaattattaaactaaaacaatctcccaaattcttaatgacccaggacaagcaaaattcttaaactcttcaactaaagtgctccccaggatttaacattttgccagatttctttctaaaagatgttaaattttctaagaattttttcctcatacagcccaaccattccacagctttcataactataatagcaccgattattttcttgtaaccaccaatagggggttctctggctagttctccaattaaagcttcaaacagcccaaaatgcaccatcttaaatcctatactcataatggcaatgttttttctagtccgtgaatatggtgcaaatgtggttgtccaataacatttaaggtcctctgaaattattgatgtatcaaaggtgcgcctgggatcctcaacttcttgtacatttttggtaataaataaaatcacattaggtagacgaaacaacaaataatatcttttgattcgtattgtcattgatgatccttgtttatgcaccatggcactccaaattattaatcagaatttttcaaaattttgagtaaatagcactatgtttcttgctctacgtcacactgttacaattacgaaacgggctttaaactatttccaagacatgtttgcttactgtcatttccttgaaacataattgatgaatgcacctagctgtaatttttttgatttcttattaatgagtcatttgttttgctaaattacatggttgggaacttttttgtttttgctgaattacttggttgggaacttgtttaggccaaaacgcattaaaattcttatgaaacaacagcgaaagatagaaagatagattgacgcttcaatatttattttctgctttgtgcagataattgagctgttccagcagtgtcatttggatcatcctattggtaaattctttggtgaatgtacagatctcaagataaagcttgatcgttgctttcgacaggaagtgagtttttattcagctagtgtctatttattgttcaagttttaatggtatgttgattttaaggactggaattgttcacagaaagctctaaagcggaaagaaaattttgaacagagtaagaaactgaaggaaaggttgcatgctttcaggaaagaaagtgctgagacaagcactgagtagggtaattttgtacccttaatagccaagtcttcgacgatggtggacccatttttttccttttaaccacacaattatttaacatagaccgaagatgatagcgtgttgatatgctatcacatattggtgataagctggaatgagcaaattagattgctctgcatatttcttttcatgcataaaagaaaatggaactatgattcataatagtttatttgattgagatactcagccagcttgtatatctttatttgttacaattcacattttcaaaataaattatgtcattacagattcatttgtttatgtttcctcattttatacttttaccatgaattgcttgaacaagatagaagtgaagagaagggtcagtgatttggagaaaatctacatgattgcaggtaatcacatgtaaatactttttaatgcctttcaatttccacatggttaaacattataaattctagtaatgtgaaatgatgagattgtcttccaaccaagttttcctgtggaggcaagagctggtgaaaaaatggtaatgtaggttgaacatctttagtgttttgcttctacacttaaagatactcacttacacagatacggagagcaatgtacttaggaggtgatgcattaaatttctcttagcaattttgtagggtgtatgtgtatggttgattatgatcagtctttgtagagttgcacaagagagtttctaaaggatgttttctagtgattttgaaggccatttaccaaaatttgctttattttcttgtctgacttattgaatctaaagcatctctattatttctggaatagaatcatatactcaatggggtcatagttaaatcaattagaagataatgtgtacaaagcctggtaaatcaatgtggtagcctaatgttaagtcttcttagccagagcgagtgaagcaccatgtgaaatgcatcatacggcttagctggtctgttgagctcaaagtgccttttcacttgtaacacctttttttgtaacttcaagaacttggaatgaggaatggctttcaagatcttcttaagctcaggtattctcttgggtgagatttgaatggagaatttggtccaatcaagaacctcaccaaaaggcaacgaataattataagagatgagaacaggaacacaaccttcatacatggcctccacaactctaggactagcaacttcagacccacttgggcacaagcagaacttggtccttcccattatttcattatagttttgtcctttgggaaggtactcatgaacttgaatttcatcatctttatccttccaatgctcgaacaagtactttctaatgtctccatgggcaccgccagcgaaaaaggcaaggattttgcggtttgtcggagattggcctagtggaggtggtccaagtttgtgattcattggcaagttgtattcaggtaatgaaacgtctctcataggctgaaaaccttctgatacgttagcattgcataggactcttataaaattgttgaagtactttggatcgtcacgtatgatttctggagcctataaaacaaataacaatgttatcttaactagataattaagctgaaagcatcatgcatcgtagttttcatatatgaatcatgtcaagtctatgaatgagttattatgtgtgaaaacaaaacaaaggtctactagaagaagaaagcctagaaacaagtacttttgtaagctgtatattctatgctattttatatagtgaagaacgaaatatacagcttacagattttcttaagctgtatattccttttgtgtatgatgttgaacattacagcactatataagcctttagtgttaataaaatagtaaatcatcaagtataatagcatgacatacccaatcatgacaagaaaccataaa

SEQ ID NO: 188546 - DNA, 2329 bp, Cannabis indica
caaaaaaacaaaaatataatttaaacagatatttatgacttgaattagaaaaataatgttcaataaaatatttaacttttctttcagtattttaaattatatgaaattgtctgaaaatttagaaatatttttaaataattacaatataaattaaaaaactctcttaaaactaaaacgtcgtcccattatttaagaatgtactaaaacgtttatttaagaaatgtactataaagttacccatttatattttgttttgaaaattcttttgactaattcgtgaataatttcatgatcttgcatcaatgtatccagctatacttaagttacacaaaagaagaagagactgtttaagagtattgcttcccttgagagaactaaaaaaggaactattatttctgcataattcatggaaaacagcctcaataattttacctgcagtctctattctctaataataatgtaaacgcttctctctctctctctgcaattattattattattattattattattattattattattatatgtaaactcttatttgctgactaaaagtaaaaatcttctggaagtgtttgttttttccccaagtaaactaagtttcactacagttagttgtgacaaaagattcttttttttttcagacaatcaattatagtaaagaaatttatgtgcacaaaattcgtgaggacacaattttattttatgatctttcttttcctactcaacgttattggtaactaatttcgatttttttttccggaaaaatgaaaaatcaacgacgagaaaggaataaataagcccttgataattttgttatacataaatgatgaatggtctgtacatacatacatataaaagtcgatgaaggaactgaaaacacaaaaaaaacttataatatatgcatgtacttgacatgtagttttttaagctttttttttctttctttcttttcagtcatctatcaaatcattagacatccagttgtatatgttaccgataaataattttgttgttttttttattttaaaatgaaaatgaagaagcattattatgcatgatccggtggggtatggtaaagggtagcctttttaccctttcctatatatatgaatcatggtacggacaggataatacacataacataattattgagttacaatatagctttgtactgtgttgtgtgtgcaaacatatataaaataacatattcttaatcacaattagtatagtactatattttatagtggttacgttgtagtagtgttttaataatcatgatatgaacatctttgtcctaatgcggttactatatacttatatatatatatactattcataagcatgccaaatgctatttactgctttattttctttttcttttcgtgttataatgctctctttaagttgttatacaaatatatagatatagatatacacatacaaaaacatacaaaacatattagaaagaagtagggaatataggagtggggttgagtaccttgactgagagtaaagtgggaaagtggtcctcattttatcttaagtactggtccatatgcacatatatatatttgggagagagagagagaagttaatatagtagtgttattgtggtccatgcataaagatatatagaaatggaacagagtaaagaatagaaaggtttttaataaagatgagatgaggagagatgaataaggtgaaaggacgaggcaaaggaacatgatgatgatgatgatgatattgaagtgggtggaaagagaggatgagaatagggacaaataaaagtcattcatgttttgattaatgaatttcaccaacaacctcatccatacctggctttgctatatagctcctacctaatattagtactactcagtcagttccatccactctactacttttcaattctaattcatttacacccccatcacacaatacaagaatcattttgatctgatatacatcttgtcactttatcaaaatgataataataattacttaactctcccattcaatgtatgatactcacatgcaatattacataatattattaccaaattaacatgagtcaatactgtgaaattaattaccacattattagtatccctagctaataacctttttttttttccgttactagagcgttttttttttttttggttaggaaatactagagcactttcatatgtttatttgaataggcaaaaaaatttccttttaaaaaactgaaatagaaaaaatagtttttttttcccaatttatctgtgttctgtagagcactcttgtcatttgatttagggttttttctttcatttttacactt

SEQ ID NO: 188547 - DNA, 2413 bp, Cannabis indica
tggcttgatcttcttcttctatcatgacacctatattgttcaagtgaagaacaattccattaaactcatccaagtgtcttcccaatcccttgctttcatccatctttatggcataaagtttcttctttaagtacaacttattagccaaggatttctttaggtaaatggaggcaagtttgatccacaatcctaatgcagtttcctcatctgagacttctctcaaaacatcattcccatgactttaaaggacaacattatgagccttcaattcagtttctctcttgaccttttcatctttaatttcttctagttgagttggattgattgcctctgagataccctaatgaacaagcaatgctttcatcttgatgcgctaaaaattgaaatcatttgtccttgtgaacttgtccatttcaaactttgctaaagacattttcaagttgtgttcttttaatctcgaaacaattcttcaatgctaagcctcttctccaccaagctctgctaccatttgtggtgaaactcgattcatctcattcaaggacacacaacaaagaacaccaacaatgaaaatataattctaaaccaacaatgatcaaagtaaacaatccaaaaactgagaacaaatgaaatgatagtgcaaaaaacttaaatgaacacttttcttttatgaggttcgaacaacaagccaattgaacttgtgcctacatgcctgaaaaataacagctctaaaaactttattgatgaatcaatagttgttacagaaatcgatcactcaagaacaagatagatccaattacaaaagaagtctagctcttgaactctctcactcgatctgatctcaccctctctctttctaattttgttgtgttagttcacttttcaaatagggacctagccaactatatatagctagcatttttagttggcttaggtgtcccaataactaacttatccaacttaaaaaagaggaaattacactctataccttttttatattattctcttttattgttaccctctttcttaaaatctatcatttttacctctttttttaaagattgtatcaattttatcgatgtcactttaagatactctctatgtgattctcttatgtcagggtattttaggtataatacatataaaaagaggtatgtttcaattaaataaaaaattagaggtaaatttgattaattgattaataaaagtggtatttttcaacttactctcttaaaaaagatgaccaaaaccaagagtgccacttggcacaatgtgacttatgttaaaaactccacaaaaatccttataaagaaatccttatttatatacaaaaatgtgaaggaaaaaataatttcaaaaataaagaataataatgcaaaaagaaatcctgataaatatataataaaatataaaatgaattacaagtagcttctcaattttacttttaaaaaaaaaaaaaattaaaggacaccataattttcgttacattgggctcctatttacccaagtatgggtgtcttaattcttatggtgtttgacatcttaaggtgttccttatttctcttatttttaatattatattttcatttctattaggataatgcaaagtacattatattatattattaaaggcattttaaggtgtcaaatgagaatactttcaataaaaattaaaattattctgataagacctaatgattaatttgcaaactatatgtatgcataacatatctctagccaatatttagtggactgtacaacgtctaccatgatatatattattgattttagaaataattaataataataaaatacttttaattgattgattcttttgactaatattataggaaattaaagaaaggatctctggatctcggcagtactttccttttcactatagtttattatacttttctttggtgttaattaattaaactaccgattccttaactgttaacacactagctagaaaaagttgttcaaaataaattaatatatcacactagaaaaagttaagttattatttaaaagaagaaaacgttaaatatattgctctaatatatatatatataatatatatatatatatatagttaacctaaaaagcttacgttttcatataaccatatatatatcgatcaaaataaaagtagagtgaacttgcctggtgcttgtttatgaaaagtagccaaatgaaaaaccgtatttccttctaatatactttccaattaactatctccactttcccaagcgttcgaagctcttcaatcaaaaacctaacagcctcaaactggttattctccacagccaaatgaagaacactctcctctcccacggtcacgtccgagagagactcgggacaagccgaaacaagctccctaagacacttacttgacctttcatggcagcaaagt

SEQ ID NO: 188548 - DNA, 2236 bp, Cannabis indica
taatatttcactcttagtgtccagttttcctaaagtgcagattttttgtgtgtttagatctgttaatactggtgctcacttgcttgctaaatatgctctttcggtggactctatttgtacttggttggaggttattcctccacctcttaatacttgttgtattatcttaatttaatataatttgcattgttctcaaaaaaaaaaaaaaaaaaaaaaaacaagcccataaatttctggtaaataatattcaaacctttacaatctctcaatggtgccaaagaaaaagttttgggggagacggatgagtttatgagctattttaatttttatacttttacaggttaacccaattcatattgagtataatttttttttttaaagcatattggatataaatttggttatgtctgattacaggtattgagtctgtacaaattgtacgtgctattatctattttcaacaaaagtttactctgtattatgttattctagcaaattaatttaggattgggttgtgagtgttgaatgtgactaatttaagatggtattgttgatttatatgtgttttgcactggaataaaatgcgtaaaatgatctgagattgcaattgttcatataaaaggctcaagttttgtatgatagaactcatagatatataattaaaataatggcacctaatcatgcttgtttcacctgtaccattttatgtgtggcaggtttatctttcctcaaccaaaacaaaacaccagctagagcacacaacaactccatgatccacatcatatttacctatctgatccactttctccaatctatatataaacccatacatataattgttctatctcacaactccaatacacaattatataacataatacatttagagactacgtacaaaaatggccatacctcatgttttcaactcaaagacagtgactctctacatattattcttagccatcgccgttgaatgtgccatctcagctagattattcgacgaagtagacccacaaccacaacccctgcctacaacgactgtcccaaccaatgttctaccacagcctaatcccacagccccaactcttttgccaagtggcgaaatcccagccgtagccccagcagtcgcagccccagtagaagagattgctgactcaccaattcaagattttgctacacccgttgacgattctgttgctgactcagcccagccagctcagcctgctgttccacttccatccccaccaatcgacgtggcacaacccatagctggccccacaaccactaaaactggcccaacaacaacagggcaaggccctgtacaaacaggcccaacaacagggcctaatgggcatccaacaatatcattcttcatgcatgacatagtgggtggatcgcacccgacagcccgagtggttacgggccttgtagctaacacaatacaaaacgtcccattcaccaaagccaacaacaatatcttcccagtcagcggtgggaccccgttgactacatcgaacattaacggtttcattaacagcaaccgtaacaatcttccatttttgacgggacttaacggtaatgaccaaagcagcaccgttattcaaaacagcggtaacaacaacattgtcgaaggaggaagtgaccagccatttgtcacagccggtcagctcccagccggtgcatctctacagaaacttatgtttggatcggtgacggttattgacgatgtgttgaccgaggcacccgagttgagctccgctgacgtgttaggtagggcccaagggttttatttggctagctctctggatgggaacagccacacgatggtcctgacggcggtgattcacggcggagaacacgcgggtcacggtcatgtgacggaagacacgatcagcttctttggggttcaccggacggctacgccgatttcgcacatcgcagtgattggtggaactggaaagtttgaaaacgcgcaagggtatgctacggtggagtcgcttccacaggtggaccagcacaccactgacggtgtggatacaatcatgcacgttaatgtttatctttctctgtagagtgcatgcagttatgtggtaatgtgtgtacgtaatatagttaattatctgttttcttaaatttgatgtatgatgtaatgtttcccataagtatttgaatttcaatgaaaatgaatctttttacttatttcaaacctttttcaacaaattctaataaattaaat

SEQ ID NO: 188549 - DNA, 1336 bp, Cannabis indica
aatgcaagttggttgatctcataatcttgctcgtcaagctcgcctaacaacctgttgattaattttacagggtcatcaggggctactcgaagacgtggtcggcacaaaccttcaagctcctcgatacgtggtggtgaataatcaggacccatggttggaagttccatattacatgaatctatggagttggaccagtcagacatagagatggtcgatgttgtaactgggaatcaaatgtaggtatagtgttagtgatgagtccacttgttatcagccagcccaataaatacttatataagagctgacttgtagttttgttttggttgaataagtttactaatagttcgaagggcctacttggaattaaaagaaagtttttgctggaaaatgtcagctgatattatgggattttattggatattgttgaccatagaactgcataggtgtagtactcacacgctagcctcaatgtagaagctttctagtgaagcttcaaatttccatttctctaatcctgtttactcacacacaattacggattaccaataaatttaagggttttttttttatttttacacttcaaaataattttttttttttctaattttatggaattatacataaaaatctctattgcaactagcgttgtaagttaaatcgcaacaaaaatatcgtatagcaacctacgtacaaactagaccagagaagctactttacaaacccaaactgtaaattttaatatatggagtaattctcctaaatttaataaaatttagggatgaataaaaaatgaaaactataatggaaactaatagagaaactcttcaaaatagactctaaaacaacacaccgatggtgaatttggtgtcttccaagtgtgtttttgtaaaacaattaaggaatatttaatatctttcatacgtgttgtttatcacaataaatttactaattaaattttttacaattttttcagtataaaagcatgtacgagtcgatcccataagtactatgattaattttattattcaatataaaacaaaaagtgtaatggggattttgagtttgcaattaaatagaaaataaataataaatgacaattaagattacgagtagttaagaattattctctccctacaacaatcaacatcaactatgagaaattataaacactaaaagtgttatttatatgactctttacataaacttaaattaaactcaagaactgaaagtaaataagattactataaaaataaattttatttctgtagaaattacacaacatataatggttttggtgatggggcttcttgatcggtttttttctttttttaaattt

SEQ ID NO: 188550 - DNA, 1614 bp, Cannabis indica
gtcagaagttagaagcatttcctatgcacaactgaaggtccagtttcatcatagtctgccttggttacatgctggttctgcgggaacacaactttcgcaagaatggctcctcctacccatgctgaatacattgtcaaattctcgggcatgtattctggaggctgtcaagtcgcgagcaaacatgacaatccacacaattttagaatattaatacagataacaatcatagcattataaatggcagaactaaaaaacgtaagcattgcattctgataaccactagaaaaatcaatatgaacaggtacagaagcaaagacaaaaacaaactcagccaaaacatgccattatctcaaaaaaaaacataaaatgaaaatgatttaaaataaatatcacttttaagccaatcagcaacacataatttactcctatcacagaataattcaatgagcattgtttatcttgacaaatcctgcaatttcttcccaaccaaactacaagaataattactgcacaatttccaaattatctttttataaccccaaaaatgaagaaagaagttaaatcttctcaaagaaactgcacaagtgaaaaaaaaaaaaaaaacgtgtaagaatgcaaattgcaaatcaaacatagattttgtagatcaaccaaacacaccatgaaacccaaaccatcaatccaataccatttgatataagaacaacagaaaaccacacttatttcgtgtaggaactttactgtcaatccatgcttcgtatggaatctaaagcaaaatgcattttcatgataaaaacaaagtaccttgactagagcagggcgaacagcagatgagcacagaccagcttctttctgaaacctttcttcaaaacctgcataattttctgtgagttcaggttgtaaagttgatgttttgatataacaagagagctaaatatgaagccaaggcaacattattgtcctctcaatagtctcaacaagaagatatttgctaacgttatgttccacaaaaccacccaaaacccattagtcgatataacacaataaattgcctacactacttacttatccattattaagtacttattacaataatatgtgatgctatgccaaaacttgagctaacttatgcatcaaaaacttaactttttaaatcactgatgatccatatctattatttaatcactcccttaacaaaaccaaacagcactggagataaatacatagccaggataaaacaaacaataattcctaattgatagttccctttgtttttataaaacaacaagcatcaatggcaatgctcagcatagaatagaatatccttgagttgcgacatggtaagtaactaacaagctaacatcaacaaatgtaagcttaccaggcattgaggttgtaccgccacaaagtacagtgttctccaatagctgacgatgattatcggatgatacagttgaaatagtacgaacaagctgctcaacaattccatgtgcctctagacctaatatagatggttggaataaagcctcaccaacagtatatctttctcttccaattgtaataacctgaaattattaatttgagtatattatacatttatactagattcttaaa

SEQ ID NO: 188551 - DNA, 1664 bp, Cannabis indica
tgccaattcgttttgagatagaattttatgattctcaacatggtagtgaccatgtctaccctgttgtggacattgtcccacataatagaataaatggtagacaattgaaccatatataagaatatggactattctactcattgccaattagttttgaaatgtaacccatgattctcaagacctcctcaacataatatttagttaggtaacttaacatctctattctaaatgtgcatacctggtaaattgggcaaatcctttcatagttatgaacatgtccaaagaaggcaatgtccactctgtatttctgccaaagcttttggagatcatcctttccttcgggttccgaaaatgtgccttctccaccataccaagagttagaggaatatccaagtacacgatgagccgcaaagatcaaccaaggctgtttgcgtctatctgctgatgcaaggcatttctcaatccactcatactgttctgagcctttcctccagtcatgttcagtgtcagctatgcaaaacttgaacatcccataatccgccgagtacctaaaaaacaaaacaacacaacacaaacaaatctactttgttcaaactagcatatacataacaatctcagtcttagattgactaagcatgtccttagattaaataatgaattttattggatgggaaattacccctccaccttttgttgaaaagacttaccaaaacttagctctattttcagctggaacatagtacattgtctcagctacaacaccacattccccacctgaatccaaaggtgtgaagaaagaacccgaatcgggccaatctcgttcatgattaccactgcaaagaaccaaaccaaaaagattcaacaaccaaatcaatatgcatttttggttgtaataattacaataaataaaccaaaccaaccttgcaaccatataaggcttagttgatgcaataggctcaacttgttcagtaaattggtcccattcagcaaggtatccatctgcataggccatatctccaatgtggaaaactatgtcatagtttttcatgtctctgacaagttgatcagtggtgttaagtgaaccaggctcaattgagtactcattagaaccatcacgctctgcctgaaaacacattatgaaaaagaaaaaaacacacctcagcataagacattgacattatcaatatggctcaaaatctctatttactacctttcccatgtcaccaaatacaataattctctgtaaagagtcttgtccaggatatggagagcctttaaatgaaaaggtcttcttgctccatacatatgttccattaaataaacgatgacccaatctatatgtgtacctgcattggtataaaactactgttaatatattgctatggaaaaagcttaaaattctgttgagaaaagcttactcagaatttggccacaagtctttgaggaaacttgtgtgagtaaaaccaggatcacgccacccaacagttcttgcaggttcacctaaaatataatcataatcacataatcataatcataatcaaagaactcaaaagctgatattagtatatatattacttaccacacatgctgctcctatcatatgtcaaagtcccagctggggatctcactttggattctcccttaagaccccactcaacaaatgg

SEQ ID NO: 188552 - DNA, 3741 bp, Cannabis indica
agaaatgatatgttttccaaattatgtgtcatgcatttgaaaagttttagagctcaaaagcactaccataaaaactgcatatcacctaccatagcagccttttaattgatttgttttttttttttgataaagaaatatatctgtattgtaatttagggagtgatggtaccacagaatcctcactggattagttctaatcgtaatttatacaatacaattcaatctattaaactattatacaatacaaccaatgtattaaactattatacaatgcaaccaatgtaataaactattatacaatacaactaatgtattaaactaatgtacaaagctcattcaagatgggcacttctattaaaaaaaagattagtccaaaactccctagtacatataaagattttggttatatagtctactaatcactgactgcacagcataacaaggggaaccaaccatctcagtcagccacaaaacaaatcacaatattagtcgcaggtaaacctttcaatagttccccccttatttgaaccttgtcctcaaggttgaagaaaggaaatgcagctatggaacatgaaaaatggaatgaatctgagctgtctcaggtaattccacctcgtagataacctctccaacttggcttaacaactttttctcacccaagctcaaacttcacagtgaaattttgcaaattaaattaaacattccctaaaatctcaaatcattgaatcgatatttctactttccaatgccaaaggtaagaaatcctcttgaattagagctacacctttacaagtaccctattcctcaccaataactcatttcccatgaatgcttcatattctcttctcacatcgcctgtcacaacttcttaaccaattctaaagaaataaagttgtgagtagcttctactatctacagacagtaatactagttgatcatgcaccttaattcccgctaattcattagctgccttcatcacttcacaatcctccactaaagctgtgtactaccagtcttactcattgtcattggtgatgataacatccgattgtttaatctggcttctatgatctgttggaatattttcatctcaccagaaacaatttttttttctctatttcaaaaaaagattaataccggtttctggttaatatcttgtatccattctttttgggttgcacttgtacctaacttgctcacccagtattggtcacctcctataatgggagcaacttcacattttatttggtggaacattcaaagacttagtatctttataggaaccatgattcaaaatcgtagaagtcatagaaaagaaagcttctttatacttagtctcaatctcattttttccccttcaatcttatgagcaacttccatgattttaagcaacctcactggttcaaacaatgttaattcttcccttaattattctttcaacttattcacacattcaagaattttatctgaaatattattcaagagtgctgccgtgcagcatgtgtggcatactttaaattgatgtctatattccacagatttttgttaattaacagccttgcaagaaatttccatcctttgatgcccaaaaattttgttacatcaaaacatatacttccgggcaacttctaatgaaactcctatgatttggcgtttggttggaacttgggaggaatgaaaacataggaatgagaattgtaagaggaatggaatggactaaaatttaaatgcataaaaattgataaaaaattattaaattttttcaaatctagcattgtaatggtctttccttccatttcaaaatggaatagtcattccaccaaaatgatggaaagactattccatcggaatggtattccaataattttaaatgcaactaaacaaaagaatggaatgaaaattgtttccattccattacttctaaccaaatgccacctaagtgtaaccagcggaatctgaaaaagcatcaccttcaaaggagaccacatcaacttccaatatctcaactgcattgatttgatttagtgtaatgtgtattttcatccctaaaagtccaagaatttaggtttgttcctattctcacactcaaccagccagagtcactcatgtgttgcgcctttgtctcccacctagagtcggtcatgtgttgtgcctccatctcccaccattgtgttgcatgacaaagtatctgccattgcctgtttggccttacaaatgttttgctgcatttcttccttgaactgattccgatgattttttccagatccggtaacttcaaaccaaaagaaatgtatttatattaatcagttctaatctctaaacaatcatactactcggtaacaattgttctgtctaggtattcagtctccttttagtccaaaactcactaacatgagtaactgtttttgttatatatactgattgctttctataactgcattgcaacacaaaccaatcgtctcagccgcaaaacaactaattgaactagttctccattttaagtcacacatgtgtgaacctttcagatgccagcacatgcataattgtattcttgttacatcgataataactcatcacacacacaaaggaaatttgattgttctatctatttgtaggtattgatcatactgtttgttaacttaaccacaggaaatgtgggaacttagcatcctgttaaaatttctgatagactgtttgttaactgaaccacaggaaacgtgggagctgaacatgctgtttttgagcaaggtgcttctgctggaaacgtgggaaatgaaaaattactggagcaaaagaaggcaaatccagtggctttgctactgtcatcagccatgatgctgcggcatcttcagttcccttcatttgcagatcgtctcgagacagctgtgaaacgtgtgatctcagatggcaaatacagaacgaaagatcttggtggagacagtagtacccaagaggtggttgatgctgttattgccaatctagactgatggattgggtaaatgttcaatatttatcttggtcatgtattcattaacagcttcctgacatggttttctctgcctatattgttaccttatcttctgcattgtcagaaagcatgatttttcctcccatttcctttttatttttggaaataatccgagttaatcttatagtcggtgttgcaataagcattccacaagagattttttttttctcctttctatacaattcaaagtccttttgattcgattttgctcaactcatgtgaattgttgttttattgagcaacaatacaaaaaggaaaagtttctcagacattaattcttggggatgggaagtttgttgtttcatttatcattgttcatataatgttttaatgaaaataatttatgagatattactctccactgctgactgattatttatcaagacatatgattatgtacacaatatatacttactctgccttctttaaatgtggtaagcttttgcagctatgttatacctcttgtttgattatgttattgttcagttcaggacatcaaaatttcctaagtttttattaatattaatatagtttcccaataatattaattttttatgtgatctttaaggtaatgcttgtttgctgggagtgaatattggaatatgttatagaaaagaataatcagtatttttgttcttaacttttgacactacttgattttgttttttaaaatttatggcttgttaatagttttttttaaaatataatagtta

SEQ ID NO: 188553 - DNA, 5031 bp, Cannabis indica
atagtaaaattgaataaaattagataaaaatacttaaatccaacaatctcaatagttcagggaacatttttaacgaccttaaaagttcagagaacatgatttagtacatatcaaaatttagtggacaaaaatcttaattaacctattgttaaatataaatatttatatatattagatatatctttttagggttaaatatatattagataattgtaaatcattatctaatatatattaatttcacaattctagaggataagagtatcaataaaaaaatatacaaattaatttcccccgttttgaaaaaaaaaatgtagtttctacataaaccaatttgggaaaatatagatctgaatattatctttatactgtttcaaacaagaaagggtaaacaaattaagcaatttttaacttttttcgttttttttaagtctaacaaaaagaaagctggtaaaggaggaaaaatccaagctgaatcacgactccccccatggaaaaatgtacaaacgggaactacaacttttaactgctaatttctctatcaaatttggttctctttgcattctgcacctctgacatggaactaccacgctgctggtatgatacatcatgctgatacgcacaattggctccatgccggcagcccccttgagctattaaaatatatgcaaggtttcattattttcggctttgactctctcggcttagggctgttaactatttcctggctcatcgctgattggtgattataacggttaccatattgtggagggttcagattctcttgcctgtctcctccgtgttgctgaatcaagctcttgtagtaatttatgtctttcgcagaagcatttacctgtgacggtggacagggagctggaaccggcggagggggtggaaaccgtgaatgtgaatttgttaggtgtcccatggcagccccaatgggataatgagctccacttgatgtagcagctgatacaggtatgctcgacagtgtccgattaacctgagaaggaagtggttctgatatgtttattggaggtgaccttgtaatgggcgtgttctgtgagacggggttgggggttccgaattctgtgactaattgctcaaccatcatcgggttactaagaatctttagaagcaattcatggtctatcaagttcccctgctcgttgttcactagtccagtcaaagcagcagccaaaatacctggttctgtgctgggaaccaatcctgccgctagcttctccatgtcaggaggatgtgccatgttcggtgcaccatgttgcgatgatgatggagctccaattgactgttgcatagactgtgtcttcatgggaaaactaaatggcatcatgggtttggatgatgaatcggctacatcttcatcttcaatagccgtaataggtattgacggagttcgcacatcatcataaggagaatcatctatgtttaacatgtccgaggagctagagattacaaaagaaaacagaaatcattcagtaaggcaggtaatcatcaaacacacacgaatcagtaattgtagtaagccaggtaacaaactttggcggaatggcagatgggcgtggataaactgcttctagtactctcatttccctttgattttggatactagcttcttgactttcttccccagcaaccacgcaccaagccaagtttaatacaaactgtgaaattcagacaacattaaggaacctgtgttaattgttaagtacttcaaaataacatttgcttatcatcaaccatacattgaaaatgcgaggcaagatgttatactgacatgtaacaccaaaatatgattttacctttggaggacatctccattcaacaataggaatttgagacaatttggtttgtaacaaatttgcggagtgagctccttcaaagcctggaggtagaacatcgtcagagctggctccagttgaatgtgataggaatgccttagcttgaaggtggtcttgagaatctactccaacttgtgaaggagattcttcgcataaaaacagcttaacctgtaaacagagcattagtgacattgaccctagagcacaagcaacaaaatctctaggcttaataacacaagttaataaaatttaggaaactattgaatggaaaacacaaacaaatccgtagagaaacatcaaccttctgtagtgaaggttatattaatcttgaaaacatgcaccagtgtacggagacttagttaattttaagtacgtttctaattattagagaaggtcttcgaaatacaagtttgtttcccaaatatagttgctttcctgtattgtgatgattttactattcatgctaacctgcctatttacaaaaaagctaagcttaaatatgttaataatcagaatattcatattcctccctctaaaattgtttatttctctctttagtatgtccaaattcttgtctttttataaattcttccctgtcttcttctctttacccttggttagttggttctacatatcaagagaactttgatgaaataagaatccacaaaaatttccaagaaacaaaacatgtacagagtattcaatatactttatttgtaaggaaattaaaacaaacaaaaacaaaacaaataccacattacattctaattctattcccagatatccaaaaagtatctctcgaattcaactgaaaaatgaaagctcactagtgtttctaagagggaaaaatttccattcaccttttcaaatccacaagtatatgaaaaacgaattcatgtagcagtgtttgcacttcttgttaaaaagagagtggacccttcaacttgaaggcagaaaaactctcaaccaagtttttaaagaacaaatgcgaaacatttttacttttattaaaaataaatggatttttaaataaatggatttttattttgaagttctagggacagaagttatcagtggtaatcaatttccctggcagataataagtagaaatatagttaccaaaagttttgagctaaaagcatgcacatgaccatggaaagaacaaaattatcatctaaatcaagaacaaaagggctataatcactttacatatctctaatgcattcatcaagtaaatatcacctttcttaaaatacatatggaacctctacattcccctttcttactattattcttagcatcatcttctatatatctatacaatgaaaaaactccctacaattatctttctcattagctaatatattgccaagcatgtgcgtaccacaagaaaaaagaagcaaatttagttgtccctcgagcaccaacaacatgaattgttatgttatttcctctttaaggccgatcgacggtcatccatcccccgttcatgtaacagcttagaaatattaaaatatatttcactgcttactttctaatgatactttcatgtgttagatcatatgaataatgacttcacagttttttatttgtgaatgctgtggagaaagagatctcattttgacaatgcaaagcactgctgaaagtgtcagttgtcttctcatatcatttacacacaattttccccaatattggtggcatttgccgtacaacatatgtccgttattccagtggtaaaactgcttcctctataaatttcatgaaaacaactgaaaaagaaaaccagttacaccaaccacatgaaactaaccacagactctctaagggaatgaatactaagacaaggtggtgtaagtaagcagaatctgaataacattggtctactttctgaggttccaaaatttattcattgcttaccaatttacacaaaaatatttgaacttcttcaaacaatggagtaacttatcaatgctgttttttttgttacttgaatggttaggcaaaatgaatgaaaaggtaaaacaaaaaattgaaataaatagatcgcatgatataccccgattaccaataaaatgaaataaaactaacgagcattcttttatttgatattatcacaaaatgaagtgaaaatatataatacttaaaaatcaaactaatcaatagatgcacggaaccaacaatagagtgaaaacacaaactaaaagaaatatggttcatagttcaaacaaatgaggtaatgaatcactgatctttagagagtatgtaaatatttatacaattaaccagcatgcatcataccagaaagaaatgaggaagaaaaaaagttcagggttgatttttatttaattttcatcatttctacagatatcgaatatctccacttggcttagatatcaataactttgttgatttctttgttgattattattggcaatgtaaattattattgattaatacctgacaaaggtttacatctgaagcccaagagacccttttcgatttgtgcgattctcgcatttttaaagaaccagtaaaatcctctcaacaatacttgtcttccagctccgatttcctggtattagttttaggtgtccgataaataatgtaataaaccctaaaaactcagattgaaaaccctaatgtttacagcgtcctaaaatccacctcgaagtaccgccatacaatctcaccctaattagaggaagttcaagcgatctaatcgcaattgcaaggaggaggggaccaacgccaatcgaaatccataggccagagggagcaacagagccatcaaaatgaaaccctaaatcctctggtttagtctttagcagttcgtatatatcccctttttttctttcttttttttttttaatttataatctaacagttggacttctcgggtgtccgatttcgtatctgtttaacaattttaactgagtgagcgcgtggagttagagtagttaacgcgcctttttaaagctataaaatatattttattttatttttagaaaaaaaaatagaggagttttattttatattatacatttttctgattaaattaattttgtcacaaggagctgtgctttgagcaatggccacaggattcggtgtccacaattaatcgtatatgtctggcagccactttacccacgtgtacggacactttttttat

SEQ ID NO: 188554 - DNA, 2327 bp, Cannabis indica
  modified_base (16)..(16): a, c, t, g, unknown or other
ctcaaacaaaaaaaanaaaaaaaaaaataacaaaaatacaaaagaaaattgagaccccatttagttagagttttcaatcaatttcaggtccaaactgttggagtccactctcatgttcccaattgtaatgacatgtcatgcatgctgtgttttgtgtagttctatctgggccatgcatgtgttgatatttagtatcaatctaatctgtccccttcatgttcttttataacctcttcatcactcttcactctttatattattttatttattcattaattattcaatacagcactttaatgatcagcatgtataaacacatctatattaattacataaatatatataaatttatgttcctatcatatcaattctgttttgataattcaatgccagtcatgaacaaggtatatgttcttttatgttttccttttattatatataataaagaacgaatgagtgaaaaaatagggtttgtgaaattatttttttacttgtgtagtaataattctgaaagattctttgtatcaatagtaaactttagtgttggttaaaagaaatagtaaattttagtgcatgcatgttccgatagtaaattttagtgtttgttcaaaaataaataaataaatagtaaattttagtgcatgcatggtccaatttctttgactcgttgtaaaattctatatgaggttttttttttttttttcaaacatgtgtaatttttccataaaaaagtgcattggggtcttgagccattttgaacatgtatgcaattttgagcaccatagggttcccttagcaattaaatattaaaaatgaaaggtataatattacttctcctcttataatactagcctaagtgatccccctcatggagtatggagtgtttgatgtaagaatttcactagctagttgaaattaaggggttaagattaagggaatctcaaatttaattgagcgtttcagaagtttaaattaataatttcattaattgaaatattatggtgaagaatatgattgtgaaaaactataattgtgtttggtataaattatattgttaattgaattatattatatacaagaaatgttacttttacgaactgtgctggtaaaattaacttttaccagtgtattttgcaatctgcgttggtaaaaaggtcaaagttttaccagcgtatatttacagtggctaaaatcttaccaacgcatttttgtcggtacttttcattttgtgctggcaaaagctataataccaacgttgatttgccaacacatcataagtaaattctattttatcagcgcaataccaaacttttgccagcacaaaaatgtgttggcaaaagtaacatttattgtagtatttagttaaacataagaaataaattattgtgaaaagttatataaaatcattaatatattaaatccaacttattatataagattgaaagtaatgtttggaactaacttttttatttttaattagcatgtaaacaaaatctcatattatgagaatgtgaaagattaagttattacgattcccttcataagatttagtacttattccaaagagcacctatattaatgtttgagaataataacccaaaaataaacataaaaatggggtcacctaattaatatatatgagaaatattaaaaggcacaacaccattaatatgtcatatcaatattgttgtaattaagtatcatgtcttatgtaatttaatacaatgacttttatggagttgctaatcaatcgcaacaccagctctaagtggtgctaggtaccactaggagaaatgctaaaagataccactattatctagtaccctcatcggtgtcataccgttattagtgtaattaagtattgaatctgatgtagcttaaaaaaagagtttttgaaaaatataactaattaatgataaaacgtcatctataaaaagtattagacatgagcacccgtactgtacccaataataatgctcttaccaactagtgcatgtataatagcaatgctcttatcatattcactaaaattataccaaaaataagtttgttttacattcccattccaagaacctaaacctcataccaaacactccaatatcaaactcttatttttctttgtatttaattttttatataattaaaattaaaaggaaacttttttttttgaaaccaaattaaaaggcaattttaacatttaaatatccattttaataaaatagtatcataaattattctcttaattaatagtggtagcttcattagttagtttagaaacattttgatgataacatttcttagttatgttcatttttttattaatatat

SEQ ID NO: 188555 - DNA, 1631 bp, Cannabis indica
tggattggattcaaatttctatttgattggtacacaaaattagatttgagtatatttagtacatatgacatttacttatgatagtgattgttacttgtgtgtatcattgctattgacatttacataatgatttatggattatttctctttctcgtataattacttgtattatagtgtcactcttagcacaaacttaagattaatgctcattggagtcaaatggttggatatccatgaaagagtaaaaggtatgatccgctcagtctttgaagcagctgcatcagtacacccagagatgcatagtccaaattcaagggccatttatggcgtggatgtcatgcttgacaattcttaccgacccaagttattggaggttacatactgtctcgactgtacaagagcatgcaactatgatacagaggctatagtaggagggggaggagtaattagaggtcgtgacattttcaacatcgtcttcggttgtcttttcttgaacgaaaccgttcacgttagtccaatttagttgagccataagaaaacctgttcgtatgtaatgattggtgtgcaagtctgttggatattgtggaatgattttttattgaggggtggggaggttggggccaaatgatctggttatactggaaggcgtgaacgacaaatttttggtcaatttaaaaaaagaaaaggaaaatgcccattgggatttgttgaggcttttaagtctttagggtcttaataaattggagagttggattctaaagtcttttcaattcataacttttctttgggcacaggtgaacaatgtgggaacaaacatgagaaagcctactattgagtacacatctgaggagtattcatttgtccttggtactaaccttgactccgtgtaccacctttgtcaactttctcatcctcttttgaaagcatctggagtaggaaatgttgtgttcatttcgtctgttgctggtttggttgatataggtagtggaaccgtatatgcggcaagcaaaggtgagtagttgttctgatatgatgctattttttcttttgcattaccatttgaaaataatctcatcagctgctcatctcatggcatttaccttcttagatattttcagctgcatttaactagctttatctttctcaatattttcagcggcattaaatcagctaactaaaaatctagcttgtgaatgggctaaagacaacattagaaccaactgtgttgcaccttggtacaccaaaacctcgcttgtagaggatgtaagatgttttctctttactttaatcatctaaatgctttctggggctgttttgaaattcgattgtaagctgggagattctgtattttacctctttatttgttttctgaacgttatccaattggtgtttacttttttcctccattacagttgcttaaaaacaaggaattcttggaagaggtaaccgatcgaactcctctacaccgtgttgcagaacctgaggaggtctcctcactggtagcattcctctgcttacctgcagcttcatacatcactggacaggttatatctgttgatggagggttcactgcaaatggatttacacccaaaaaaagacctttttaaccaagaattattcatgataacatt

SEQ ID NO: 188556 - DNA, 2185 bp, Cannabis indica
gtatttcaggttactttcgaatatatatatatattaacaaaaaaaaaagagattgagtctgatatgttatggaatgaagatatgggctagtctctgtctctattcagatgggtacaattcagaatgtattctttactgatcctaagggaaaaaagaaaggaaaaaaattaattcttctacttcttaccatttgggttctttcttcattctcttctttttcatgagttgatattattctccgcaattcttaattctcgtttctctacaatcaatcaacagtgtatagatcaattcaaacacttatttcagtgaattagtagtgcaactttttggctttgttcttttggaatgtaacgctagctagcaatgttgtatagtgtaaatgtaatgttattgttcacaattttcatctctctctctctctctatcataataaaaaagttggaagtttggagctgtacggtttttttttttttgtctgctatgtggtaaaatgtaatagaaaacaactggtgggggaaagaactgctttattttaatatcctcaacattgttgcatttattatatacaagagctatcacagacttggagttggttctggttctattgagccggtggattgggagaccactgaactatatggtaatggaattgtcgagttctggtcctgaaattgcttaaaataaacactagagtttttgtgcttttgctccaacattccaagcaacttggctcctaattctacttggggtttggggttcaaggctctatcttatatctataactataaccacgctttttttgtaggttcctctgttttcccatttcataaagtctatatggtaaaataaagtttcaattttttttagtaaagcataaaaagaaaagtgtcttttttttagacaaattaattacgttagtttgataattagttagcatgttacatagttgctcacataattgtaatctgtgggttgattggttgtatctactcttggcttctagcctagccctccttttaattattcacttaatttaatatgcatattatgtttaacgtggacctagtcttctagcttgggatctttgaagttctcaagagttaactttgttttaatgtaatcttacttttaagattactgacctttaaattactaataaattttgttatctttgaatattttgcatgtaactgtgtgcgtaagtaaccctcccatgtatgcatgctcagttatcaaaactaaaaataatcaattcttttttattttattttattttttgaaaaaataccctcctatttgcaaatttaaaatgtcttaaacgtattgagttttgcaaataaagttgaaattctaggcctgcatatttccataactgactagatagacagcatctccaaaaattgtgctgctttataattattccttctttttttcactttgttgtgaaaaatattttactaccatgtatgctttttcctacaccaaaaaaaaaaaaaacaatgaaggtgaaagcaaatgtcgagaaagaagaagagaaaaaaaaaactgttccaaacaaatgggataacagtaaagaaaaaaattaaagcaataagcacagttaaattagacaaagattcgaaacattcatgattggttttttgtcttatagatgaacaattaggaaaattagtcattcaactctacaaaacatacacattatctgtgtctaatcaagaaaaacttgagttgaattgagctgagctgatcacatccatccataatagagatatttgaaaactcaacaccgaaagtaaaagaaaaaaaaataaatttatatatggtcaaatatgctctcattgggcttcattaatgggtcctccgagaatggcatgcatttcatcatggggttgggcccccgttactgcccttactgctccccaccctaactcacttatttcttttatttttatttcaaataattttgcagactactaatttattaaacttttttcttcgtgaaatttgaaatttgatgttgattataactgctatactctctctctctctctcttctacaatttgctgaagtcacaaggaatgtgtttctttgcttttttttttctttctttggggtgtgcagtgtgctaggctggtgacttggcccgcaccacgcattagagacggtctacacaagttacgt

SEQ ID NO: 188557 - DNA, 4527 bp, Cannabis indica
gtgcggtcacagagggaaactattgctcgagagacaggtgaagggttgtcacgaggaggtgaccttttggttgtcccatcgagggtttcgaaaaatgacggctgtaattattactttttattgcatttatggtgccacgtcacaaaaactcctcggttttcgtgtaggcgtggccatcgttggccgttggattgggcgaccttaggcattctggctgccacgtgtcgtgatcccaattaatgagggatatgggtatttaaaccctttgatacgaatcaaatcctccatttttccctcttgtttcttaacttccttcttccctcccttacagagacttcaaaaccgttttcatcttttgcccagatttctaccgttcttttctaaaatatcctcaatctcagaagtgatcgagagcaatcgcaggaacaacttgccaaaactaaaggttagtttcgagttctattgtattttttgtttaattataataggttttacaatttatcattatacacatgacaccactaagtttaggaaggaaaaccaccaaccacactcggcatcaaagtcgaacttgttgagttattatagagtttaatagtatccaaagttcaacatacataaaaagatctcataacatagatttttgcttacgtcatattgattggcttcaaagagagcaaaaaaagggccaaagacaccaaggtatcttagtatcttaacatgtttactctaatatcagcttggactgacaaaacatgcagaactgactactggggtaattataaaagcactagtggaagagggtatcacggcctaacgattcatttccatattctaataataaaaaacaaaaacgatcgagtaaaggctcacaaacagaaactcccactagattaagatatcacatgcaagtcaagtcaggttggagcattgacaaacaaacgatcaaaccgagtctcctctatacaaatcatgttagatataacacaaaactagcagtatttcgaactagtctctttaactcgcaaaagcctagcctgattgatcaccactgaatccaatgaactttatcatttgtgatccgtggtatcaaagttgtaacagaggtagggccattacaaggccaaagatagaaacaagcaacaccatcatccaagttggtattgaagtctttttttctatcctcctattgtttggaacaacttctcttctcacatctccctttgaatcatccttttttagcaagggctttgaattttcttgcgcagatgcttcagtagaagcttgctctgcaataagccgctgctggtggtggttaaacttctccacatactccggaaatattttccggaatgttgctctgtttagtagaaaaagttgtcagcccaaataaacttcaaaaacaacacaaggagatccatgaaaatcccatatgacaagtttctgtgtatccaggatacttactgtgcacaattgaaagcaagggaagcttccgccaaacggcgtttttctgcagtagtggtgttcacactgccagtagtaggactagtgtccatctgcagagtaatagaatcacgatataaattcaccatacttatgaaaaatataagtacttatttagttacatattcatgaagagtgtaatctatacgaatctgaaaactacattttcacaagcaaataagaaaaaagtactcagtgacccacaattgactcaccatgaatgaaagaagtccttgaagtatgctgcatttattaaggataacagaagtaagtgcattagattctccacagttgtttccaagcatcttgtgagcagtttagaaaattaaatagcataaaacaacagcctctgaaactggctcttatcttacctcgatacagaccacataggattccaactttccggatgaacttcagtagaaaagttcaaaacatcaatcagaaaacaacgatcatatatacaaaaaagaaatatgttcagagctgcaacagaaaacttacaatcactcatagataagcataatttcctctgtgtcatgaatcttccattaggagtaaccatgctgcagcattaggtaaacatatataaaagtcaaaaccaccaaattgtaacttttttacaaaatatgtttaggcagtcatgaagaggttaggaatatagaaagcaaattaattacgtgattcctggcggtttatatgggtactctggaggaaatttgatcttcccatagtaatatccacctaatgaagacaagaaaataaacaagatgaagataattagtaatttcgtaaggcataaaatcatcctgacagtgaaaaaaaaaactttttcatggggactaacctgcaaaaggtgttccttcacttccctccaacacataatctgaattgtggaagaaacaaaaacaatggataaagtgctaatgaatcaataaaacataacttaccttaagcattaaatgtcccaaactaacaaacataaaagtgaaagacacaaattcacgtgtcaataagaattaagccacagggaaatatataataaagtcaatattactactgcaaatcacatatttcacagcattgatcaatgataaatttgctcatatgcattggttgtaatcattttaagtctgtatgaagcaacattgttgatcaaccaactacatttctctaagatgcagtccctgagcaatcaaagaaatcagcaacagccaccttcaaactgctgccaaatcggtcagctcccatttatgttattcaggtagctgctaacattatctttaatcatcaataatttgagcaatcccatttaataattgcattaattcctcaaatattcttgtgatgtcgacaacttgacaatatatataataggaaacataaatgaatgtttggactgatttcttattgcacaaaaacattggttaagcagaaatgtgacaagaaagattaagcacttcaacaaatgaaaaaataagcaaaacaggtttcactaaagtttgaaacatatcagattgttataaacttacgccattcgagaatgtcatttggggaagggcgagcaacaacatgggaaactggttcctattaaattacaagcaactgaataagcttccaatggaggggtgaaaaaaaaaacttctgtatgaaaattcccttgaccattagtcaaaagcacaaattcaaagaaataagtaaagtcttccatttcataatctgtaaaatgtagtaggcagatatttttttttaaaaaaaaaagaaagaaagcaagcagatgaatggagaagtaatctttcgagctaaaatagaactttgggtactgggtagttaaaagatgacaacacaacataagcagcaaattcagaatggaacaacatcatgaaaacaaatgtagttagtatgagaatgccggaataataaaacaacctaattaaaggaatatagcagattgaaaattaacatcggtcagattcatactttgcagagtgctctgtattctttctgaagtcgcttgacacatgatttatctgccatctcttagattaagctgactacagtccttgccaattgaactcccaattactgctaaattattagctgctttgctcttctgactaacatttaaaagtaaagagattataagagtgagatgactatatctatgaatggaaactaacaccaaatcaaaaggtataaaaaatttaacagaaaattaacccaattctcaaccaatcaaatagccattccaattgtgttatcatacatttttcaaatagtaacacctcaacaacaaaattacaatctatgaaaactgaagggctaagacaaattagggttttatgcttttctggtgaaacccagtcatgccaatctgaacttctgaacccatcagaatatatatatatatacacatataaatagatgtaacctattattaagacagacccttttcaattagatggaggatcatcgtaatgaattccaattgaaatacaaaacctaaatttaaaatcaatcctagctctcagagtctaatccgatcatcatctttcgaacgacatacacgttaatcacagtccaacactgatgcttgaattgaataagtaattgaaaaaattgatagcaataataattaacaaatgcatatttatatagtaaatcaatctatttacctccaacaatcaaaaaacaatgaaactcacagaaaaacacccaccgcatcataaatcaatatacttatgtaactctgccgagctatcaaagccagcagaaaataatggaaaagcaaaatcggtatcgtgaagaaaaagaaacacagcaatttaaaaacaaaaaaaataaaaacaaaaggaagaaattcaaagggagagaaaacgaacctgttgtgtggaatcagtgagattctacttgtttggaattgaatttttggttagaaaaatcaaacaaatagcgttgttcgcacataaatggtatgtattcagatgcgtaacgctgacatccatttattttatttctttgtttttt

SEQ ID NO: 188558 - DNA, 2764 bp, Cannabis indica
atcattgtatagtgtgctaatctgcatttctatatcgatatattttgtaggtagttttggtccaatgattgtttacatgagatgcctcatgaattgaaggtggtcttgttgttttgtttaaatttccgatataacttggttcaatataagtcgctttgtctgtagtgacttatattctatctttgaatatccttggctagacaattaacttgttgactagaagtttctctgcatcgacagttatcgtaatatgactcagattactctctcaaaaaaaaaaatactgatgattttgcaccgattaaccctttaaataattaaaagtgagagtatattgtaaataataaaatgttgaacagttaaatgacatgacatatcaactcagtgtgtatcatcactaatatacatacacacattggagaactcacttatttacaaatattattttaagaatgcatcttttcaatataaaagaaagccacatgatttacgtgaaaaactttatttataaattagctaagagcaagattataaacaaaagctaattccgttaaactagataataatctttgcataattaattgtataatagcaactaattaaatacaatttttctgttttatcaaattaattaagactaaatataataactaaagggtgtaattattctagcataataatgctgcaaagagctagctggaacaaacggtattgctcctcggggaggaggcggcggcgatcgctttctatctgtattttgggttgagaaggtctccgccatggactgtggcggtggcggagatgaaaacatggctctcgtcctccggtgatcgtatgctcttattatcatctcaaacttttttttcatttgatcacttctaccaatattattattattattatcatctgttgatcaaacaaaattaaaagagtataattttattaaatcatatttatgaagtgaaagtatttaaaatgtgttatatattatttttgaaatagaatacaaaatttatatgatcaatatcaattcaattgttgattgaacagtagttaaaattctcacctggtaagagtcttgcatgatgagctggaaaaaattgaataagcagaagaagagcaaagagggtggaggtgggaatattcatcatgtttacaaaaaaggtgtgtagacattattgatggagtttgagctataattgatctcctttttatacctaaataataataataaattaacaatgtgtgtggtcataaaattaaagtaaatatatagagtgaaaagctcttatcttgaacaatatcataatcacaagtagtgaactagtggtagttgtagtggtagtagtactagtattcactaagtctccgctgacttgaaaaggtttacgatgtatagaatagtagacttctgtatttgtgtctccatcaagtttttcacatcatggtacatatatatatatatatgtatatagacttttatgtattcacatgtggtcatatagacttataaagtgttttgttggttgatttttcaaaatgatcatctgtgtacagcctggaaaatttaaggccggtgtatcgaaataaacataattcacaagcttagtatgatagaaaggaaattgtaaatttatctttatgtacattagatttaagattgatcactcgtggcagtaatttaatactatttttactttggcgatatatagggcgagtaatgagaatatttaaattttttttagagaaaattctgtatccattaataggacgaattaaattttggagccttaaaaaatatatataaaaaaattaaaaaagagtgttatgggattcgagacattgtataatatgtcatacacctcaactaattaagctatgactatttgttgtttacaatacacttaattttactttaataaaagcttaatgaattttttttattttggattcccgaaaagagtgggctctaggcacgggcctagcccgcctatgcctagatttaatataatactatgcaatacaatataatgtaatacgacataccaaataaacccaagtgttatttaagcgtttatatattacaatcatgttttacctgggactcgaacccaagacctccaagacacacacacccacctatggccacttgaactagctccaagtggttgtgatagagagaatatcgcaacactataatatttgtttttcttcctttaatattaggattatttaaccgttatgaattttgtgtccttcattaggtccatttttttggccagaaaacaaaaaggtaacggtgttcattcaacacactatgagcataccaagaaatcaacatttcacatttaatgctcatatcatcatccaagatccaatcatctatttaaagcattaattataatgaatatatctctaaagtagtaaagtttgtcattctctttgtgacctctcccaatatgtagaaagacaagaacaaccaataaagagaaataaatgtaatggagaattttatggatagttacatccttaccaagtaccacccttactatacccaatacacaatcatcaccatatatacgatacccatttaccctaacagttacaagtgggtttattgggctcatgcaacatgagctgattaaaaaataagctcaaatattataatgcccacatatcatttactaaaaccctacccttatataagcatactttctagccgcctccctcccaacatacacacactcctctctctctctctctc

SEQ ID NO: 188559 - DNA, 5179 bp, Cannabis indica
aaaaaaaaaaaaaaatactactaatctctaatctctagtctctttcacaaacaactcggtaacattttatgtaaatgtattaaaagcactcaaataaaataaaattcactctagtcttcttcactactctcccatttgcttttcacaattaaaataaaaactcaattgtatagctagttggattgcatttcatttttttaaaaaaaaaattgcatgtgggcaaaaaatttaatataagtatataattcaataatttatcataaacccgcaccaagttggtaatttttttagcctaaaaactctttatttgcctaccaatgattgtataatacaatattaagattcatgtttttttttcttctatggcatcacattccttcaccccaagacaaagagagagacaggccttaatataataagaaaactttgtgagaagtcaaaagtcataaaagccaactttattttttcatttttttttatcttataaaaattgccaaaacaattttttttataataaataaaacaataaaaacaaaatctttgagatgagaagggtatcctacagcacacgcaaatggtaatggagatagattattatcatgatattcatcatcaccattcaccactactacgaccaccaccaccatcgactaagaaagggtccaacagccactaccagccgcccacaaccaaagtaaacgctttttcagaattcattagtaatattaatatatcatttttccatcaacgtcacttccatttccatctatgtctatttttgtttctcttcttcttcttcagtcaatggagttttccttcattactatctcaaacaacaacaacaacaacaacaacaacaacaataactcactaccttagaccaaaacgaaagatgggttcttcttattctcttcttctgattcaattcatttctgatcatcgtcatgattaaacaccacatattattactctgtttcacctccttacacaacttcatgccatgttttcttcttcttcttatgataaaaagagcttctttttggggatggagggtggtttcagtttcagtctcggtcgtaaactcttcttcttactggttttgcttctctttgtgatgccaactttgatgggttcttttggcttaagttcttgcaacatagacgacacggaatctctattagctttttctttgaatttatcgtcaccttctggtgttctaaactggtcagagtccgttgattgctgttcttgggttggaatcggttgtgaggtcgtggctggtgaggaccgcgttacccgtctatggcttccttcttcaaaccttaaaggcatcatttttcctacccttaagaacctcacctaccttacccaactcaatctctcacgaaattcccttctgggttctcttccttctgatttcttttcctccctaaaccgtcttaaactcctcgacttgagttataatcgactccatgggcgactaccttcttctggttcaggtgccttcgaaacggtcgacttatcgagcaatctctttgaagggtcaatacccatttcggtgttcaagccttcggtgattacggccactcttacaagctttaatgtcagcaacaacagcttctctggttcaatccctgtctctgaattttgcactagtggcaatttggttccatctcttgagttcttagacttctcctctaatgagtttaatggtttcttccctcctggtattgggggttgttccaagcttaagatattccgggcagggtttaataatctgacgggtttgatcccagacgaaatctacaaagttgtcaccttggaacagatctcgttggctgtgaaccatttttctggaccaatcgccggtgtagttcaactgacaaacctcaggattctcgagctttattctaaccagctcaatggaacaattcctgaggatattgggaatctcgccagtttggataagctacttctccacataaatcacttcacaggctttattcccttatctttaatgaactgtactaatttgtccaccttaaacttaagggtcaactctttgattggcaatctctctgactttgatttctccaagttgcagaggctgaccattttggaccttggcaataacaatttcacaggggagttacctcgtaccctttactcatgtaagacattgaccgctgtgagacttgccggaaatcaactcagaggggaaatctctcctgagatacttgagctgaaatcactctctttcctttccatctctaataacagcctaacaaatatcactgtggcacttaagattctaaaggatatcaagactctcactactttggttctctcaaagaattttatgtctgaacttatgcctcaagatgatgaccttttagaacctgatgggtttcaaaatctacaagttcttgcttttggtggttgtttactctctggtcaagtacccaattggctttcaaggcttaagaagcttcaagttttggacttgtctgttaacgttctagctggtcctatacccggatggtttggtaagcttcccaacctgttttacttagacttgtcaactaatctcattactggagaattccccaaggagctttgtgggttgcaagctttgtcaggagagtctgaaccgattaacaggagttttctagagctgcctgtgtttgttatgcccaataatgtaactaatcagcagtataatcaactctccagtcttcctccagccctatatttgtgtcacaactatctcagtggctctatacctactgagattggccaactgaagtttcttcatgttttggaactcaacaacaacagtttcactgggaccataccagatcaaatgtctagcctcactaatttagagagattggatctctccaagaaccatctgagtggtgaaattccatcttcacttaaagttctgcatttcttgtcatatttcagtgttgcatcaaatgatcttcaaggtccagtcccatctggaggtcagtttgacacttttccgagctctagctttgatggaaatccggggttgtgtggtcttccatctgtgcaacgctcttgctcttcacaatcaccttcaactcttcatcatagtcgaaagacaaataagaagcttcttgttggagccattattgggagttgttttggtgcttctgttattataggtgtgctactctctctgtggattttatcgacaagaagaatacttcctcgaggtgacagtgacaagatagatttcgatacgatttctaacaattccaaccttgcggttactcctgaagttgacaaggatgcaagcatagtcatattgtttccaaacaataccaaagacatcaaggatcttagtttagctgaaatcttcaaggccactgacaacttcaatcaagccaacataataggttgtgggggtttcggtttggtctataaggctacactagcagatgggaccacactggctattaagaagctctcaggagatttgggtttgatggaaagggaattcaaagcagaggttgaagccctttcaacagctcaacatgagaacctggtttctcttcaaggttactgtgtacatgatggctgcaggttactgatatattcctatatggaaaatggaagtctggacttttggttgcatgaaaagcctgatggcccatctcagttagattggccaactaggctaaagattttacagggtgcaagctttggattggcttatatgcatcaaatatgcgaaccacatattgttcatcgagatatcaagtcgagcaacatcctgcttgatgggaagtttgaagcccatgtagcagattttggattgtctcggctgatccttccttaccagacacatgtttcaacagagcttgtaggcaccttgggttacattcctcctgagtacggtcaagcatgggtggccactttgagaggagacatgtacagttttggggttgttatgcttgagcttctaactgggaagaggcctgttgaggtgttcaagccaaggatgtcaagagaattggttggctgggttcagcagatgagaaaagagggaaagcaagaccaagtctttgaccctttactaagagagaaaggatttgatgatgagatgctgcaggtacttgatgtagcttgtatgtgtgtcaaccacaaccctttcaagagaccaaccattaaggatgttgttgactggctaaaaaatataggaacagaccgtcatcagcagcaaaatatggctcagtgaagggaaattgcttcaaccccatcctaagttcatatgtgtatacttgcacagaattatcttgtttttttttttgtaactagtgcagattgatcaatatacctgtatgtttttgttgattttattatactattttgaagcactctgatgaaactatgatcgagtgatttggtttataactcgggagtctacatcttcaaattttttgataaaaggggtatgactaggaagtcatcatcaattcataaaagagcacaatttccctcataacttgtgtacatctagattttcaacctttttatgctgctgccaaatatttgtatgcacaaaagaaatattctattttcttggcaaattccaagacagtaacgggtccctatataagttcacttttgaagataccaattttccttttttctttgttttaatatatacgaaactagaatccaatattacaaaagtacaaactagttttggttctagtctttacaatccgaataaacccaattctattctatttttcactaatctgtttttgtatttattttcttgtctgaattttgatgctaaaagctgtgtgttttgtattcttagtaaggataatgctgttgcttacaatgtggctgcttgggctgcgtcccataacattgtcaggtttctttgtggaggggaagtagcaccccttgttgctactcgtgactgatctgtttggcttttttttctggttttaatgaagtatttggtttcagcaaaaaaaaaaaaaaaagaagaataatgaagtagatcaccagtccttatatatagttaaatgggtataaatgctttttctctgatgtgtgccgtttctggtgttttattttttgctgaattaggtagtttgtcactgtgtgttatgtgttacctgatagaataaaa

SEQ ID NO: 188560 - DNA, 2344 bp, Cannabis indica
agttcgtaaagaaacgataggattgcagttcaaaagaataccgtcaattcattttctactctggcaatttctgagagaaggatggtttcctcgataaatggaagcttgtagatggcctggattccaagaaatacaaagtcatcaaattgttagcacaaacttaatctatagagttgccctatatgatactgaaatcaaactaatatctattttaatcaaacataaaaaaaaaaaatacatgatgattgtagaaatcagtctttttttatttttaaacataagtaatataagcatagttgaagaatttgatcatgacaaaatacaaaatttatcttatactcagatgtagataattcagaattgaacgtacttgccaagaaaaccgtttcccattcatatccagctcaacatctgcagaaaaactattcattttaatgacagaaaatttaacattaaatggaaaacataaagcatagtaaattttagtgacctgttggataaaaagccaacaaaggtgatgatgcatcagtcataagcttcctataagacaccggaagagcatgtgcactgtacatgaacaagagaataaatatcatatgactaatatatgagagcaaaaatgcataacgacgaatacaatcttaaaaaatgaatgaaaaagaaagagagaaaccttgcagcaggaagtacggccatcaactgatcaaatggtttaaagggtaccccaagtgtgaattgaatctttaactcatcaataccaacaaaatctgaagcacatggagcatagtgatagggatagtacctgtagttggacattaaagaagaaaacatgaaacgtgaatgttgtgttactaaaaagtatgaaactttgtgtgaaaaaagattttttgtttcaaggactaaacatcaaagcagatataatttccaaaagtttactcattactcgtgaccggatgactagccctttgtaagaaacacatgatacaagacttaaaaataaggaatgtgtagaaaagctcacataccattgccaggaacagactccttcgtaataataatgcatgacccagcaaatcccttccgtatatttcaacacctacataaaatgaaccagaaattaagaactggactcactacaaacaaatataacacagagcaaaagaatgtgttcacattataagggtttgtagatataaattgaatacggaatcataatatcaagacttcatagcagaaaatcattctaacacaaactacatctgatatgtcacatcaaaagtaggaatttatagccaacccatatacatttgtagctacagagcatagatttttgcagtatagccaaaccattaaacgaaaacaggaactatgccgagcatagattcataagctgccaatataggtggcacttagaaataaatagagcataacaaacttcacttaccaaatcgttccgaacattcagacgatcattttcagtttcaaccttgaacttttccaagtagtagttttccttccaatcattttccccaaaattaatctgtcaaagaaccaaaaattttaaactatgagcacaaaacagttcaaactagtatacaatatagtaccttgaagtgtgtcatgtatacacctttttaacttcagtagatgtgctaactgatgttgtattgtctggtgcttgcttcatcatagcacttgactggctcaaattagatttcatgacattaaaaaataacaataataaaataaaattgaccgtggaaatatgttactgttcaaactcaagctcacaacatactcacatttactgactttgaacccaaagatgtctctgtaacagttttattctgtgaataacgttgatcacggatagcccattcattttctacctgaaggataagcatatacaaataaaccaaataagacagcataaaagcatcgaacaacggatctactaagagatatctacaaatcagtaacataaaaacaaagattaacaaaagctctagtattgatgcagcaggatgttagtaacaaaagatcaatttgattttcttctaattaagaaaaatataagattagcgagcaagtaaaccagctgactacatattgaaaaacaaattactaaaagtagtttcgcattaaaaacaatatggaaaaacgcaatggtcctaaacgtgattgggttactccatttagaacaaattgtttaagatggaatccgatacacacttgtgcaccaattcagttcttgaaagaactatgaaaaggtagtttattaataagagcaagacaaatcaaaatcccaagtattcgagaaacttggtaaactccctgagtaata

SEQ ID NO: 188561 - DNA, 7296 bp, Cannabis indica
aaattcggacttgttcagttgtataatttgttagactttttgctctatttctattttatatataagttgatattgtactcctttttcagagaaatacaaattattctttcatctctttcttatttcgttctctatctttcttaagttttaacatggaatcagagcttcctcgttctccatagatggttcttcaaactcaggttctaactttaagacaactatgattacatttgcctataccctttcgatcaagcttaatgaacataatttcttgtcatggagacaccaagtcttagcttcgatagccgactttagaaatttctcaatccagatcgtgctccaccaaagtttaacacagctgaagatgatgttgaaaacagagtgagtgtagagtatgaagactgagagcagcaagacaaaattcttgtctcgtggttgctttcttcaatctcttataataccacaaatcgactaattggatgtgacaccacatgtcagatctagagctatctaactgagtattacactgcaaacaatcgagctaaaataggtcagtgtaaaactcagttgagaaatagtaaaatgactggaaatcttgatgattatttgccaaaaataaaagttctagttaaggttcttgctacgattggtcacaaactcaatgtgtactcactgcacaagaacacattaaggttatttttaatggtcttccatctgagtttgatgtatttttcactgctttgaatacaagaaaggatgtgtacactgtctctaaaattgaggcacttcttttggctcaagaagtgagagtgcacaaaggagaacaagaacttgatatgtctaaacctaaggttaatttttcccaaactagaggttttccttatattcgtaggacttcttttgttggaactacttctagaggaaattttgcttgaggatttgatttctttgggtctagtaaccattcattaacacacatcttgtctcttatagtcctagatatataggttatcctacagtctgtggtgggggtggtcctagatttaatcgtggacaatcctcgggagtgcaaaaaagtggtggtggtccctctttcagtcgtggtcctaattaacattgtattgggacagaaaacacaatgtcagttgtgtcataaacttgaacacacagctaagcaatgctttcataggtttgataagtcatttactagtcctaaatcatttcaacacttccctagcagcgctgctgtggctaaaatgctgttaggctatttttagcatagttttcaggtgttaattagagtcgtttttgagtcgtttgtgatgctttaggaaaacattatgcttattttttatgttttcaggtgtcctatagctgttaaagtttggggcttcaaaagtttgataagagaccaaggcgagtgaagagaaattgaaaaagcagcattcaacgcattcttcactgcgacggatttattcatggtcgtggccaagatttggcagaatggaagatttttaattggcccagtcgcacggcgaggccaatgctagccacggctaaagcaacactcgctgcggtagatttattcatggccgcgccgagaccttggcagggagcattaaaacaaccacaagaacctcgtcgcagcgaggcatttcatggctgcggcgaggttccgtacaattcgaggccaattttgtcttttctcaattctttgaagtctgggattgaatttataaaatagactgcgagaaaaagagaggggaagtgaattttagaccaaaaagtagtcaaggacggccgaaggagtagagtggcagcccagattcattccaccatcagtttctttcttctccttttatttcttttatgttaaattctgctttagtgttattatggatatgaatatgaactaaattgccaatttagggatatgatgattattagatgatatttatgtaattcagttaatgtgattattagttttcttccctgatcgtgtgatttgttgttatttgttttaattacatattttagactgaccatcttaaatgtgacttatgatcctaatataaaatctgagaagtgaataataaaattgctctaataggacaagcataagttgatgtaaaacgagagtattcacatagcttatgtgatgtgtagattctgattttgatgcaagttatatattaatttactgcagcgatgtgagtagatgatatatgatttaggaccttaatgatctgagaagagttagggttaaattgataatctgtcatcactaagagggagagaattaataattaacattagcaattgagaaactaaactaacaggattcgtattcctaaatactcatccataattaattacactcttcattattatttccttgctttttaatttctaatcatttaattcttcaatttttttaatcgatttgccaaatagaaacgcaaatctaatttttgtggtacttgataacaattccctgtgaatcgacctcacctgtgtgagtttaaaactacaaataattacgtacacttgcgtaattgctcataaattgtgtaacaaatgcaagccttttatgtttcaccaaaggttgtgaatgatacctcttggtacctagattcaggagccacacaccacatcacagttgatggagtcaatctgcaatggacaagagaagatactcatgggtaatgaaacaggtttacctattttaaatattggtcaaacttctttcatttcaccatttaattctcagtctcttgttttatctaagcttctacgtgttcctgacaaaactaaaatcttattaagtgtctctcaatttgcaaatgataatggtgtcttttttgagtttcacccttctttctattgtgtcaaggactaggataccaagaagactttacttgttgggaagcttgaacaaggattgtataagtttgacattgaggatcttcactttaactctcaatctgaaatctcaagtcagggtactacttcatttgagaggaaatgtttgagctcagagatgattgtaccgaatgctattttcaatttgtggcataatcgacttggacatcctaatgctaataaaatagtcaagtcggttctttcttcttgtaatgttgaattcagtaataaaaatatttcagatttgtgttctacatgttgtcttggcaaacaccaaaagttacctttttctcattcttcaattgaattcactgagcctttatagttgctacattcagatttacaaggtcctgctcctatcacctcttcaaatggatataagtattatattagctttgttgatgcttattccagacacacttggatttacttactaagaacaaagtgtgaagctcttcccacttttactaattttaaaactcaagtggaacttcaacttgggtttaagatcaaagctatacaatcggattagggaggtgagtatcaagctttcacaacttttcttaagtcctctggcattgttcatagagtgttttgtcctcatacgcatgaataaaatggagtttttgaacgtaaatatcaccatattgtagaaagttgactaaccttgatggcacaagcttttttacccttgaagttttgggatgaagcttaccgaactgctggtttcttatcaattggaagccaactccagtactcaatcacatgacacctattaagatcttgttcaaagtaaaaccagattacaagtctctgaaggtttttgggtgtctttgctacccaaatttattaccttacaatcgtgtaaagctacaatataggtctgtaccttgcacttttttgggatatatcttgtctcacaaaggctataaatgcctctctaaagatggaagaatgcatatctcccgagatgttctatttgatgagtgtcattttccatacacagtcgctgctccaagctgttctaatacatcatcaaacttatctacttcagtcactcatggacaacctttcaacttagcctcagcttctcaccaaccccaaactcaaggtgtcatttcctgtgctgcaataccagatactaacaagtcaactactacctcaatttccatgcctcctactgagatgaatggtcagacagttatcacaccaagtgctcaagctccattgagtactcaagttcaaacagtgactgctagtgttgataatgtctctgctccattgagtactcaagtttaaaatagacacgttgttgtcatggagcttcccagctcaattttgcatataatgcttctccaacaatggttgtttgtgttgataatgtctctcctccaactgttaatcaacatcccatggttactagaggtaaatcgagaattctcaagcctaaattctttatgcttcgcttgaacctcgctcacttaaagctattttgtaagaccctaactggtttgcaactatggatactgaaatggtggctttaagaaaaaatggtacatggatccttgttaatctacctgaaggccgagtccctattggttgtaaatgggttcataagatcaaggaaaatccagatggccctgtgtctaggtacaaagctcacttagtggctaaaggttttcatcaacaagagggatttgatttcaatgagacctttagtcctgttattcagcttgtcaccattcacattgttcttactataggatttacaaaagggtggtcgattcgtcaactcgatgtcaacaataattttctaaatggtggcttgaatgaggagatctatatggttcaacctccaagctttgttgatcctttacaccccaacaaagtttacaaactccaaaaggcactttatggtctcaaacaagctccacgagcttggtttgagaaattatccatagccttacttagttttgggtttgtgtctgctcagtatgatcattcattgtttgttcgcactactccaatacattgcacttatgtccttgtatatgctgatgacattcttgtgatagagagtcatgacaaggttgtttcctcacttatctctgaactaggctagaccttcgctcttaagggtgtacttgaatgatcctctccacatagcccaaatgcaaggtgtcaattctcaaaactctccaatgaatggtagccttcggttatctcaatatgagggtgagcctattactgatgttacactttatagatcagttgttggtgcgttgcaatatgcaaccattactcagcctgaaactgcctttagtgttaacaaggtgagtcaattcatgtatgattctctctccttacattggattgcagtcaaacacattcttagatacctggctgggacacttgacttcaggttactcatctctttagcctcactttttcatcttgaggccttttgtaatgcagcctgggcttcagaccttgatgactgtcgctctacgactggtttttgtgtatattttggaggcacacttgtttcttgggggtctaaaaagtagtccactatttctcagtcttctagtgaagttgagtttcgtagcctaattgtgagtgttattactgaagttacgtggattcagtcccttcttcaagaacttcattttcctttgtctgtgcctcctacgatctagtgggacaatttgagcactatcatgatggttgttaatccgattcttcacgctcgcaccaagcacattgagatattgatctctattttgtccgagacaagatgctttaaggtcacattcaagtacaacatgtgcttgctctggatcaggttgctaattgcctaaccaaatcaatttctagctctcgattttcttatctttgtgacaaagtaattgtgttttctccttccacactcagtttgaaggggtggataagaatcaattagcctcaaaactgttagaagttggttagaattctggttcgctgagctgtatagtttattaggctttttgctctatttttattttgtgtataagctgatgttatactccttcttcaatctaagaaacacaaatcattctttcatctctttcttctttcattctctctcattctctatctttcttaagtttcaacaaactcctctaataattttcatttctctagtctagtcattttctcctagttaaagtcaatgcaattcactctctcgaaactttttcgttgttccaaatcatgttgtttggtattttagctgtcattgcatagatcctgctaacaattatcgtttcttaataacattgtcgctagacatgtgctataatcgttttaacttgtttttgtcgtttccaattcgaaatttcaaaaatagcctcaactgaagactcgtggaacaaaacaaaactttcctccataatacttaggctaattagtatttttgtcttgaattctgacatataccaaatcatgctctctgaatttatttagccgttaaaaattcctactgaactattgagattgttggattttaagacatttttccagtttcgtcaattttactaattctgtgattgttcatgtactaaatcatactccttagactttgatatctaccaaatcatgcccctcgaactttaacatgtaccaaatcaagcctaacttttatccatgttaaactttccttactaaaattaaaaaagaaaaaatttaaatccaacaatctcaataatttaagagtgatttttaatggccttaaaagtttatgaccataattcgatacaagttgaagtttagaaagccgaatcatatgatttatcaccatagttgtgtagtatataaaagtaaaatctttttttaattgagtaatgttataattagttaccatagtcgtgtagtatataaaagtaaaatcctttttcaattgagtaatgttatgattagttagccatatttttctaaacattattacacccacaacaatataacagaaaatgctaaacacccctaatgcattatcctatttctctttttaatcctttgattaattaattcacatcatctttattagtttattaatttgacataaggatgagggtgcagaattcaaactaaacagagaaagtccacaatatatcaccatcaccatcaccatcttattttaatcttgtcaaatgatgattaggtctataatttagaaggaatttagtgatattttacttaatctacattagacatatagaccacctcctcacacttaagctttccatatcatctaatctaaccaagtccattaagtttttttcctatattaatggccaagacagagatactagtaacaactgtagcccacagaataaa

SEQ ID NO: 188562 - DNA, 1763 bp, Cannabis indica
gagtttattatgtgtgtctaagtttacgtacatctagaatctagaatattcatactgatatccaccacaagagcttaataaaagaatatttagtaaatggaggataattaacgatagaagtttttttttttttaccatttacaaacaaaaataattcaataaacttatgagacagaattataattatcccctgaaaccaagtctagctggctacctaattttttttttttaggggtaattaataaaataagtaaaattaatcatatcacaaattaaagaattaatatagatattcacatctatctacacaataagtccactaactatatatatttattaataattaagagataatttattaaattaattaatgtacacaggtgcgggtgcaacatacgctagattggtacctaaaataaagaaaagatatgactatggagcaatgatattcatcctaacattcaatctggtggtggtgtctggtttgcgtgcggagaaggtcttacaattggctcgtgaacgtctctgtaccataggaatgggtttcgccgtatgcgtcttcataagcttactcatctttcccacatgggctagtgatgaacttcacgactctatagcctccaacttcaatcaccttgccctctctcttgaaggtatatatacctacctatctaattaataatttccatctaatattaattaattcttctacttatatataatgatcattttgtttcctataatataggatgcttggaggaatacttcaaactatcatgccataaggaaaatcagtctactagtgccaaaagttttactagtaattgcaaattagtgttgaactccaaagccaaggatgaacaattggtatatttatttatactacttatgatatgtattcatatgactccaacttaatttaataattaatatataattttcatgctactacagacaaattttgcaaaatgggaaccttggcatggaaaatttgggctttattacccatggggaaagtaccttcaacttggtgaccaccttagagaattggcttcctctatcatttccttgacaagttgtctccaatcccctaaacaggtatacatatacaaatacatcgtgagcattaattaattgcataatatatataaatttacaatatggtttttcaaataaggacatacttatatacccatatcaaattatgtattagtataaggtacaacaactaatgtgttttatttttggtacaacatcaaactgaatttacattttaattattaattaattgtactgttacttattaatattgaaattaattgttttgtttatatatatagccttcgccaacattgaggcagttaattaaagagccatgcgaagcagtggggtgttcacttggatggagcttaaaagagcttggagaaagcttaaaaaaaatgagaaaatgccagccagctgatgtaattttgcccaagctgaaggccatgagaatagagcttagctcagtgatttctgatagtcctaataattcaaagctagctgggaagttagagaacgtcgaaggacttgcggttgcaacacttgttttctccttaatggagataattgaaaaggtcgaagatttggctaaggaggttgaagaccttggtcaacttgctttccattagtataattatacatattattatataattatagaaagctttcccgagcttaatttttcactatgttattactatatatataaattgtatgatgaa

SEQ ID NO: 188563 - DNA, 2543 bp, Cannabis indica
ggggttgccaatccttctgatgtttgtcaggtacagattattttacaacttaacaatgaagtttttcttcgattaacatcttctataaaggatttgttctttgtgttcgaaacagggtcgattgggtgattgctggtttctgagtgctgttgctgttttaaccgaggtttcacgaatatcagaagtaattattactccagaatacaacgacgaagggatctacaccgttcgtttctgtattcagggcgagtgggttcctgttgttattgatgattggattccatgtgaatcgcccggtaagccagcatttgcaacaagcagaaaaggaaacgagctatgggtctctttactagagaaagcgtatgccaaattgcatggctcttacgaagctctagaaggtgggctagttcaggatgctcttgtagatcttaccggaggtgctggtgaagagattgacatgaggagtccacaggctcaaattgatctcgcgagtggtagactgtggtctcaattattgcgtttcaaacaagaggggtttctactcggtgctggtagtccaacaggttccgatgtgcatatctcgtctagtggcatcgtgcaagggcatgcctactctctactccaggtgagtaaatgtcggtaaaggatactgatatacaaccacttgagtagaactcactctcgaaagctagcctaagagatgaggttgttgcccgagtaataaacgtgggattctaacagattcatttttgttacaattttgtttttcaggtaaaagaggtggacggccacaagctgattcagatacgaaatccatgggccaatgaagtcgaatggaacggcccttggtctgactcatcaccagaatggactgataggatgaagcataagcttaaacatgttccacaggttggtttttgatcctttatatgtttacatttcgatgaattttcgattcgatttcttatcactgacttcatacttttgttaaacagtcaaaagatggcatattctggatgtcttggcaagattttcagattcacttcagatcaatatacgtttgtcgagtttacccaccagagatgcgatactcggttcatggtcaatggcgaggatacagcgcaggcggttgccaagactacgaaacatggcatcaaaatccacagtttcaattacgagctactggtgcagatgcttcctttccaatccatgttttcattacactgactcaggtaatctttccaaccaactttttttcttaaattgtattctcaatctgtttctaacttcccccgaaataatatgtttagggcgtgagtttctcgaggacagtggccggtttcagaaactatcaatctagtcacgactcgatgatgttctacatcggattaaggatactcaatactcgtggtcgtcgagctgcttacaacatctacttacacgagtcagttggtggcacagattacgttaactctcgagaaatatcttgcgaaatggtattagagcccgatcctaaaggttacaccatagtcccttctaccatacatcccggagaagaagcaccatttgttctctctgttttcaccaaagcatcagtaactctagaacccttgtagtttgtagtaccaatggcttttcagtttttcttgactcaaaacttcgaattgctcgggctactcatcgaccataaacgctaggcagccacacgagggaaaattcatacaccttatgatcaggtaaacgaaaattcataccgaactttctgcctcatcgtagcaataaactaactagttattcttccctcctcaggctgcttacaccgcgaatttggcaacaaaacaatgacaagcgagttcgctactcatcagctgctgaaactctagttgaacattaccgaacgagtacaaacgccttattcggttatgtttcgcttctcttgctcatgtcaacatcatcatcatcatcattatcctttgctttcgattggcataaggatcgggttctcttggcggctttgtaactgtaaatatagattggtttcttatgaatataggtgtaattgtgtaaaaatgagaactttgaaacaaaaagctatagagattaagttttaattgttaggtaaaatgagaaagagaggggatagtgcagctgtaatggtgtttattggttcagctgcggttttgagagagtgagagggatagtgcagctgtacaaatacaaaatgtttcaatcatttttcttcaaaatatgaaactattattttattttcttctattttggttggcatgtttatttctcttttgggtttaattaatgttttgaaagttctatttttggtaaatatgttgaattcaatcattgaattgagaaagactagtatgtgattctaaaataattctaaataattatttaacaattctcatatttccacaaccttaagttataatagtgtaagttttgtagttatttagaggtatatgtaaatttttttaaaaaatgaataattaataatattgtaaataaaatttgggtaaatactattt

SEQ ID NO: 188564 - DNA, 4987 bp, Cannabis indica
acatgcttgaccacatactacaatcaatgtgttgaattccacacaagaactatgtaccacgaggttgcacaacagcttgatttagagaataactattttatcctaggtcaggaggaggagggagagaggctgatattcaccattggaaagtttcagcatcagaaagtcaataccgagttcattactgtgaaggccaacgagcactacactgtagctgcatgatatatgaaagtcaggggtacccttgtagacatttatgggctacaatgaaaagattaaacatgagaagaatacctaatactcttctcatgaagcgatggagcaaatccgcgaagacaaatctccacctacattttaacccgccagcacaacaacaacagcacatttatgggatggctaggtttggatctctcagttcactaacttataacttgaatttctatgcatcaaaatcagaggattcgtataaccgtgcaaaggaagagattgaacgactaactctaatgttcaatgaagaatttgagttgagttccaatccggaaggagagatgccaacacctggaagatatcgtaacaaccccaaagttgtgagaaccaagggtacgggaaatccaaggggaggaccaaacaaggagcagatcccaagaaactcaagacattgtcgcatttgtcgctcatcagaccatgattatcgacggtgccgaaaccgtcaacagaatactggatctcaggggcaacaatctgcaaacaatcaagcaagatctgtctcattcaatgaccactccaacacgtatttcccggacccgcctgcctccacactagagtcatactatagtcatatatattactagctatttttaaccattgatgttttaacgtttatgactttaattattgcttcaaaaaatcctagatttatatatttcttgttatgtttggggtgtttaaggtaattatatcatcttgaagaaatctcaaaattattattgatgaacaactaaattattttaggtcaaaaaatcaaatcttataaggtggcacaaaaaaaagttctatggtttttaatataaaaaataattacaataaaataaataaaccaatctaaaactcaatatttaacaacacataatttctagagttataagattttttcttaccaatgtactacgaaatataaatgaacgcactcggtacgtgatattttgtacacaaattttactcagcatcatgcagaaacaataaatgtacacggtacgtgatataatatactcaactaccatcgcacaaacatgtagaagatatgaaggaatgaaaaggcaaaaataactaccccaaacagtaacttcgttgtactttttcataccttaactaccccaaacagtaatttgattgttcctttttattttttaattaaaaaatcaaattgacaaaccggtaaaccaacccacactattcggttgttaaataaataaataaattcacacattattacgtaccctaggactcacttgccctacaacgaaattcattctagcagcctatacatatatatatatgtatatattattctaacagtgttaataacaaattaatgaagaactccacttacttacatgtatcataacttaaatgtattggaccaatctgtttaacttttttacagaattttttccaattgattccaactgatgctcgctatatgttttatctaaattcaggttatgaatatgtatatatctgtatatattaatttgttattattgtatatttaggttatatagattatatatatgagaggaatatatatttatatatgtgatttatattgtatgtttaggttttaggttttgtaaatatgtgagagaataatgagtgatatatataatatattgttagctagatttataaagcgtgaaagaattaaagagagaataattaggagtgtttgaagaatcattataatttataagcgttattagcattatttgacttttaactacttatggatattacagcacgacctaaggtttacgtttcacattccttcaaagacaataattagctagatatacattatttcaaaaaacataactgtaaataaataattagagataatgcatatatattaattattatatatttcaaacttgaataaactgctccaagaggctcaatatatgtatatcgtttttcttttttcttttattatattgggttttttgcggaaaacagatacatattactttaatttttatttattgaaggacatgaataatgcctatcatttagtccctccgtttggcatagtcatctgaaaactgatatcttgagcaatattctgtgcatcttgtgaaatgcccagtaatcctcttgatgagaacccagcgcagtaaatcccacttttgcctttccaatactcattcggccacctttgtcgaggcattccatcttcgttgaacagatcttcaccaccctgcgcgccgtttattaattttccataattattaataatcagctactccacacacatatactgatatacacactcatatataatgtatttaccttaagccaatttctgacagtgcttttgtaaccagtggcaaagattatggcatcaaagcaacgagttttgcggttctcaaattcaacacagttttcttgaacatttgttatggacggaaatacctaagtatattgcaatagtcattatatatattggtctccatatatatattaatgtatgtatccgtatatataacgcatatatatttggtgtattatttataccttgatttctgctgatttaatcttcgccacagatccaacgtcaatggttggagatcgaccagttgttgctttaaggaagaaaggtcctttatttggtgtttgaagtccatactcagacaaatttccatgctttaatctacccaaagccgaaacgatagcgtcgacaattttgataggcatgaatttcaatagaaacattcccagtttgacaatattctcacttagcaaatgcacctggacaagtagagtaaaaatatcaaatcattaattattaattaatactacaaataaaaaacgttttcttatttcaagaaagaaaaaagaaaacttccagttttataacaattgttaaacgtatagaattatttaatacggaaaaataattaattcatagttaatgtgaaaagaaaatttatatcaaagaaaacaaaataaaagttatcataatttcttttaataatgaattaccgggctccgtgctacgatggaagtgctagcaccccaatttgataaatcgaaggcaatctccatgccggagtttccagcaccaacgaccaaaacacttttatcagtataacactttccacagtcatactggctggagtgtatgactttcccacgaaaagtgtctaagccctctattggaggaatatagccatagttattctccccagtagccaccacaagaaatttagcaaagtacacttcgtatgattcagttaccatgtttttaacgacaacagaccatttagatatgttgtcgtcgtagaaggaggattctacgtgtcggttcaggagaggtgacacctggaaccgagcaacgtagctgtccatgtatcggatgaagtcgtttttggggacaaaagttggggtgcctttagggaaaggcatgtgaggaagctggcagtattgcttggccaaatgaagcttgagtcgatcgtaagatcttttcttccatagagaagcatagcagtcttctctttcgataacaatgttggagattttgaggcgattaaggcatgcagaagtggctatgccagaaggacctgctccaacgatgactacatcaacttgctccatttctcaaagaagaagaaaatacaagaacaatgttgtatgtgaatggtctaggtgtgtgtttgggggcaatttatgcttgtatttatacacccacattgcctttttttttgtacaaattgtctcccttaaacggtttttccttttactaccaaattaatgttatacataatttggtgttagaatccaatgttgcaaaataggtaagagttacaactgtatacaggagcaaatattagacaaattctaagtatgtatttaattaagtggattttccataataataataataattacaaaaaatagttacctttagtcacaacctttatcataacataaatttttgtgattcaaaataatttctagtcacaacaaaaaattacgtgtgactaaaacatcatattttaatataagttatcactaatttagttttagtcacaataagtattgtgactaaaaaatttaggtagcgattggttggaagaaataaaaatataagaataagaatagaaatggaatggaataaaatttaaaatgcataaaaaaatttgataaaaaaatcattcaatttttgctcatgttacattggaatggtctttcctaccatttcaaaatagaatagtcattccaccaaaatggtggaaacgacattacaatggaatgtcattctaatactaacaaaggaatagaatgaaaattgtttactttccattctattccgtttcattacctccaactaaacgccaaatttgttgtaacaaattataatttttgtgactaatacctttagttacgacccttttagtcataacataaaattatgatttataattagtcacaatatttttacttttcgtcacaaattttattgtgactaaaagtaagattttttgtagtaaataataatatgaagaataagaagaataattataatatcctggaaactataataatatttaattagacatattttattaaatatgtgatcattcagatattggagtaagactataatcttacttaagctaattgtgtgttaattattataaatctagtaaatgagtaaataaagcgtaatttattaattattgaaattatatcggattatgtgggtattgta

SEQ ID NO: 188565 - DNA, 2009 bp, Cannabis indica
aaataagactctctccatggttaaagttcttcaagcagcttctagtggacagtttgaggatggcatggttcctacctctctttttaatcagaatttagttctgtaatttttttttcttacttttgtaattatattcatttgtgtttacatttctgcagctctttatattaaaaaggggtacgtaccacagtttatagcttcttggctggattgtcttaataaaaagaaatttggaatatttgttgcaggagaattgttcaaacgagaagtgcacaagttcattcaagaaaatggcagaatcctttgcagatccttccaaagtggagaagtgctttgaaaaattgaacgatgtgaaagaaaataaaatatttaattttctcgaaactttgttaaaagacctagggcatgtaaatgctgagactaccagagtatgttgattcctttttccctctaattttgatttaaaagtattaggtcttgctttgtatgaatgttcatactgttgcagcaaaagctgtcataaaatttgggaagtcaccaatgcctcttaagctttagggacttcaacactttggtcattggttctccttcattcagtatcgttaaatactgtttgcattttggaattcaccacacgcttcttgaactacgggttgttatacatcaattctcaaattctattaacatgccatgaattttttccaaaatgtgaatgatgttggatggtggggcagtaggtcctacaaaaattatgtttaggaatggtgagggctcacaaaatgaaatttgggggtaaagtgtgtataatactcattgaggggcactggtgaaattaaacctgagtaatctgtttataattatatgttcactctaaatttaagctgcttttttttagctaatttgctaggatttatagctaagctttttttttattgtttctagctttcagattgtgaaaataaatggttataatttttttatttgtactttttagtatgcacatttcttacttcattttttcatttgtcttatttgcagaacaagcttttgaatttgataggagataaaagtaaaatttttgagtttgtgcagacactttccttgaaatgctctcataacatattcagttcagagcatgtccgctgtatcttagataatctttccagtgacagttttggggataagcactacaaggattcttctctccagcttcttttggtacgaataattgctgttaactagatgttctattgcctatctcttgagttttatatgggaaaacaatatcttatgacaaaagtcaaatgtgtgaacattccacttgaataaaatgtgggacatgacatataatacaaattggtaagttgggtgtttttaatgggcattcgacaatgttccacattgagaagtttgtaggatttggatcaagcaaaaggtaatagtggtatctttagtcattatagcaaatttatttgtttttatgttggaaatatgcaagagtcaatgaggataaagtgcaacacgaatttcagtatggttgacaatgaaaccagtgattttttttaatggttcttcttcataagagtttaaagacactccacttttctttgttttgttgagctggaaggaatccttaatggtttttcttcttcttcttgaatttgtgctattattttttgtgaaaagagacagaggtcatatgtctaagactgacctcttgtgctattgttgcttgtcgttacatgtaaaagtgaacttttctatcgagaagaaactatttttaattcatctcctaactgaaccagactttctgttagctaattggatttagtttgattgagaggggttttgacaatcattatgtcaaatatccttaccatctgatcagttgtggttgtgtactagcagtgcaccattaagagagaatttatggtaaaacgatgtctgtcagaaagaaatcaaaactttgaatgatgataatttatacgagtatatactctctctctctc

SEQ ID NO: 188566 - DNA, 1523 bp, Cannabis indica
gtaaatctagatcctcgtaaaacatattccaacacttaaattggatatgaacaacttttccctttggaaatcaatggtgtctgctattgttacaggacgggttggatggttatctaatagggacaaaggtcaagctacaagaattcatattggttctgattctagatggacaacctagttttggtgttaaaatgaacccagactatgaacaatgggttgttcatgaccagctgctcatgggctggttgtatggatctatgacaaagaccatagctacagaagtaacgggctgctctacatcactagatctttggcgagctttggaagctctttatggatcacattcaaaagcaaaaatagacgagtaccggacaaagatatagacagtcagcaaaggctctcaattcatggttgaatatcttagggaaaaacgacagtgggcagatattcttgcccttgcaggtgctcattaccctgaacaacaacttatctccaatgttctgcctggtctagacataacccacctccccattgttctgcaaatcgaagctcgacaatccataacatggcaagagctttaggatcttctactgtgttttgatagtaaggtggagagaacgagttttatgaataacatcaagctgcagaataacacagcatcgccaactgcaaatctggccaacaagaattcacttagaggtaacactggacctagctattcaagaaacaatcgagggggtcaaaatcatggtaggtttggaaacaggcgaagaagcaaatctggaggtgggaacaagcctacatgcaaagtttttggaaggtatggtcacttggttgcacattgttataatatataggatgagtcatacatcggttcagttccattgagtggtgcactagattcaaccaaatccacacaaaaccgaacaacttttactgctactcctgagatggggaaggatgatgcctggtatgtggatagtggtgcaagcaaccatgtctcagttgacacaagtaccatgacccagaaaaataaatacacaggtaaggatgatttgattgtgggcaatggcagccaactcaccattgatcatattggtaatgccactttcaaatccattaataactatcctcttatcctcaaagacatcttgcatgttcccaagataactaagaatcttattagtatttctaaattaacaacagataatgatgttattgtggaatttacacctgactattgctatgtgaaggacaaacaaacaaaggagatggtactgcaagggagacttgaaggaggtctgtacagacttgataaagctgaaaatgattccaacaagtcctacaaactacttcacccaattcaatttcaagtctcaacccaagatttttactagtcttgcttctttttctagatttgagtctaatcttcctgttgcctaaaaaaaaaaaaacaaagttatttagctttaattaaggataaatggcatacatgtcttgtccatccatccaatcgtgtgttg

SEQ ID NO: 188567 - DNA, 4590 bp, Cannabis indica
agtaattccatttctctcctcccttctccacctcgcaacaaccctagaactctctctcactgtcactctcactgaaccaagatgcctcccaaagctgcaaagggaaaggaagtacctgctgagcgacccattctcggacgattctcttctcatctcaagatcggaatcgtaaaatctcctttctctggataatgcttcaattctcactgattttcacgactttttttgagttttttatttcatttcatgggaaaagtaggaaaatgagcatagaaatgggttgattataaattggttgtttacttcgacaatggttagagaagtttgtaaattttctcagtaaaaaagttgttccattttgtttgagttagacttaattaagctggattaaacttaaaaaaaaaaaaaatcttaagtgtggatttgcttctgaaaattgaaatagatgtttaaataatggtttacatttggatagttcgaaaagaaatcatcttgttttctaatatcttagttaaattaaggctctgtgtgtaaatataatgatgtaacaaatttacatttaattgtttatgttctttgctagctcacattgttgttgaatttacctcgacaggttggattgccaaatgttgggaagtctactctttttaacacgcttactaagttggcaattcctgccgagaacttccctttctgcacaattgaacctaatgaggctcgggtaaatatccctgatgagcgattcgaatggctttgccaacaattcaagccaaagagtgaggtgtgttcctcatttttataaagctaatttgttctactcctatcttcgtctttaattgctgtagaggtgatctggtcttcatgcaacactttttattaatttttttcttagttctgtgcaaaaaataaaattgaattctctaatagcttgtgacttataggtgttgtcgtgttgattttttctcctgtaagctagtatgggtttatgaattaggaggaagtgatctaagatcagtggcagaattagagtatagattgaaatgggatccttgttttaggatgtcttgcctactggttagaggttgtgcacacccattaggaacatatacaaacaggtaaagagagaagtcagtggagaactaccaaatccaaatgactttgatttgttcgtaccattctgtcaggtgtaataagttagataaagtgttgtatgttctcttacccaacttcctctttcaacttgtttagtggcattaagaaatatattttatttcactggaaaatggtagagggaatagttatagccttacaggagattaaatctatttttttattacaaaaacaaaatcaactaacaagatttgtggataacacgtaggcttgacattttatgacactgcaaaagaaaatccaattgagttactaagattcaatttctgagtagttgcccaggtttatattcctgggagttggaaggttcagtcgtaacttttgaacatcccttagcttataagttattgttcttctaggaaatatactgatgaagttttcatgtattttctgccttctcatttagtggatagaacattttatttttatactttaaacttttcagaaattttttgttgtggaaacttaataattacacctttcttcttgaactatgctaattagttagttcttcttaacaggtttctgcctttttggaaattcatgatatagctggactcgttcggggtgcgcatcaggggcagggtttgggcaacagtttcttatctcacattcgagcagttgatggcattttccatgttttacgtaagattcagattgtcaagaaagcacatgtttgaatttcttagttttttcttactaatgaattagtttaggagagtatacagacaaaaagtcagtatactattttttggtgtcgctgtgtcccaggtaaaaacttgtttggagctccatcacttctaaatccctctagctgtcatcaaataaagaatgaaatcctagaataagccctgttccttttttctttctttaatcatgtttttgaacctgacataaaaattaggataatcttgtcttgaattctcactcaaagacttttaagttccattcttctgtagctgtaattatacttatgtcatttattttcttattctgacattccaaggttttcggtccaccaaccagaatttccttgtcgcagctattggtattctgtttctgctgtcctgtcttgacagcattgtatgaaaactttttgataaatttgggtttatttggtggatgaactctttcaccccctgctctcagtcttccataccaatatggaaccattatataatatttttattgatcaactacctcaaataagttaatctacagactactaatctatttagcagcaaccagtattgtatctctaatgtctaacaggtagaggatacttttcttattgtatgtagctgtcagattctcccctgtttctttgatcagattgttatgtttctttgatcagattgttatacctacttatagcaatactgtagaataaatttgctgtctacctcatggtgggagatgaaagacacgtagttacttgcatccgattgcagtgaactagtgtgaaatatagtcatcttatatgagttgatttgttaagttgggttctcttcaatattgcctcaggtgcatttgaagatcctgatattattcacgtcgatgacacagtagatcctgtgagggatttagagattattagtgaagaattgcgactaaaggtatgtatatcacttgtttctacaatttattggcttatgtgtataaatgctccattgtacttgaatttggtgtgcatggtgcacttaattttttcagcatttcttcatgtatatagttacatttctctactatatctcttgcagtttaagagatagctgcatactcacttttaaccaagtcaattttggtttctttcaaagcctacctaccatgtaaatgataagaaccaaaatcagaaaatgggtactgaaccttttccattgaaagatagaaaggaaaatttgaggagaattccaacattttacaaaacaatccacaccatcttctctcccctcctttatttattaccacctctagaatcttcctaacagactctagaattatccccagtctcatattctaggctaatgatttcctcaaaaaaaaaataaaatattctaggctaatgaattaccttgtgacctgtcctctaacagtacagctagctctccttgctaacaaatcccttataagttaaacttataacataccccagcagccagctatccacactaacaacccactcataacagtaaagtactttacaattcttcagacttatcacttggtaattggagatgcatatagaattataaattgatataccatgcttatgtcacaacacaacgagtattggcttgtatgatatggatatccctattcatatgttccactatttgatgttcatatatattccttccattatatatactgaagagcattcttgtaccctctagaaattctatacattgaaaaatacattaaccaattgtcttaaacattaacaaggtaaaaggccttcattcaagtatggaacgattaggagttaacagtatattatgggttgcaccatttaaaattactggtcgaatggactttacaacctatgctcggtgctattcatttacaggatattgaatttatggagaggaaaatagaggatgttgaaaaaagtatgaagaggagcaatgacaagcagctaaaagtagagcttgagtgctgcggaagggtatgtgctgtacataaagacataattattgtttcattgaatactcttgctagctcttgtatgtcagagcttttactgatgtataattatgtcaaatgtccaattcaaatcgttacagacatcattttcttttgtacttgtatgaatattttattatcaatttcagaagcgttgtgatttcttaagatagtaatctggcatgctcatatcgtttgaagggtgctgtaataatgcatatatatttacaggtcaaggcatggcttgaggacggaaaagatgttcgtctaggggaatggaaagctgcggatgtggaaatactgaacacattacaattgttaactgccaagcctgttgtttacttggtaagattcatttttttgttgttgttgttgtatgatataaaaatattcattttttatatctcatatttcttcaggcatttttttttcaattcttggcaagttagtcctcaattcttttgtttttttcttgaaaacttgttctccacctccatccaagtcaggtagcagcaactaaataacaaaagcatacccaaaaggagtcctactcaataacattaataataatctcagaagtagcagcaaatagatcacaaattcaaacggaaaacctgaagaacttcatgagctagagtgaggagaccgctagagagagagagagaaagaaagaagaggagatcgtgagaggggtggtggttggatagagaatcatgatgtgagagagaaagagatatt

SEQ ID NO: 188568 - DNA, 646 bp, Cannabis indica
aaaaaatgataataataaattacttattttcttccccaattattttattcaatgaagaaaaagaccttgtcaatttgattaggattcttagggcgaggtttacgctgaaccaaccagtcatgaggcagtctgaatgaggatgaggcgtgggtaatggagcagataaggcggcggcgatcggaatgtgcgtctgtgcatggccgtagcgttcgcagaggtttcacatttacagctctagattttttcttcatcatccccactgtctctctctctttttattacttgtgagtggtgagttaaatatgttcggtttggtaatttttttcttgtttttgaataaattttcggtttggtaattgaatgaaataattgacggatttgaggatagctaatacatatgtgttaatttcatgtatgtgaacttaatccctaaaacttaaattttagctcttaacccctaataaaacttacttgcacttaatctctaaaatttaaattttagcactaaaattattaaaattagaataccgttggtaatttacagtttttatctattttatgtgctaaagtgtcatattaaactgtctatctatatatctacgtgaacacaatatatatatagtacaattttattagcccacgtaaa

SEQ ID NO: 188569 - DNA, 2438 bp, Cannabis indica
ccggtctgagtcctggtccgggtctggtcctggtccaggtctcaggtccgggtctaggtcccggtcccggtcctaggtctcgatcccgatcctggtctcgagtcccaagttcgatcctagtctcgggtcctgggtcccggtctgggttcggggccaggttgggtccgagtttgggtcttggtcctagtcccgagtccgagtcccggtctcgatctcggtccgggtctgggtccaggtccggtctcgggtcccaggtcttgggtcccagtctgggtccgggtccggggtcggggtcccttaccaggtctgggtctcgagtcccggtcccggtcccagttcaggtctgggtgcgggtccaggtcctgatcccagtctgggtcccatttcgggcccaggtcccggtctcgattccgatccgggtcctgggtctgggtccgggtctcgggtcaagacctgggtcccagtctcggatccctggtctgagtccggggtctcgggtcccagtctgggttcgggtccaggtcccaagcgatccaagtttggggttcgagtcttgaattaagtttgttttttaataaattataatctggtcggatcagatcagattcgatttagaaaagaattaggcagggcagagcgaatctaatccaagatccgataagtatccgaatgtttcggatcggaggtgatccgtcaaatcagagctccaacctgctccaactaaatagatttttttgacatgcctatgtaatagcgatgcaagtcttcgtaatccacttctctaattagacttttttagatgtcactatgttgaactcccttcaagcagcaacaaatactctcttccttccgatgagagattttagacaagacttctatcgaaacttgtatcacatgctcaatgaagaacacaacctataaacaattaaacataaagaaaacaaagtgtaaaattaatacaaagaacgcgaagactatgttggacactttaatctcctcacaaagtactcttacaaaacaaaaaataatttaaaaaaaaaaaaagaaaatataaagagttaaattttgccaaaatttgaggatgtatatattacaaaataatatacctcaaattatacaatccaagtagggaaacaatcaaaagcaataaaaaaaaataattccaaaaatgtaattcttaacaacctgtagacaaacatttaaaacattatacaaagttgtttgatcagaatatacaacaacaaatttggagaataattaagaaagtttctatttcaaaaatatgtgaataaatcatatttaatgatcctgaaatcacaaccggttagttagttgataatatatgatattaatttcattaaattaagaagaaattttagaataaaaagtaacataccattcaaaaaaaaaataacatgctaattaatttgatatatactaaatatatttaaattaattaaaaagataattatctattagatcaaaatataatttacattactaaatttaaaaataaataataaaatgtggtgcgaaaaagagtggctcctctagggttttcttctcctagcatcgcctggggtttttatttgtcttaaagctttttctcggttgggatcgtcggcactagttctttatgcgcctattcagacctggccgagagcaaccttcatttttctttgtgattgcctttgtagttttaggagtgggtttcaggattgggtgttctttttcctctgctagtggtcagatttggtttggggtttctcttaagggtgcgtcggttgtggctaatggagttgtagcagctttttcgcaaacaagagtttgggtgagttatgaaatcgttctcccgtcatgggtttgttgggacatcgacagggagacattttcatgaggtttggatttctatgtagtaggggaagggctctggtgtgacggtgggttctgagatggcgactgtgtcttgatgggaagtggtagttggactggttgtgggtgggcaaagaggaacactggtcttccaagtcttctttgttgtttgtaatatttttttttattttattgttgtatttgtttcattgtcaaaataagagtagaatttttctattatcctgttagtttagttggttttattgtgaggaagaatgatggtgacttctgcagtatgctatttggctatgggggcacgcaaactcttatagtcgatccatcgctacacgatggtcgaatggaaattgtacaggagaggtaattccatgtctattttgcaatgtgtgttactagcagaagttaatgaaataatcagagaaattcatgaaggtttctatgggtatcatgcaggttggcagagcttatctaaaaagataatcagtcaaggatactattggccaactatcaataaagacatatacaaatttgttaagagatgcgacaaa

SEQ ID NO: 188570 - DNA, 9105 bp, Cannabis indica
ttatttctatctattttggtattggaaattttttttagtttaatatgtttttttatggtcgtgtgcattataattatttaagacatcttgcaaaattttgagaaatcaaaaaaatttaacacgctagaaacaaggttcaaattgtctattgcatgcgtgaatatcattgtaattgtttacatttattagtgaaaaagttactaaattgtgacttacataatttaaggtaaatatcattttggacttcatactttacaatacacgacttatatgccgtgccattgtagaaacgacattgatctcttttttaattatttatattattatttatatttataaaattaatattttatttatgaaattataaatttaatttaagaaatttttaaaatgcatttttttaagtgtactggtttatttctatctattttggtattcgagagatttttttagtttaattttttttatggtcgtgtgcattataattacttaaaacatcttgtaaaattttgagaaattaaaaaaaaaattaacactgtagaaacaaggttcaaattgtctattgcatgtgtgaatcttttgctaaacatagaaaaattaaagataagaaaactcacattaaactccgaaatgtattaattgaacacttgtgggacggtaactcacaaaattaatataatttaattaatctttttaaatttgtattttaggtttgaattaatttaatgtaacttctttcgtcatgaatgtgatgtttttctatagtaatataatattggctgattctagaatgcacatccttaaaatggatgtactgatgcacccttaacttgtttcggtatctagaataattttttagtctattttttttttatattcatgtacgttatatctatttaagatatcctacaaaattttaaaaaatttggaataatttacaatatagaaaacaatgttcaaacagtctattttacacaagtataaaataaaatagtcacgcgtgcaacatgctgtttgaacgtagttttcagcgtgttaaactttttgaatttcttaaaattttgcaggatgtcttaaataactataacgtacatgactatgagaaaaaatttgaccaaaaaattatttcagatgctaaaacagataggggtgcatcaatatatccattttaagggggtgcattgtagaattttcctataattgtatatatgttattacaaacaatatgatatttcaatttatcgagttttatcgattttacagtattattatttttaaactaattatgaagtttatttaaattattatttaaatataacaattgtagtgattttagttaattaataagaatattttttaattaataaactcctgattaattcaaaaaaataagaatattttttaataattttgggtgttggagttgaaatagaaataattttttaaactaaatttattaatagtgtgaataataaaaaaaaaaaaaagacattgaacctataaaattatgaaataattcttatgttatttgatttgatttcatatatcatatgataaaacaattattatgtacaacaaaacatatagattaggttcataggccttgaaataatatatgtacaattaatatatgtcttaaatcctaattttaaaattggtaaaaaataaattgggttgaaaaatgaaaaatgctttcattgagagttgaactcaagacctcccgcttactaaacgggtgctctaaccaactgagctatgaaagcttgttgatattattcactttccttccttagataaattatggctattaatggtgtcactgattaatggaggtattgtggaatttctataaacctcgccggattcgaagtttgaggtctcgtttctcgacatttgccactcccgatttgttccgaaaactgaaacaggtaatatacaatttctattgcttgattttgctattccattattaattttcgttttgggttttctgattgtgctaaaatattatctctctttatttgatttcgtatgttgtgctttgtaatttggtattgatgtttgtgtttgtttatataagttggaagaaatgcctcaatcacttttcatgtatgtatttaatttatgctgaaatttcgaattatttctttcttttctttgttggatctgggtttgtggctgagatgtttatgattaattattgtgaaatgaaaagtcccctgctttaggtatcaaaatgaatcattgtgtcatctgtctgttaaatctgcttttgattttggttttggcatttagtttaatttctttcaagtatagcaaacacttttcgttattaaaaggttggttggataattaagaacagtatgtggaggcacacatggatgggtgtaaaatcatgatgatgctacaaaacaagtatttagtagctagttgtttattgaattgtcttcaagttccagtttggtgttgtgtcattatcttcaccaactttttaaacaaaccttaacctagtctaaatttgtgttaagatataaatgtagactgctatcatacaagagccattgttttctatttgcttttttttgttgttttgagaaaactctacaagacaatttaattcaatgctgaaagtttgaagcctgatctcctgttgattcattttttatattgtgctctgttggttcttatattgttaaaagcttctcttttttggttctcatgttggagatgattacaaattagctcatagtagacataaaatgttatgcagaatcagaaaaggaatgaaaataagagtaggaaagaagataggcaaatggaagtcactgctgaatttagcttagcgatttagaaaatcctgtttcaagtagagaacttatgcccagattggtttgtgaagtttttactttttattatttactctacaaggtctgtggaatttactggctatagtcaatattctgttgtgggcaggcgtagacatgtaatttgttcccacaagatttgaaattcgagtttttcctgcacctacattgcacacccacaacaattgatatagctctttaaatattgtagggttaggcagtgtaacctagttttagaaatcaatatcttttctcatgctgcaactctagtcaggttgcacgtaggtcctgccgtctttgtattgtagcctcttcggggacttgcattttcgaattttatgtgataatggtcatgtttacaaatgtgagatattcttactacaaaataaggccgaagtttccttttgctctttactttcatttgtatacttacatgattatgaaagaagttttgtgagcccctatttatggtgaaattggcagaagatgattcactttttttattcttcgtaaatctttttctattaatttctttgtatgtgtccaatgtggctggcagcctggtactcagtaccttattctcattgtacatagcaatttgattgtgattgtgttggtctattgcctcctgttgttgtgaggttgtgagtgagaaaaagtgccttatatgtttatgaagataataatgtcaaatttagtgttgagttttaggtggttttactctgtaagtcatgtttattggttgaattatattggtctttatgtacttaatgaagaaagtaaaatcaaagccgtctgttgtttcttctgcagattcattgaaatggctggacacaaggttgctcatgccgtcctgaaaggacctagtgttgtcaaggagttatgcattggatcggttcttgctttggcagcaggtagcctctggaaaatgcatcactggaatgagcagagaaaagtgaggactttttatgacttgctcgagaagggtgagatcggtgttgtggtgcaggaagagtaaatgttagctgtttctctcttatgattttcttatctgactgtttgtaatcattttaccctttcttgcatttggctcttgaaccttgctatgagcttagatgttggattttttggagaataaattttccatgttcaattgtggataaattgatgtattattacatcttatacaaattggtgaatttactttgctttgcttccttgtggtttcttgggaggattgcttgaactgcaaatttatgtgctctttagttttctgcaggagaaaacaatcattagaacatagattaataataaagtttagttgtttgttttggctttccttaacattttttttttaaaaaaaataaataaatttctaaggcataagatcaatccagagaattaaattaaattctagttttggcataagcatttatccatgaattgcatctagagaatattaaaagaaattctcttcaattgtgtatcggttcattttttcatccatttcttaaagtgaaaaaagggtgtttttcaaatccttgtttatttggcccttgaaaaaatgctgtaattcccttaagaaactttcattattctaaaccaagctttatcaatggtatgcatgttatatccagtacaagatccattttacttatgtgaagagaaaatgaccttttgaatagtcaaaatgagcactatacaaatggctctctttcccaatgagctttattaaaaggaaaaaactatacacatgtagcaggccctttcccacggtagcaagtctgaaaaggttatcttgctacgatcggtcctgtaaaaatttggggacgagcgagcttttgatttgtaaccctgcataccgataaatttagtcattcggctactggtccttctaagcttcattcatgaaattcgggagaagtcttatctaaagtctctcgtcgggggaggaagagagtgtctgttcgttgttgctttaaacgttgaataacataaggcttgaagtaaatcccattcgaatggttaaaagtcagatcagaactgaaaccatccctactaaatgagggacattagaagcagtgaacatcacaagaattccaaaacgcattaaacgctttattcagaaaatgttgaacaagcattcgaatctttttagcaggccaaactccattttgtcttaggataacctttcagcttgtgttttgggagagaaatcatatcccgttcctcaatttcctgtaaaagaccaaactgttctcaattaaaaatccatagctgtgttggatgtttcgaacaaagaaaataaaaaggtcgtgagttctataacaggcatttgtgaaaagtgaaaaccgagaactaatgaaggataccttgtatctgtgctgctgctgcagttcaattcagtctgccaaagatgccttttctgaaaaataagacagcacaacagtgattctaatagctctccttgtattttttttccaaacttcttagtgagttttctagtgaccattatgtaatattatcataaagttttggtattgaatttgtagtatatcaataagtttattacagatgaaaatgaacacataaagtagaacaaaaggatattgtcttttgaatcttttattcttttctaacttttaataagaattctattaacatgcatgtttatgccttaaaagaacattgttctaatctaaacttatcatataatacacattagaaagaaaggaaaaaaagaagagtaagactctactacattgcttcctcggtcaaataacaaggtcgaaaggcttaccatttatttatcttcatcattcttatatagaagatttggtcttgtttcaatctgtgccttttgttgaaccaatttcaaagatgggtttttttattttttttacttgacaagaaagatgagtttgatgatttcttggctcgtgcaaataaaaaaatgagaattttaatggtgggacttgatgcagcaggaaaaacagccatcttattcttatacaagcttacaacttggaaaggttgtcacttttctttttccttgaaaaagagacaaaggccaaacttgacctcctcccaaatttataaataaaatgcaaataatacataaagtgcaagaaaggttgttactgaatgttactaaagtgcaaatattacataaataatattttatgctaaagaactctcaagcttaactatggctgctatcaagccttttcacactatatttacctatgttttttttattgtttctgttttctgacaaagctaatgtgtttaactagatacaaagggttagattcctgctgttttagaggccaaaaaaacaatagaaacttcaagaatacgaatacttaaaactttcaaactcataaaacctgttatttactaaaatcctctgaattttcactttggaaatcgactcaaacaaacaaattttcataacacatatcagtatatggatataaaacaacagtaaccaactcagagagagagagagagagaattaaattaaatatatatagattgtagctatgattaattatttaactgtatctagtggttcttttttggggaggaagctatatcatggacttcattgaatatcatggaacatacaatgaaaagtataccacaatagtcacaatagctcaaactaagtgccaagaatgatctttcaataatcatgaattctttatagaagttaactgatctaatggtgtggtagggacgtacctcaaagaatctttacgaagaaacgtctaggtacaaatttgtttggccaaccactagtttcgggttccatagaaattaaactgattttccccctcttcggaagcaaaatcgtttccctggtcctctcaaaccgattctccccctctcctgaagcaaaatcattttccttggatgtctcattttcttcctttctctctttacagaataaataaataaatgtatttcaaaaactaatttaatattgaacagaaacacataaaaagaacacttgaagcaaccaatatcactgtatgcccggtttctttactaatccgtacatccaccaaccaataagatgtaagtaaaacagccccaccggtgggaactttttacacagccccgccaaagaaattccccaagaacaattgaacttaatagaggttatcagtcatcatccatcataacatagtccaattgacctggtaaggaaggatccgaattttgtattccaatgtcacataatttgacctttcggccatatgcactcaatagcagcattcagatgagtagtgtacatgctggaacatgtaattaggcacattttattaatgcagtttcagcagtagtgcttactactactttgtgtcttggtacaattatattagcccaaaactacttgagtttgaaacaaaattcctctccatggtaccactgactaacaactcgttcccaccaagacagctcttcataataaataaatttgtatcttctaggccctagaatggtagcatgtcttaggacctcatacccaagtcattattgtacatccgagccaatcgcactttggactgaagcttttttgcttcatttgtaagccccgtactacgtaggccatcaagaacagcccgttgagcggacttgagtattctcatgccacttcttacacaagataacaagagcttagatgcactctgatatcttcttgccctgcaaagattgcacactaagatggtataggtaaacgaatccttgatctccattgtctcaaacaccctcaatgcacgatcaatctgaccggatttacacattccatcaagcaagcagttgaaagcaaccaaatttatagtaaatcccatcatgtccatataatgtaagtgtcttaaggcaccatcaatattaccagccttgcacaatccattaattataattgtgtgtgtgtactgatcgcattcaaaaccacctttctctacctcatccaatagcttaaaggctgcttccatttcaccttctttacaataccagttaatcaatgtgttgtatgacactagatcaagttcaatgccatgtgctaacatctcttccatgtaaaaatttgcctcatccatcctgccagttttaactaaagccccaataactgtgcaatatgaaaagccatcaaaggtgtaacctttgctcctcattatcgacatgatctcaagcccttcttcatacttcctcgacctaaaacaacttttcataactgtagtgtaggtgatggcatttggctctaaacaagattctccaagctcctggagcattttcctcgctgccctcaatctgccacgcttgcaaagtccattgataataatattatacgtcactatctgagggataaatccctgacgctgtaaattcctaaataacataatggcattgttgatataaccatttttacaaagaccatgaagcatgatattgaatgtagttgagcagggagaaaaatcactgagtatgatatcccgaaaaatattattggcttcatcaggtttccctaaacaaaagaaacaatgcatcagtgtattgtaactccataaatccggagtaatgttcgcttcaatcatttcatcaaacagatctagaacttgtgataataagcgccgcctggtggccccggcaatcaaagaattgtaagtaacaacatctgcctttatcccagcttctttcattctttcaagaatagaataagctacatccagtccaacaaaccgacaatatgcatcaaccaatgtattgtaagtgatcacactgggaagtatgcctaatcttataccatcaacaataactgcttcagcttttgccaagtttcgggctttacaacatgaggctacacaaatattcattaacctagttgataaccttccaaccattataagtatgagctacaatggcttccaagaagcatgaacctgcatcacatcaaattccattctctttatataatatactcatagacttaatatatatgctacctccattgcatttacaccaaattcacaaatacaataacacctaattgttcaaagctgttgtttgtaatatttatgaccatgtataatgggaaagaaaaatgtagggaaataacaagtggaaaatcaagaaaaataaattttagtgtttggtatcaaagaaaaattgcatagagaaatacttaattcaacaaaattttcagtaccaaacatcagaaattaattttttt

SEQ ID NO: 188571 - DNA, 728 bp, Cannabis indica
tttttttgctataacagaaaaaagccctaaaaaaatgcatcatacattaatttttgaagggtgatgcaccatatataaaatcatcctaccatatatttgttctactaaaacaatgaacaatttaactaaataagtacaagtacaatatgaattatattggattctgattgagatattgtaatttgacagaattttctatttaatttgaattctgtttatatgtaggtgtatgtatgtatataattagttcatgtgttgaatgtattgatttataaatttctgtttgtggtgttgaattgaaaatgaattttgtgatgatatgattcgtattacataaattatgaggggaaagataaaaaccgagaaaactgccaaattgatccacaaaaagacacctgccaattttaaatactcactgtaatgctgatgcagtcagtttaccaaaaagcaagcatctttgcacacacagaattattatttcattgactagtttacccttgagtgtgactttacatcctcaccggcacctttataaaagctgtgtctgatttaatataaaatctgagtatctggacattcacgactagaagggcatttccgtcatttcagatcgaaggaatagatcgcaattagtctaaaaaaaatataaagccaaataataatatgcgtctgaaaatggagggcaatgtatatcatgtatagtactgttttttatatatatatatata

SEQ ID NO: 188572 - DNA, 4440 bp, Cannabis indica
gcctcataggaacttagatctaaaattttttattcagccttctatattgacattcaagctcagaaaatacaaggaattagaagatagaaggggaaattcaaggatcccttatgcatccctaagaattctaatgagttccaaatgttacacaataattgcgcaccctctccattgaatcccatctactgcccaagccatacaatctgacccatttaccctctttatttattatcctaacacctaacaacgcctaaactccttgggtccaacagccaactgtccatgctaacaaaccagtcctaacatattgtttttcacaataacaagatttgaagtaaggatctacaaattgcaccttgacatgccatttcatccaaatccaacttaaataaaatcacatctcctaaatatttaacttgataagatgtggaataccactggctgtaatttaataatacaaaagaatattttcctcacccatcaatcaccattaatgacaaatgagtggcaaagtgagaggtgtaactaaaccaccttctttatcgtacatgtacatgtgcaatttcaaaattaagtaatttcatagtataagctagaggtcacattttgtattattcaataacatcaggggattttatgattctcatttgaaaaggcttgaaattgttaacctttccaaacaaataaatacaaataaattcccgtagcatttagaataagtcttttagcactgcaattgcatgctttagtttgaaagataattgtgtgaaagagcatgaataaactaattgagcaaaattaacgttaaaagatggcaagtaaatcttttcatagttctgtcagtttaacagcttataccttaatcagcaagctcaagtaacattatctaagaatgttataatgtaagctatttcaaataagagatggtcttaaatgtaagagctagagggcacacagtaccttaatagcagtaatttgctcaggtgttggtgcaacttgtttctgtgatacatcttcctctgcagtttctgtatcagtaggagtctcccccggtgtgaaggtcttcgcagattccttctgagcttcttcttcaacttctttggaagaaaacaggtttttagcttccagtctctcctgataaagcaagtagaggatatcaggcacacattatattattggggtttggttaaagggagaaaagaaaaaacactaccttagctttaactttcttaaaatcaagaacccgaagagtctttagtttgtggatgacatagagcctataattaggttttttggtgatgttattgtccaagaggctaagaaactgtaagttagggagggaggcaagagggtcaatctctaccaagttgataagcctgttgtttgtaagaactaatgtgtgtagcttcggcaagaactctgcaattcgtaacattaaaaaaccaaaatttaatgaatccaattcagttccaaaagagagttttattgatcacagacaaaacctgagctgactcagtgacttgactagacttacttacctccaatgttagggttgatacgagtaattctgttgttgtttatgagcaaagtacccaatcgtttaagatagggaaagttttcaagttttacaatctcattgtcagacagatcgatagtgtcaaattggtcctgagaaatgaaatgaaatgaaattcaacaaagaggaaaactagtgaagtaatattatctaaaactgaaatacctctgtagctcccaagttctccattacagctatcttgttacctaaatcaaacaaaacgacgagtaaggcaaagactctagattgaaaagtagggctacaaaaaatatacatacctcgaagatccaactctcgctccttaacggcattgaagaaatgaggactcttccaaactaaatcggctgtgagcctcaccatcttcttcttcttcttctttctgcggtttagggtttaagagatgggacagtgatactgggttgggtcaagaaaggagaagaaagcacctgcctaacttaactcgcgccgatataactatactaaaaaacgacatgtcgtttgtaacttaaaacaagtcaataaaattacatatcgtaagttttatgaaccgttggatggtgtatcaacggtgtaggttacacggaatgacgtgtatcatttcattaaacaatatactattttaagaagaggatagtgaaagaaggggggaaggaaaggactgatctttagcttcagtttactcatccatggcgaatctacacttactagtagtgatgttgatggtcttggccatgaccagcgcagaccgcctcaatgaatcatcttctatgtctttgacgatagaggaggagaaagcggatgacatcgatggaggtttctcttcgcttgacggaatgttgcagtgggcaattggtctctctttttcactttctctttctcttggtaataacgtttatcagctcaaactcgaattttaattcgtttgattgttcaggccattctgatcctgcgaaattggaagaatcagccaaagacgtgcagcaattaccccaagatgagataaagaagcgtcaatcagaactaaaggaattaatacaaaatctacacatgccgtccgatgccgagcttatgaaaattgcaataaacgacttgagtaattcatctttgtcactggaagatcgtcatcgtgcattacaggagctccttgtacttgttgagccaattcataatgcaaatggtaccattttattcactcttttctcattttctaattatgaattatacttaatattattattattgttcttgttcgctagatttaagcaaaattggaggccttgctgtggttatacaagagctcaaccatgttgattcggatactaggactcttgctgcttggatacttgggaaatcaagtcaaaataatcctgaagttcagagcaaggcatgccctttttcctttttagtaatgcgtggaatgtcaatgacacaagatttaaatataaaaataggttttgagttgaataattgtgatcaggtgctggaactcggggcattgtccaagctgatgaagatggtgaaatctgatggtgtagaagaagccaacaaaggactctatgctgtttcggctttaattcgaaacaatttagttggtcaagaattgttctttgcggaagctggtgtgcagctattgcaggtgagcagcctcattaaataaaccaatcattgttatttttcaagcaatgtatgtaatgtaatgtaatgacaatgcaatatattttaggacatactgagcaactcaaccactgatattcgattgcaaaagaaggctgtctttcttgtgggtgatcttgcggttgctgcggatttggaggttgaaaaacatggttcttttttcaggaatggcattctgttgaagtctgttgttgatctaacagcttcttctgaccttgatctaaaggaaaaggtgatgttttatttatttattttattttttgtatttagtatttattcattgtgtggtgtgtgatgctaatgaacaagtaatgggttggaataatgcatacaggcccttttggcaatcaaaagtgtattgcaattgaaagggaagacaagtgaggctgctgctggggttttgaatgatgcatgtgcctttgatgctgcattggagagaatgaggcaacagctacgggagttgttgacaacatatactgatgatgatgaatttcaaagggattatgcaatcgatttggaagccttactcaatgaggttcagctcatctttcacacaaagctccccaactcaaagctcataagcaaagatataccattccaattggcaatttccactcaccgatacattgtccactaatttgttattttcttttttcctttttcttttccttgggctgtcaaaatgccaatgctctatcattattgcatgtaagctaaattttgaccagatacatagtttagagatatggatagagatagctaataacatattaatgaaaatccaagaaattacatggctatgaattcgatctttggctgctttctttgaaattattatataataaatcctttatatgttattcttgattttgggaaaggcatcaacccctatacctaccaatcagtcaaagtcaaaaaagacaaaggtagaatattgggctgagcgggtaatcggttacttgggctgggctgaaattcacaaccattgattataatttacgaacgtggaactaggaattaggagggggtaggtgggagtgcaacaggggtgtactgctatttattatttatatcattttcatttatataaacctttaattttatgctcgaaaaaaaaaagaactaacattattttccaaaaataaaaaagaactaatattgtgaaagaaaaaaaatagtaaatattaata

SEQ ID NO: 188573 - DNA, 4251 bp, Cannabis indica
ttatattattattttcttttgaagcatttattttcaagtaaaaagcgcatcagccaaaactgaaaacgacataaatatatttccctccaaaaacctacacacgtcagttgatttccctccatttccgaaaaaccctaaccctcaatttcttctctctcatttgaaatcctccattggtgttcttaggtatttgtttaaatctaataagaaattcttcaatcttctaatgtaattgtattatgattcttaattccttatttgattttgatttatttgttttcgcatctcgtcaaagatgtgtgcggtaatgagctctcttgggggcgacaatggcggtaataatcctacaaaaatgaactcacttgttgatgacgactccgatagcgaaacccagagctttgatagccatagtacgaacccagcatgtttcggtaacttttacttaattaagtgtataaatatatattagattctgattatgctctatagcaaataagaatgcttttttttttttgcattctgatggattaaaaaaaaacgatttggaactgtattacagttacaagtgctttagtatgatctttttgccattctgatggattttttttttcctgatatttaatcgtgagtattagatcacatatgagaagtgctttttctattttcccttcaaatactaacgagtttttttttttttttttgactaaatttgtttgtatatggttctacttgtaattgcaaaataggtggagaagttaaagttggtgatagcgttgcaggttgagccattacaagatactatgcttcttgataatttttggacgtttgaagatgcattcgatacccaagtagtgatctgctgatgaaacccaagtcatggattttggcggagagactcaagacgtgaatctatgcggtgaaactacaagacgtgaatctatgcggtgaaactcaagacgtgaatgtgtgcggtagaaactcaagctttggatgatgtcaattacggggagtgtatggatacccaattattagatgtgtttgatgatacggatgtaagaagagcgatggtgaagaaaccgacggtactgaagttttgggtgatgatgatgatttatccaatgatgtattcgaaagagaaaatggcgctagatcagtggataagggaaagggtcaatgttcttctgtaagcaattacagcgagaaagaaccaatagagcaacccaaagcttcatgcaatgaacataacaattcaggtttagttttttttttatacctactggacaatattataatttggagtgatttttcattttcatgatgatttaagcatataccaagaagctgaagtcttgtttttcaaagtgacattacttatattattatttctcattacttgtatgctactaggcgttggcatttgagtagaacaggaaaaaattatgctaggttgtgttatatactaagtagcatttttgaattacagcaaagaatatgtagttaaaacttttgcaaagtgaagtaatcattagtctttagtaggttctttaagttaacattttgatctgtgctaagttattttataaatcaacttcatttaccttttatgactacatttctggaatggtatttctgttaaatagttgttttgatctcatctcaatttgttttctggtgtccctttcattctcagggtctcagtctatgcaatttacctcagttggtgcagcatctttgcgggcctctggaatggctgctcgcaattctttaaagggtccccacagtttcttgctcaaatattgatccatcctcgaagaaggatgttcgtgataatgcaattttaacaatggaatctggaaaggatggttgtcaggaggaagatcttgaaagcagtgtaatggtaaatggatcaagcatgcccagagttggtaatttgacagcaagaaaactttttatggagaatgtagattatgaaaatgagaatcttccttatgatacgagtagggcggacggagaaaatttgatacagatgtcagcttgtgatcaggcaggtttgagctatgttgagtctcaggaacctggagaactatcacaagccaatgctcttaattttgtggatagatttcttaaagagaatactgaagagtttgataaagaagtttaccatggaaatagtactgggggaaaatcaaaacttgtttcaagtgtaaaaggtccacaaatgttggcgaagaaagttaactttaaaagcatgattggtgaatttaacatttatgattgggatgataatcgtgaagatgaaggagggggtgacattctccgccgaagaaaggaagatttctttggtggtggaaggctgggaaggaggccgtcaaaatctggagttatcagatcagaagagcagaaggattctaaaaaattgttgaatggcaataataaaaagatggatgggtttaattctgattcgaaattaatcacacaatcttaattccaatgataagttgttgtttgattctgaaaggacctttaaaaggaatctcatcaatgagttggatgaacaatccgatcttggctttaaggatgaaaaggtggaaaataatgctactaagacatatgtgccagatatgtttgatgtgggtgttgatactcaaatggccgccgaagccatggaagccttattttgtggtgaggacaatgcaaagtttgatattaatgatgattgtcaaggtgtcaaaaatgatatcagtcacaaagctcagagacggtcgtcaagaaaaagatcttgtgtcattgatgcagggtttgctacaaagcagtcgaagaaaactaagagtattggcgctgacataaatgatgtgtcattactttcacgtgccaagcagtctaagaatgtgagaaaacagagcagggcagacccaggtataaaaaaatcagagagagccaaagaaaatgaagaacaccttaacaataacgaaagcggaaccttcaagaatataccttgcgaaagtacttggaataggaaggaagaatgttcaaatattcaagaaaaggttataactcccattgcacgtcgaactagacgttcaatgggagcaagtaatcatgaaaacactgagaaagagtcctttgagagaagagggaagatgaaggttgttgctgccaatgagaaaagtaataaagcgggaggcttccagacttctaaagggttgagttcaagagatgctcagtgcagtaaaaatgaaagtagcaaacgaaacctacatgaaaaatttgcagatatgacatcttttgccaatggcaacatgaatggtgcattaagctttcccaaagcaagaagatctagtagaattttgtcgcgccagagtaataacattgataatgttgatgatctatctgtgccatcggtacagccagaagtcttacagagtagcaatgggagtgggcacacaacacttaatgaatttgcaaatgtagcagctattaataatagcagcaacaagattggtacattaagttttcccaaagcgagaagatctgttcgaatctcttcccgtcaggttaataactctgataatgttgctgatgcgcctgtgccatctgctcagccagaagtcactgggagtgggcatacaaggtcatgcagacaaacgcgatcatcgttatgtgatcatccagttacgtcttctgtagagcatcatttggaaggaaaatttccggaggaaataaaagatggaatgttttccagaaaagccgaaagtggggaaagaggtgccaggttggctgaaacaccaggggagaaatctaaaccatctgactcatcatgtactactccaattaactgtaagatacctatcagtgatgtgtcacccatctgtataggtaatgaatacgttgacaaatcaagtaagagaagcttctcaacatcattttttttgaaagaaatccgcagtttaagtgatgccggacctcaagctactagtgtgtcaaaagtgctacgaaaaaggagagaagtaacggatattcgagtcctatacagtcatcacttggatgatgatataattaaacatcaaaagaaggtaattgttttctcattcatcaatttaagttagcaatatgcaaatgaatttgagcaatatctgttttgcatgtctatcagatattagcccgtcttggagtgtccatagcatcctctattacagatgcaacacacttcattgccgatcagtttgcgcgcacaaggaatatgttagaggc

SEQ ID NO: 188574 - DNA, 5180 bp, Cannabis indica
cttttctttcaagaataataataataattaattaatctattatcttacttaattttctttctttttttttgtttttttttttttatttttgtcttattttatatgagttgttcttgaaatttttaaatctaacttgacatatctctggatccctactttcattgaaaaaatgaggattaagtaaagactaaaaacaaaaacaaaagacatttcgatttttcaactgatctttcatcgttgttgataaaaactttgtgaacatttcaatatccattattcgtctctaaataaattggatatttataccaactaacaatgaattacaattttcatctctcttttgatttttgaaataaatattttaattgatatctgctaatcatatatataaccattaataccatactaagaaaattttaattattcttataataagcaccaaatgactgttatatagataataatgacaaggcatcactcaattaaatgagtaattaatcaccttattaataggtttttatataatattaattaattatatatatatatatttttatacacaagatttcattaattatcatcctgggcttttttaatttaagagggacataaatataaatattcgatgatgcagattaaaatattttgaatgttataaatgcagtttcgattgaagttaaaagtacaaatattctttcacaatcgaacccatttgattattttgggttaataaattcaagcttgaatgatgataaagtataggaagtcattataacgttgagaattcaagcaagaactgggaaaaaattaacacagattacaactctagctagggcatttaattcattcatgcatataacaattaatcatcttaaaatgccacgtcaatacttgaattaattggtttgacatggtatcaatttcactctcataataataataataactttacacaagaatatagcaaccaatccttttcttatataaatatatatatgttattatatatatgttgttggcatattttcaatagaaggaaaaatataatatacattgggaaatatacggactctcccaccttttctttttctttaccttcttcttaaccatattatagtaaaggaaataatttccaaccaatctaagctagctagcttcttaaccatattttgcaactttgttagcaacaaatatttttacctgatagagctccaaaaattgcacattcttcttgttcttcagcctacaaaatcatgcaaaagttgccctcccatcacatgatgatgatctctaccgaaatgtcgattttgagcttcgaaagcacccattacgtatccctcgttgtttccctcaaggccaagaccaaatctttgagctgcgtttataggaaagggctcggataaaccaatggttccgccattattttggtgaagtccaagtgttaaggaaactccgttgctcccaataccggacatgttcatggcggtggcagcaacgccaacttgatggtggtgatgatggtgattatgaagatgagtaggcaagttgtcgtaagacatgttcatctcttcacttactccacctgcagtactatccatgacgtttggtacatcgcttctagaacgcttcaacgtagtgtcgtgaaccctatgcattgaggtggatggattttcagacgctagattgttcgctgatgaagctacatgttcttgtgcgttcggcctcattgtgtttcgatcttctctgtgtgaagctttctgagcttggcgtgtttctagcatgtgtatttcctccaccattggcttccatagcctcactcgagcattgataaaccaatttgaaacctgtggatttcacattgaaattttgtttgagaaaacatcactaaatatccaatgttaaataaaacacaatattctaatttgagattagttatggtaagcagacctggcttcttgatagaccagtttgtttagccaacattaacttgtccgtatccgtaggataactgtacacatcagccaacaatggacacaataaggattcttaagctttgacatccttgaaatactccattattaaacataaaattaatctattccaaaattttacttacgggtgaaggaaatgctcgaataaccaagcgcgaagaacagtaacagcacgctcgggaagccctctttggggtcgccacacgggttggtggtcgaggaatcctgagccttgaatcggtctttggctataaagattacctctattgctgtttcgaaaagtaggaacttcttctttgccatgatgattggtgtgacagttatccttgttggagaactgaagttgatccataattgcacttttcaagcacttgaaatgcttggtcatggctttcactgccaaattggcgtaaggagcagcgttgccaagcccggccacatactcgaacgatgttaccactgtctgcatctgttgatagtattgtttgtacctcctgtagacctaaatcaaatagataaaacatctttcaatcagcaagatgacaatcctagctattttcgccattagtgttactttgttagcaaagaaggcttcaaaaccccaattccatagtttaatccttttggctgttattatgaccaattcatataagaataatttaatacaaaaattaacattagaataaagggtgtggtaaacacattttaccaagagactccatactatgcataattaaacaatataaatgctgatttattacaagacaagttcacaacaaatacaatacatattaatcaatcaaccaagctagtgatatgagaaaattaaaaatagcaaagagagaaacatagatattctattctttaaatatatagtatattctcatcagcttctcaagtgattcattaacatatattgagttgggattaatgctagaagcttatatacattacaatctttaccataaatttatctcgtgaccatgaaaataaaaccccttcaaaactcaaacaactttacaataatgaccatgcatccatatatatatatagccttctcagtcaccccaaaaagcaatttctaggtacatacaatacataaattgtctacaaattaattattgaatacaaaactgtactctacatgataaacacactacactaaaagagaaaatcatatatagtgaagagctagttaatcttagatacatcccatataagaaagagaagatatagatatatgtgtgttatatgtatggccaaacaaatagggctatcatcatcatattatactttggaatccaattatgcttttctacactattttttggagtataaaccttttttcaaatggattacttttatgaagcacatatctattatctacacccgagaactacttattggacttgttactaatcacttatatagaactaattctagggtatgtcagaacacttttataacgcctatatctcactgcatatattcccccctcttatcaccttttccaaaaagatgtatttttgcgttcaccaacgccaatcttattatatacttctatataatatatatgtgtatgtatgtatgcctttaaaacaaagaatctaatgcacaaaagagcacagtcgtttgatttgaacagcttataaataatccaagaattagtactgtgcatacatatcactaatgaccacacaactcaaagaaaatcttctggctctatcttttataatacatagtcaggaataataataattatatatatattatacatgtaaacattaatcattattattattttttttattattattataatataccacgatgatcaacatactcagctgctacagtgacaaaattcctgggtttcataaaaaacccatctccaagaaagatctataggtagtagcccggacattaatcacatcgaacaactaaattatcaaaatgtataaccaattaaaataaatgacactgcaattagaccaaacgtaacccattattatatttcatcacggaataacccccccaaaaaaaaaactgaaatcatatatatgtacctcatcaagcatagaaataagcctggacttctttttccgactactctcgccaccatcggaaacaccactactaagctcaacatcatcaacattaactcctccactgccggagctcaacccctctaccggactctccataagagtaggatctgcggcaagttcatcaccgtaaacaaccctacttcctcctccgacgttacaaaactcttcaagtaactgctgtgccggctttaaaaaaccttgatcccttcagaatcgaagagtagcccgtaaatgggccaagaggaacggagctcctagacccgactccgtcgtcagcaaccgacccaccaccacaacggccagcgtgacagtattagcattattattagtcgtagaccctccacctcctcctcctccgtaaaacgctgacccgaatctctgtaggttgagttccagaggaagctggtggtggttgttattattggtattgttttgaatccgggtcgggtcgtggtgagaagaaagggagagggaaagcggttcgggtttaaaaacggcattgttgttgaaaccctgttggttttcgaaatctctgaagctttggagtgcttgggaagagaagagaaaagggttagtgttgatatcttggatagaggtcatcggatccataaacggatttcgagaaccggaagaagaagacccgttgaccaaacccattaagttgaccacgccttcttctttagtacaagataggaaatcggaggaggtaggatcgtatgaagtggctaacgggagcaagccaccaccggagccgtgaaagtttgcggtagcagcgtcgatgcaagccgaagccgggtttgtagaggagtgagttgctacgactctgagcttgtctcttcggctttgttgtgggacatggtatggctcgaaaccctccgccataactagatcagaatatatcaaatatagcttcttttttttttttctctttctctctctctctcttccttaaaaaaaaaaataataatttaagagagagaaagagagattggggtttaggtgtttggttttggtttgggtgtatgacgatgacgatgatggtggcgtaggttaacagataaaagtagtgtgtacgtgaata

SEQ ID NO: 188575 - DNA, 1725 bp, Cannabis indica
gtatgtatgtagctacacttctgtacacagtccatatgttttttgggattgagacttgagaaaggctgatgatcctaatgcataataatgcagtggggtttttggaggcagcagctattttttaagctgacccgtttgtgcaaaaaaagtctggtttaaagtgaaaaataagaagaaaaaagaaaaaagtagataattattgatgtcatggtccatttagcgtcgatgtttgtcaacagcagcagtgcttatctgaagacctttacaatattaactaagtaattagctttaacaataatcaaggctgaaaaaacaagaccattatcaggtttttctacttgacaaagcagtgctttgtcgttaaaatccacatatttataatttatctttaaactacacgataaagcaatgctttttgttggaaggaaaatttttagtgatcgatttttatcttgtttcttttccctttagtactgcaggaagatgtttttgtaggtttgcacagtcgccatctttcatttttcacttcttggttaggtttaatttggcaaaacaaatccaaaaacgacaaaacacatgtttcatcgaagaaaatgaaactaatgttaggtataaaacagaaagacatcaaatgtgccatattattcaccacaggttttatggatcactgcctttttaacatgatttaatagaaaaggacgagagagctcactataattattaagacaagaacatattgttacaagcaagatggttccctgccgtcgagagtgaaccgtgtatcagtcgtgctacttcattaaatggtgtcaaataatctgtaagaaggaaggggaatggagaggacagtagtgcaatgcacctaattctgtaccatgccaccgaaaggaaccaccacaacacgctcgtttctgggctagctgctctttttgtttgttttttaacccaattcccctgatgcagaatgcttcaattgaaaacattaacatttataatctgaaaccgctgaattatacaacatacaatcgcgttcaagattctggagtctttcgagcatatgccagcaccatcacaaagtccttcgctgaggacccgatggttgctggaattctttctgatgttgatgttgtttgcagccacaaatcaactaaattatacaactgcaaagtggggaccactggttgtcccatacattttatctcaacctgcaagtaaacatggtacaaaactctgtttagaggcaaacagcaaagtagactagtgggggaaaaacttgaagtttcaaaactattgtcccacatgacaatatcacaatctaaagtgaaaaagcagcttaagctcttcataattttttctctttcttttttcagctagaatagaaatatggtaaactttagttcagattgagtttgttcaatatttaatcttcttatgatattcaagaaagcattgactcacctcagcttcattagttaaagctagtttcatcatcaggtacttctggataaacgaaacaggtagatttccatccctgctcagaaaatatttatatcacatcagataacgggtaaattttcatttaatcgatggcgaaaaaaaaaaaaaacaattcctctgaagtaagcatgcatgtctttattccttatcatttcatatatcgcttcactgcaattgcattatatccagatgacacatgctttatatgatatttcataggaaaacttg

SEQ ID NO: 188576 - DNA, 3190 bp, Cannabis indica
ctaaaaaaataaaagtaaaataaaaatatagatatgatattgtgtaacatgccaagagtggagagcataaaacagtgcttaagatctgtgggttcccctattcattagtcaaaagtaagacttattggattataatccaatctcagcaatctgattcttccattccttcttaagggacaaaaagaagaaaactaatcaaaggttgttcactattttatttattttaaatatatattttcttttttatttattttcttattttttttttgtttttttttttttttttttttaaaaaaaagttttgatcactagtgaatggtgattttggtacctaattaatagagatctcaattctctcctcctccctataaggacatattcctcaatgtcagtgctctatcgaccaatactttacatacctatttttcatttatatatatttagagaacaattacactaaaatcagtccctatcactactagggacattaatattttttatatttgaaaacttaattatatgaaagtctacatgattagttatagtatacatgttttaagttgttaaaaataattaaataatttacaatattaaacagaatttaaaatatatattgtcaaaaacaaacgaaatacagtataggtataatatacacaatcgtataaaaaaatttaaattatattatttgtaaatactaaaactagagatctccttatttaaagacaaaagtagtgatcttctacaatttttctatatataaatatatatatttatttaaatttttttgttttacataaaaaatattagagaaatgagcagtgtaatcatggtgagttacatatatacatatacaatatatttatatatattcttcaaacatcatcttggaccatccatcattttaattttgactgccggaatgaatgttataaacgtgaagcttagcccatcatcagatatgaacacactttagagaagagaaagatttcaagtgggcccccactgccactgcagcatatggacataacataatctgtgtgtgactgaaagtagcctagttttccctctctatacaaaaatataacacaacccccaaaagtagagaaggatacaaaactaatactgcatgtaaaatgaagtcgttttacccttttagatatttaggtaatagttttttgtttttgtggggggtgcttctccctgaagtttcctagtagatttattattattattattttagatataaaattaaatattttttttttctttctttagagatagataattttattttgtagctctattaattagaaggggtggtggtggtccatcaagtatactgctcattttgccttgcaaatcaagcaacctctcttaatctctctctctctctctctctgcaacattcatggcaaaagcatcatgatcagcactccagctcaaaacccatgtgagctcttatcattttttttttcgtgtgtgtgttttttcgtttttcactattatattttacatcattaatctatctttagaaaatattataattctttattttttaaatgtaaaattatagcttaggtaattaattacaccaatttttaatttttagacatatatatgacctcaattagttaaatttataaagaaagaaatacaaacccaagaggtgtacgtacaataatactttcatttatttatttttattttaactctaataataataataatcaagtataaaataagtaatacaaagatatggggtttctctgcttttgagtgtttgttccatatagtaacagctgtgaaggccgtttcttgccttttgcttttgatagtcaagagactcaaacaaaggtgtgagagagaaatagagaacccccttgagaagagctttattttattagcccaaaactattaatttattataaataaatataaattcccaagttggttttaatttgtttctatcctactctctttctctttctctcacataaaccgcctacatacatatggccttcttaaattagcaaaggcagcttattaaagttggtatgtttgtgtaggttttgttgagagagagaaacttttcctttttatttttattatttatttttttattttatatataatatatatttttttctcactgagagcttcagttaaagtagagagggattccatgggttaaagcaggtttatagctcaaatcctactgtgacagtttcctttttccctctctcttttcttcttcaattcatttctctctccctcttcttctctcttcttctctcttctatattcttcttactagcactatagctaatatcttatcaattatttcttagctagggagagattttatttttagtttttattttctatgttaatactattatattctcttctaatctcatctgggctttgggaaatttcttggttttggtcgaatttggccactgaaagcaatcaaaaagatttttgtcttcattaatttaatttttgaagctgtattcttgctcttttaacatataatcagtaagtgtactataccacaaaacattatcttttgtatgatttgtttgtatcctgttgatttttttcaagtcacaaatcttactatattatgtattaattgataatgatataattatttctttatatatttgtatacatatatttaaccatatgaagttgttttgtgatatagaagaagaagaagaagaagcaaaaagttgggattatgagtgagctgatttgtgaagatgaagataatcttgtagaggtatagaaagcttataataatactactaagaataataataagctgagtaataataatcagcagtactatatatactttgaatcagaagtagaaatatatattttggatatataatatataaatattgttgttgatcttgttcttcatcataatcagaaggtggaaatatattaaaagctatgaataagagtagtaatcagctgggcagctcaatcaccagctctgatctcatagatgcaaagcttgaagagcatcagatgtgtggatccaaacactgccccggttgtggtcacaagctcgaaggaaaaccggtaaattaattacttcaaatattagtaaaattaatttcttataaatattttgattttcttctaagccaaattcaaaattttcaaaaaaaaaaaa

SEQ ID NO: 188577 - DNA, 5057 bp, Cannabis indica
taaagacttcaactttaagtatctaaaattatgtcgtgtcatgtaaaatgatgatatttgtgttttcttgttgatttccattttttacatattaaataattgattttggaattgacagggaacattgagggaagtggtgaagacagtgcaaagagaagtagtagatggtggattgttgagagattgtcttgaattgggcactaatgacttaaaaggtttgattcaaatcctcaaagatatggggttgcagtatgcttccaacactgatcataccaatagtgacttatgacattttgggtcactactgaaaatgatttcactcacataataactctttgcattttcttgaaagtaaagtagttaactcttcacaccaacttcaaattacacaacacatatatgtatacacacaagaaatgataacttcgataactttttctttgtatccttttttttgggcactgcaaagattttcttttaattttgttttgtttctgtgttttggccaaataggataggcaaatcatgagcctagtctgtctaaggaattttgaataaataggaaatacagtattggtttggtttatagacatttatagggagaaagtatgtatacaaaagagtttcaatactgcaaaataagaaatagtattgattgaagaaaagaaagaaaaggtcaatttgatcattctattgagcttaaaagtttcaccctttaggagtagctcaaatgacaaaaagttttgaggtaggattccctttcgatacccgattcttctattacattacgttacattacagagaagtccattctctacatgatcaaattcaaattcctataatttattggttctagaatatcttgtagagttaggcgaagatcttaagtttcatgaaacgaaattccacccttcggtggaatcttggtcatgggtttggatcctggtaggggcaccgaatcggtatttccttatagtttaattgaagatcttagtttcatgaaacaaaattccaccctttggtggaatcttggtcaagggttcggaccctggtaagggcactgaaccagtgtccaaaccggggcatcctatagttttcagttggatacgaaaaccagctaagataagacaattaattaatattaaaagttgatatgggggaccagcctaaaccagtcaagctaactccaaatacagcttggagagatgacattgatagcaactggtcttgacttgcctatatatacacactattgatcataaatatatcatgtggattgtatcatgtatcactcttttggtaccctactagctttattctatcactatctaattgctaaaatcacatgctttcattaatgcattattatttatctttctctcattatcacaagatctcattaattggttcaattttttcttctctgctttcaaatgtgactatgagcctctcctttgtaaaatctgaccacttttctttcattttttcttggaaattcatgtatgtatatttgaagctgagtagggtgatttcatatttatttactgaccagagaataatgaagtagtagttctgtcttttttttgttttgaggctatattatctatttgtatacttataagatttggatgtgttttcttttgtatattatgctatggcttatatattttgtacacattgtatatagttatttttgtataagttcatagtatcaatgtagtggtaaattataattggtgtaatttaataacaggatttacatattattatattttaaatttaaatgtataagagtattgatattagacacgttaatctgtccaacactatattgatgtgatgtgttgtgagcggttagcgatttcttatattatttatatagatatgatattgaattacattgacagcggtatgtcatttcttgtagtgtttggcacctaacgacaatcttcaatggatagtgtatgttttggattaaatttagcttgaaatacactagtatttgactcaatttttgtatttgtgcttccacaaggtgcaaattaactataaaattcaatactattaatgctcattgaaaatatacagaataattaattttatttatattattttaatatcttataaatataaaagtacttttttattaatgaagagtattaatgagtaacaaaaatgtaattaaaaatgtggtatttttgtgtgctaaaattcagtttatgctactttttatgctaaatttgatataatttttagcttaggttaaatttggcataaattttagtaaaatattttaaaaaaaggcaatacattacatttatagctctccattaaagatgctctctaatgtaccacttagcaattttcaaaattagatgagtagtttaatgagaaatgctaaaaggtatcagtagtgtttatgtatcatatcgttgttagtgcaattaagtattgagtctcatataatttaaggtatcgctaaccaatcggatattacttctaagtagtgctaggcaccactaatgtttaatagcaataatcatataaacttatgagaagaatatattattattttttttcagagaacaaactagaataatttaatcaaaatgaagaaaagcttttttaaattgtattatagaccaactaacaacaacttccataattattcaaaaataaaaaagaaagaaaattcgaaaagaaaaataacaacttaccataaatgtgttattttcccttcactatttcatttccctacatccaattaaaataacatattcaatttttattccaagaataaatgtgtttgaaatttgattgtataaataaggccaagacaaataaattaaacaaaaataagagtgcaagttaatttgatgaattgataaagtccaatattgtgttaataatcctcattaataatctttaatagttttgtggaaaatcgatcgtgttaattatcttttctttaatatcattatatatatatcaatatatatatcttccttttttctttttttgaatgagagagtaaattcaatagtttaaggtgataaaattttgagtaattatttcatatactatttttttttaatttttttttaaaaatttacggtttggattacttcaacggtttctatgtgggttgctatacaaattttggttgcgatttaagttgatcgttagtttctataggggtttctgtctggaattatgtaaaaatgtaaaaaaaaaaaaaaaactattttaaaatgtaaaaatgaaaaaattgattttaaaaagttaggcaaatttagccgcactgatttcataaggagatgaccaaacaaagcctaaaccaaaacaattacaaattacgactaaaaaccataaatatccaaacaaaatgaccaagaaaatgacggaagaacacgagggtgcattacccttgggagtcgggaaaaaacttgcaacctcctctttccaatatcaatcttcaaagaatgcccaagattggcaaacgccaacatggacccaaatggtatgccgaagtcaagatcgaggatgaaagacattttcgagagcagacccccatcaaacaccaaccagtttctgcatcattagcaatagccacactgtcaacaccttcaactagccaagggtgacagacccaccgacaaccaccaaacttagccgccagaagcccccacaaagacaccaaacctgtaatagtcaaaatctcgtgatctgtaaggaaaattgagtataggctatgtaatcttacatcgttaggaatgtcaagtgtgatgattttaaaactgtgtaggtatgagactacacagttgcagatggctaaaattgattgatgggtactacgtacctatgccaatgagatgcatcttcttttcggtagcccattacttgagaactcgaaagttaaccgtgcttgatctagagtaatctcatgatgggtgagttcttaggaagcatgcaagtgaggaaaaagtatactggaaagagtactcgtgttggtttgtaaggctagtcttcattccagaaagtagccaaagtgacgtacccgtgtataagagtcgtaaatctgttgatgtaaatgcccaaggctagaggcatgaacattacaaaattgcacaactaggcggccttgaacccctcaacgacgaaaggatcatcatccagccaagattgcaccactgaggagggagtcctaaaactatagaataaaggcctcattgttggggagggaaacccaaaattgccaacgacatgaaggaatccctactgaaaatccactggagttcaaaaaccccttccaccagagaactcacctcttaagacctaaattgctaccaaatagaactccatgagtgccatcggctgaaaaacggccagagacacccaaaagccaataaacaccttattaacgacaacaaaagccaataaccaaccataatctcgtgagtatctctgttccacaaagagaacccttgaacgcacaatcctaaaaccaacaaactccatctcaacccataaagagttacaccagccaccctcaagctcttgaaatatgacccaaccccatgttcccaccccacgaccatagatctgaacctaatagccctaatctaatgacctaatggcccccgagtcatacgcctccaaatgcaaaactacaattccaactagagaacaaattcacaagatttgagaaacccaaacactgactggacaatacagacaagaaccctagatgttacaaaccagtgcactcaaaaacattcctccaaaaaaaaaactagaccttaaaggaaagggaagaaaacatgactaatgtcgaaataggaaaggaagaaacttactttccgactagagccacatttaaaactcaagaacagtcaacgagccctaatcaaaataaaacgcagagacgtgacaacaatatgaaaatttaaaccctacactagttacgactggatatattaataatttcaccatgtaattatttttataaaaacgaacaaatttacacacttagacaaatgtattaatcattagctttt

SEQ ID NO: 188578 - DNA, 5639 bp, Cannabis indica
atatatatatatatatgtgcaacagtgcaagtaatagtttaattagttgtttaaaatttatctttgaaattaattaaaataacttcatactaaagaatattctaattcaagtagtctcccttcctccttgcatgtattactgtactctccatgatataagtcaaacccaatttatcaaatctttttcttttccacaatttctataataatacccttttgatgttttcttgtccttgaagatttcaagatcctgattaatcttgggggggggcatgttctaatatgttcttttgagttaaacaaggtgccttttattttcattcttatatatataaaagtatttcatgtgtctttctaggaaaatatcagaatttggttaaggcagagttgtcctagcaaaaatagagaagaaaatgagaatgaaaagactttggttttgagcttggttatgaggaccaaatggagaagttaagaagatgatggaaaagttggtcaacaattgggtttcaagcttggtatttcattgttttctcatctgcttattcttccttctacctcaatcaacttctgcccaagaaggtaagccatgattataaagagaatttttattttttttactagattatcaaggatcaagatatatacataaacattgatataattgttgatgaattaggttaaaattgtatcaatttcagattgattgaatttgtgtgtttcagattctacatatatcatcagttcaaaactggtacctatacaaactcagtaatactcataattaaacaaaagaaaataaaggattgcctcatgaattagcaagatcctctttttacaagtcactttaataaatgcatatttgtatagaattacatttttcagctgtctaaaatagagacagtttaatttagccataaatgtgttactttcaatgcagggtttatcagcctagcatgctgtaaagacaattatactgatacccaaaccaacataaggtgggaatcagattacagttggttccctgataagactggttgccaaaaaataaccaaggcaactggctatgatgaaactcgaatattcaacatagacttttcagggaaaagatgttatagccttgaaacaataaagggtcaagattatctcataaggggtacatttttatacaatggtgatacagttttaaaacaatccttttccatattagttggtgttactaatattagtcaagtaaattttccaaaagagttggaggttgttgagggggtttttagagctactaagaggtacatagacttttgcttagtgaaaaaagtgggatccccttatatttctcagcttgaattgagggaattgaaaggtttggaatatttacaagggttatcatttaaagttctaaaagtggtcaagagagttgacttggggagtcaagaaggagacatcataaggtatgtttttctatttttattcaaacctattaaccattaatgtcagttgataaagtttactttaacataactctgtactaaacaagttatgattaattacagatacccaactgatccaagtgatagaatttggaaatcagagccaggttctgacccaacaagcaagccaaaccaagtggctgatgccaaagttgtgaactacaaaggtaatgtagaagtacctttacaagtgttgcaaacaaccttagctaatcccaatcgattggagttcaccgaaaatgacctcgacgcagacgattccatgtaccgtgtgattctctactttcttgaactcaatcagacagttcagcctggtacaaggctgtttgatatattcataaacagtgaggaaaaggaaactagatttgatatactgggtaatggctccaactacaaggagcttagttttgatgtcaacgcaaatgggtttcttaatgtgaccttggtaaaggcctctggatcaagtttaggacccatttgtaatgcttatgagatctttcaggtgttccattgggaacaagaaaccaatccaaatgatggtgagctcaaattttgataagttgttccattcctaaacctctcaatttgactttcactcactgaatttaactctctttcttttagtgaatgtgattttggatgtcaaacgtgagttgttggtttctaatcagcacaacaaagttttggatagttggactggagacccatgtcgtccaagtccctgggaaggcctgacttgtggaaccatgaatggttccacactcataaccaaactgtaagtctttcttagtttgtatcaatattgaatgtggtcatgtttatcatttttttttgtggtatttaagagacttggttcatttaggttattgcttctgaattttttgtttttcttcatctatgctacatttttcaggaacctctcgtcaatgaatcttaatggaccaattcctccaaatattactatgttggccaacttaaacaccctgtacggtaacaaagaagtaatttcattttgtggtgttaagtattgatgtggtaatttgactaaatctatctctaccctctaactcaaagttgtactacattttttgtgtgatgtgtaggaatctaagccacaatggtttcactggtgaaattccagtctttccttcttcctccatgttgacattagtgtaatttctcttttcaattctacaactttattgcactttaacaaatagctttaagaacattcaccatatgcacagagttctgaataaaagttatgtaactattaattcaatagctagtgatagatctcctctcaggggaatattattcaaacaagcttttgtaaaaaccttttactttaaattgctctttatattgatttgcaattacatgtttcaaacaagtattgactgtttcatttctcatctcatgattgatttacattttcctattagagatttacggagcaatgatcttagtgggccatttcccaaatctcttttaatgctgccacatttggaaatgctgtaagttagtgaagtccctattaatttatatcaacttatggcgtatgcaaatgaaaataatcaagtgtatagcaactaaaaacctgtttgattctagatatattggctgtaaccaaaatattgtccaaggagatacatctggcttcaacagctcaaaacttgacacatggtatgaaacattgtcacaagcacttatcaaataatcacatacatatatatatatatatatatatacatatatataacataatccaaaatttaaaatatcaggtctggaatttgcatctctaccagtgaagaagaagcagcagcaaaccgaagtatcatcataggctctgttgcaggtggaactattctattgactgttgcagctggtatcatcttcttttgctattacaagaaaaaattgatgcctcagggagtattcaatggcaaacgatttaaaggaccaacatcaaagagtgagtgcactaaatcaatttaaagcttgataatgctgctaaatctatatgtttgtgtttgttcagatcagtttctagcatatttaaattgattagtgaaaaattcttgaacctgcagaaactaaaggcctgatattctcgatacctatcatagacgataccaaggcaaagtcaatatccatacaaacatttagtctggccaacatagaagctgccacccaaaattacagaacttccattggagaaggtggctttggttctgtttatcgtggcactcttcctgatgggcagaatgtggcagttaaagtccgatcagcgacttcaactcaaggaactcgagaattcgagaatgaggtatcacatctttctgagacaagtttccatgagttttatgtagagcatttaatcgttatcaccaattgtcactcaaccatttttgaaacatttccttctgattctttcaacagctaaatcttctttcaactatattccatgagaatctggtgcctctacttggctattgtagtgaaaatgatcaacaaattcttgtttatccattcatgtctaatggctccctccaagatcgtctctatggtacattccacacccacctttcttatctcttcctctgtgtatggacatttgtttttgacagaaaagacttgctttcttaacaggagaagcatcagcaagaagaaaaaagctggactggccaataagactttcgatcgctcttggtgctgcacgaggcaagatttctatatttgatattggcttgtcccatttaacaattttccattaaaatggctgatgcaatggggtattgaggtttgaagaattctttcatatgaatctgcaggattaacttatcttcacacatatgccggctgcgttatacatagggatgtgaaatcaagtaacatacttttagatcaaagcatgaacgccaaagttgctgattttggtttctcaaaatatgctcctcaagaaggtgacagtgtcgtttccttggaagttagaggaactgccggatatttggacccagagtatgatttttcttcagctcatttttcgctatgtagttttccttcccttttgttaatctaactccaagaagaaagtttctgaaaccttttcatttcctctcatcaaaacattgctgccttattttataaaaagaaaaaactgcaaccttttgttctcatacatgaaaacttgacaacatggccaaaaattgctcaaattgatactctaatgctttcaggtactatacaacccatcatttatctgacaaaagcgatgtctttagcttcggtgttgtgctacttgaaatcataagtggtagggagccactcaacatacgcaggccgcggagtgagtggagtctggttgaatgggtatgaataatcaacttcataaatttctgaaactcaccatattgtaaagttctttcatttgtgaggttcttgccatttcacctgttaacaagaagaaatcatcagtgtttaaaaagctagacttgttatttgagtcaacttgactgaataataaatacaaatactaagactgaaaacaacacctatgtttgcaggctaaacaacatgcaagggaatcaaacgtcgatgaaattgtggatccaagcataaagggaggttaccatgcggaagctatgtggagagtggtagaggtggcattgttatgcactgagccctactctacttatcgaccttgcatggctgacatcgttcgtgaacttgaggatgctttgatcatagaaaacaatgcatcagaatatatgaggtcaattgagagctcggcttccatagtcttggacaagagaattgtaataccaccatccactccaacagaagcttcacctactttacaagccttgcctcctccagagccaagatgataaaaattgtaataactgctgtaatgagccttgaattgacaatgaaatgaggatctttttgtaaaacttctctccattgttgatttttcttcttatttatattattccattattcactcgagcaatttacattctgaatcatgatgaatggggtttggttttgcactattataccagaatccaaaaccaatacaagtgtgaagtgtctataattaaagctaaagcctctgaattgtgtattatccggagaaaaatgtga

SEQ ID NO: 188579 - DNA, 900 bp, Cannabis indica
tttttttttttttgcaattattgcccaaacatatttacccacatctatcacgttccaattcaaaaatttcaaaaaactcaagccaccagatgatttgaaactacatacttgagtccaagccacttgcccaagttcagggcctgcaactattcatttccaaagaaatgatatatgcaaatctattccacttctttcaacactttctttagaaagttaaaatttgagcctaataagagtaaatgacaatcaatacagaattaatgagagttatcctgcctgcaaaagacaaattacgagtactctaagtcttgatgcgcttaaccatttttctcacaatactttgacattccattatagtgattatttttgaataaattagagtccctaaatacttaaatggtaagttacttctaaagaaactagaggcatctaccacttattgcacctcatcttatttcatctcactacaagaagtgtttgagaaaagcttgagtcgctgtaacattaatattatagagagataatatccatgacagaatagtaaaaaatcatctgcaaagcataaatgattcaattacagaagctttgcatttttcttggtatttaaatctagataaactctccacttttatcaaaatttgagatatatattccactctaagtacaaacaataagggagacatgggatctccttagcgcaatcttctcttcaattcaaaaaacctatgcatagagccatgaatcatcaaagagaacattagtgttcgaacacaaatcataacaagttgtataaaatcttgtggaaaattaaaggcaattaacatctctctataaagtctcactcaatagtatcatgatttttccacaaatcaagtttaactagttgtacaattcttcttt

SEQ ID NO: 188580 - DNA, 2391 bp, Cannabis indica
atatgtatcattccatctaacattataattaacactaagaacattatattaacgttgttcaaacatcaaactcaacaaaacaaatgctaaaccaaaaatagtactgaaaaaatagtcagcttcaacaatacataccgagttccgactctaaaaagtacaggcatcaataataagttaataaacctgtcttgagttcatcatatactaaacccaacatgtattgagtgcagctaggaataaatttgtataatctaatgatttagatctccagtttcacatgagaaatgtgaaacgtaaaatcataactactcgaatgattatttacattttgaacttcataatacataattattagaatagtattgtactattgtagtggttaataacaagcacagagaacatcagtgattgcatttactacaatagtggttgctcttatttgtgaaaatattcccgcagttgtaacagaatgcagttccacacctgcaatgcaatcaacaaaatcatacaagataaaatattctataatagattaaattctgatggaattttattatcatcataaaattcttctaccaaatgtagaggttaattttcttagtccttgtgtaaatagtaagatgagtctttaacatatcaaaattgaaaaaattgggcccattacaatagcagtccttcctcaaattcataaatatagaacaattaaatttcaggtaacaaaaagcatataattttccaaacagaatcctcaggttgctaataccaaattctcaaaaacaaccaacagaattactagttaactaaagatattggtttagtccaattgataattataataataaacaaatcttttctttattttagattagacctggttctagtatgagaggctgcttatggtggtgaaggataaagtgctctctattattaatatattccaacttgttagctaggtaacaacacgataagtaaaacaaataattcaagcaacatgtgtatcatttgtctcaaaatcatgaaacattagaaaagtaactgctacttcagataacaaggctttcttcactcaatattggtctttttggactttggaggtaggaccacctgaaaacaactttggagacttttgtctattacatgtacataattctacctacaaacgatttctggtctctttctatatatttgtttgaatagctaatgcagtactataagaagcttcaactgcaagcaaaacccaagaataagacatgtcattttctatgtatggtatgaacaagaaccatggataaagaatgaacatttcaagtgaaaaaacaatgtacagtcaatcaaaccatgaaagaaacttgcaagggaaaaaaataaactgacctgcattgtatgaacaagcaaccagatgctctttcaacatagtatttgcaggttggacaccttttccagagcttactctgagccagcttcttcaacattatatcttccttctctctctcatccttattcaacttctgaaactccccacactcaatcccatcgtgccaagcaaccttacactgagcacaaaacattctatagcaacttgggcactccgcgttggttatcacctctttcccatcattgatcaacatgaccgagcaatccttgaaaggacagtaaaacttttcagtcccaagaatcagagcctcacacaacgccataccccacctctcaaacacatcagggggaagtatggaacgacagtactcgggctccaatgacccattacaaccagaaacagggcaaccaattctcgtaatgttatcttgaagctttgaaccaacgtacctggccatacactccgaacagtaagaatggctacatcctttgatattaaacgactcatttacagacttaggttccgcgcatatctcgcaaacgaaagatgggtcaacgtcctttgaatttgaagactgcccgttttcagtcacggaaggacccgcaaagggtttcttccgagtcgtcttgggtgtgttgaaccagagcaattgaatgtcagcgtcgtcatcgtcgttttcaacgtcgaaaaaatagaagctttgtcgagaaaggtctacgacttgtttggccttagtggtggtattaggagattttagacgagaagccatgatagcgagttgaaggtctcgatcctcattgtactgctcgactgaaatggggttggagttgttggtacccttgtccaaaatcgattgagaggaaagttgataatgatcaacatcaacgatttcacataattcttgttttggttccataaccctgtgtttctttctgggtcttctctgagtggacgctgcttctactgtgacactcatattaagggtttggagtttgtgtggtcccttcgtcttcttc

SEQ ID NO: 188581 - DNA, 5269 bp, Cannabis indica
tttttaatacaaaataataataaatgaaattatatcatgaataatacttttgtatattattcattatactatttattttaaataataattatattgaaaaatattaaaataaaagtacaatattatcaacagggcaagttctggatcatgtcccccgtcctagccccataagggccgggtaccagcacagcgactaacttcaaacacaatattcttagagtttccaatccaataatttttctgtgcaaacaaattccattaactcaccactctctcaatctctatcagatagatccttccagtactttgccttttattcaaggtggcaagaaaaaaacactaaggaaatcatataggagaacagtgatcattgcttaaaattacactcaaactcaagaagctcaatctgcaacctcgctaaaagtaaagtagcactggaatgtcacaaagaaagaaattgagcttaatatactatatgaagaggctattacttttgcaacaaatgttcctttcaacaacacatagcaattgaggttggtccatgtgtacctcacttactcatccacatttttcatgatttcagtatctattcaactgttcagacaaagagcataatatagatactctaaaatatgtcaacactctatacaaaaactagacagcagaaggaccgcatatttaagccataagtttattgttcaacaaataaacaaacatataaataaaaagatagaaacatatttgaccttttaatatataaaatagaaaagttaatcctcaaattcaattcttgtaaatctcaaaatatgaaatagttaccccatgcagatattgatgaagcgttgtgaatccccagataaaggagctccaccacagagcataaatctaatatctcctccaagtacagagcgtattttcttaaagatgattaaatcccacaacattttttctagtccccaagccccaaaccagcttccttctactgctgccagtcgacgtgcatatgcaaatgtaaaaagagtctttgctagacccccagtaccatcaacctgatatttatggaaataattaattaattaacacttcagaaatacatgaacctgaaaccatcacaaggctaagtggaaagaattatgcactcaattaagtaccttttttagtacaccatctcgaacacgatccagtatagcaggaactgctgccatgagagttggcttcaatgcagaagcatctcccttggttcctttcttaactttgtttgaagtgtctgttaaagtcaatggagaaccataaccaattctacacccggtggccaccatgacagactgaaaagtcacgtgttacaacaaatttcttatctaacatgcacaagtaaaataaaaaataagagtacctcagcagccaattcaaagacgtgagcaaggggcaagtaggccaagtagacatctttgctattcagttctggaatgactgttataactgctgcagcagtggctacaatgttgccatgtgttatcataacaccctagatagtcacaatatatacttgtaaggaaaaaaatcaaatttacaatgttattttaactaaaatgtaaaggagcgaattttaagttccaaccaaatttctcaaaagaagctttcttcaatgaatgaagatatacatgtgatcattacaatagaaaatttatattatcacaatgataggaaaacaaattttgaccaccatgttttaatctgataataataaatcaattttttgataaagcaacaatcccaaataaataccaaataccatttttccaacaaaaaattgacccctatgaatagggaaaatatccttactcaaccagatccatatatttttttagatatatatttttttcacacgcataggcaagttaaaatttatatgcatgttgcactatatataatgtatttgcataatattacattcaatattcatttggattagtactactattggccaagaaaaaaaagccataacaaaagaaacaaatagctggaaaccaaccttcggcagacctgtactgccacttgtgtacataacaacagcaacttcattctttgagggtagacttggtggaatgggacttgctttaccaagtctctcaacttcagtgaaggacataactgtccaaccgctcatgctttcaaaatctccagtttcttttgaagttccatcttcaaaataaataacattttgaatcgttttaaggcttgtgcttatggcagatagcttcttcagttgcttcgaatcgcatatcaaggttgatgttgaggtctgttcaaatgtaaaatttctaagatgagaaccattttttttttttctttcaggatattagaaaagatggggaccaattaatgggtccatatttgtatatcaattctgtattccaacaaatacatgatcttgcagccatcaagcctccattcctaacttacgctaatttcctaaaatatacatacaatgctatgtcactcaaacttacctcattaagtgcgtggattagcgcatcctccccaagagttgcataaatagtaacaacagtaatattttgtcggaagcatccctgaaatccgagaattattaatgttgtcttgagttttgaggagaagattaaagtaaactaagacaaagagcaaatatggcaacaagagttgaatgtagaaatgcatcaagtagcaaacctggaatgctattaaccattctgcccgggtttcagaaaataatgcagcacgagtatccacattgtggcctaatttaataagaccggatgcaaagttgcaagcacgatcaaatgcttcaccataagtttgccattcatattctccaaagtgaagcttctcaaacttcctaccatcactagctgcaacaaaatctctctcgataaacttcctcgttccaagaaattgattgcgtgaattccttttacaagattgctcaaacagatgtgccatggttgtggctccttcccatggtacttcaatcaattcagtcacacgactattgcgtacggtataggcagaatccccaccaacatctacaggaactcctcttagttttcccttcttctttccaatgaagaaagaggagataattacaggtataagtatcccaacaacaacagcaccaacaatgccatatgctccgtgacttttccaaagtgatgaataatcacccgaatgaaaatattccagaaaacatcctttagaatcccccatttctgaatccttgtaaaactgagagcagatcctttctgaatataagcagtaataagtaaatagtcacagtgagtcagtgacatacaatttacgatgaagtataatataaagtgtgtttaggcacacaaattgttacctagtatggttgggctataagtttgtccaaaactaaaatctctcttaagcatcgaacgagatatctagatagagtttcatcacaaagaattaacctgaagtacctattgacactcaaatgattacccagccccagtatagttgatcaataccgttatccaatactgaaatctctttgaggcttcagaagaaaatagatcgaatttcaccacaaagtctttttacatatcaacacaaactttaatttgtaaaatgtagctagatattgcttaagatgtgtgtacccccagaacaataaaatctactgacactatattccaacaaaatattacaacttcacacttatatcaagtcaaatattaaatgacactcaactcagttcttatcactttgtaacgtagatttatcgaaattgaatttcctacatttgaagctcacaaatcatttttgttctgtataaaactgtaatcatgggaagaaaagaaaatctaatatcttatcaattacagcaacaacaacagtgaatgaaagaaactatttctcaaaaacaattacacaaattaaaccccttcttttcatttcatatataaatatataaataacacacatatagaaaatattgatctatggttggttgcccaccttttgttttcttaatatataaatcacaaaagcagaacatgaatgaaatagaaaaaaaataaagctccaaggaaacttactccaaatgaagttgagctaagacttgctattcgcttgtcctaaatgcacttcacttgtgaaataaaggcctagtactttgatcagttaatacccaccatcgaagctaacacattcaaaccaaaacaaaacaatcagctataatctcgaaaacccagctacaaaaacaagaataaaataagatcgaacatgatgaagacttcaactttacagtcaacaccaaaatataaatcaaagtttcaaaaggaaaccgatttcctacaggaagcaaaacacagaagaatcgagcagaattgaaaatggaaaaaagaatcaaagattacctcatcaacgatccaatggccttgagccagacttttctttcactttctcgggacttcttaccgttaaaaaggaaagaaaaatcaatagtgatgaacaaggcacattacgatattcgccctcgtatataaaattatgtataaatgatcttttggattattagatgagctttcggaatggcggccaagggtattttcggtatctgaatgttggacatcttaaaagcttggggtatttgggcatcgggatataggactgaaaaaacaactttactgaatggagaaactaccacgtggcagcaaaagagagaagctggccttctgatgtgaacagtggaaatagacacgtgacgaaatccatgatggtggttttgcttgtttgggtggcacgtgacttggcgtgttttaaggggttgggaggaatctcagcttgacactaaattacattaaaaaaaaattgcataaatttagtatctatggctgaaaaaaaaattgaatttttttaacaatatattataaactacttgcaaaaatacattaataaatctcagttacaataatatcttgtcacgtaattaaaaatactttaattttaaaataatatgcctgaaataaaattaatccgaaattctattttgttgggtttccaaaagtaacatcttaggttccgtttggtaacacttttgttttctaatttttaaatcacaaaatgaaagtaaaacttttactttgaaaaaaatttcttttgaaaaaacaaaaatgtattctgtaaccacttttatttttcaattttaaaaacagaaaacaaaagtgtgttctgtaaagttcattttcattttttattttttgat

SEQ ID NO: 188582 - DNA, 2350 bp, Cannabis indica
aaaaaaaattagaaaaacataatttaatataagtgtcaaaaattctagttaggcttctataaaataaggtacttttgattaaatttacgtggcctggttttgatagtttccctataatataaggttgtaatatgtaggcggtcgctttcagtttgggtgctatatagtatatagtataatatattaatcaccgcaataataggtttttgcatgtgaaggagtcggtggttttccttatagcttttctagttacacacatcttattataattattatttgaatacatttaaataattgtagtaaaatatatgtattatgtattctcatttagtcctcataaaatatgatttttgttattaatatttttagttgtagacattttttgtgacaacattaaaataagattttaccagaataaaacttgtgactaaaaataagattttgccacgatgcatggtcccccccaccaacgggccaattctctttgaatacagatgcgtcagtgaaatctagtagggacttctgtggggttggaggtgttatacgagatggtgaaggggtggtttgggcgtgctgggcagtggggatgactagaaagtttggtgtgaatgtgtcggagttgcttgcggttaggttggggttgcatattgctcgataatttggcttttctatctctaatattgaaagtgatttgatagttgttgtagactagattaatagcttcaattccaataacgtatatcaaccattattttttatgttatttttttgttactatctgttggtggtggttcttgtaaggttatttcacgttctgcaaattgtgttacctatgtactggctacttctgttaataattttttaggagattatatttaaataaatgcttgttcacgctttattagttctcctataacagttaatttatttattaaatgaattataatttacttttaaaaataaataaataaataaataaataagaggcgctttacggtacacctttaaatctctttgtgtttttgaatatcataattattaaagatattcactaaaattttagaattttaaataatttataatttataaaacaaaatttaaataatttatttcacataataaaagaaatagacatgcaacattttgaatattgttttccccactttaaatttttttgaatttttttaaaaatttacaataagtcaacattttttaatccatgtatttttataatgtcaagtcataaacatagctaggttgcctagctcaaccttctggaatcaaaaataactagctagaggagcaacccctgaatctttataatgtatttatatttaaaagaccgtttggtccttctattttggcaaattgaaaccctttaaacaagaaggcttggaagggtagaatagtacattttgggtaagattcgagaagaagtcaaattttattatattattagttttatagttgaatttcaggtgttgccatataacaaacttaaaaacatatggttatattttgggtaaactaaaaatatggtattttctaaaattgtaataaacctttcctcataatttaatgtttgtgcaaatagacccttaattaaaatatggtaagacaagctattaactttttgagtgaaggttttactttgatctaacctaaaaaagattactcttaaaaaaatggtaagaagtaaaaaggttactcaaaagttcactgatggtttggttcttgagacgaattgtttagtgactgttcattaaagttatttaataaacatctttttatttagttgttaatgattgtagaactctttttcgttgtatgaccgtagtctttttattatttgtttgtccttttattaacaaagtgacttatacttataattttgttagagtttcatgttcttcatgctataagtttttgtctattatattaggtgatttatcttcataataaagttctatttacattctaaaaatgacatttcccttgtttctcaagaaaaaataataatgcttctttacaaattgaatttgatcatgagatcccattttgtaatttttgaaacttaaggtatatgattttttagaaaaaattcattaaaataaaataaaatcatatgttataaataaatatacattctacataaaatatgaaaagttatctaattaaacaaattatttttctattcaaagcatgcgcaactaattaatgacttttaaaaatttgcataacttgcaaacttttatgatctaaaattattagattaggaaactctcagtagcaaaaccaaccatatttcttaaatcaattgattctacacttatttatcaaaaaaaaaaaa

SEQ ID NO: 188583 - DNA, 2158 bp, Cannabis indica
gatcttcggagagccttcttaccttgaacaaagctagttaatccaaatgccatgttgatctttctttgtgtgtttttcttagatttcacaaaatatttggtagtagagaatgtgagaacttgatgattgagttgtgtggttaagtacctttatatacatgaatggagtgttgaaatgcatacatattttaggcttctaaataagtggttctgaagacatttgataaggtttgccaaatttgcaagaaaacataagcatttgaagttcacatggctttgtcttctaagtcaatatatgaaagtttagttgtaattgagacatttatacatgtgatctgtttactcacttgtggtgtatgatgaactagctcatcttgatttatccttctataccaaatcattgggttccttagcatttctcttagatctattcttttccattcatccattttatttctcatttgaatgcccaaattatgagtacagagaaattgaatgacgaacaacaccaacgcaatgtaaatatttggccttatggaccaaaacaaaaatgtttcaaagaatggtagaaatgaatgctattgcatttccttgaatgaatatatcattcttgctttctacaattcttgcttagttctgttatttacaattttgtgaactaagatcaatgaatatatcattcttcttcttcttcttttaatcttgcaatataatcttgagacaaagttacacataactcttctttgaatcatctccaattgcaatgtttgtagtcttcaaagttggttcttcaacattagaaagtgacctcaaatcccatgttaggtagacctttcctctcaagttttcattttagagcacaaatgattttgttaataaagaatgtggtaactttatgaatgagttttgtggtaatgtgcatgtatatatatatagatgaatgattctctagcatacttaggcaattgggttggtttggtatttgtcaaagaaacataagtatttgaatcttcacatgggtttgtcatatgtatagacatcaccaagtgaacaatctataagcataccccacttgatacaaaatatatgcagcaaaaagaaaccattttggaacatattcgatcacttaatgaatccttcaactaacaatttttctcttctcatgtggctttcaaataatgaaagacacaagcatgtgatttctcaaagattaagtcactcactagaccccatctcattaattgactctttagtctccaccattcatgtccacacaacacattgattatatatactcataagattggttattcagcttcacaactcctcacaacttcaattactcttagcttacattttcttccttctattacctttagacttcgaaaatcatgggctttcgttttccccgtgtagttcatgccaagcaacttattcagaggcctttttctagtgcaaaagatgttccaaaagggtatttggcagtttatgttgggaagagcaaaatgacaagatttgtgatccctgtatcgtacttgaacagttcttcattccaagaattgctatgtcaagccgaagaagaattcggatttgatcatccaatgggtgctctaacaattccatgcagtgaagaaactttcatcaatcttgtatcaagcttaaatgtctgatgatgagtatagattgatgctaactactgacaaaaatgattaattgttacaattttgtatggcaaagatgccaacactatgtaaatatttttttcttggggactcaaataaaaatgttctctgagattgatacaaatgaattactactaaactttttcttcaatgaattgttttatttatgttgagatctagaatccttgtccttaatcatccttactgatcttcaaatttattgtaaaaagttcaatgcctgttaatgatctagttactttctacatctctcattatcagtgaactagtgatatataaaagtaatgttaaagcaatgtttgtgaatgagtaatgtcaaataaaggctaatgattaggcgtaaaaattacagaataagtttactagtttctctgctagtcaaaatatttcccctgagatcaaaagtatagaggcatttatataggtgagaaaattacaactaaatgtgcagaatcaaaa

SEQ ID NO: 188584 - DNA, 1573 bp, Cannabis indica
ttttgaaaattcagaaaacggaaacaatgtttcaggaagctcgggattggaacatggtgactcatcagccgcgctcaacttggtggactcgggaggaagataagctgttcgagaaagctcttgtcgacttctccaacgacctccccaatcggtgggataggatcgccggtcgattgcctggaaagtccattcctgatgttatcagacactacaatgacttggttcatgatgtcatggagattgactcgggcagagtcgcgcttccgagttacactgattactcggcggaaggtttgaatgggtgggactccgctaatcagatatcttttgggtcaaaagccaaacaggctgaaccggagaggaagaagggaactccttggactgaagaagaacacaagtaattcctcttcttcttcttatccttatctctctcaattaattgataatttaatttttttcttctattggattctcttgtcaaatttttttgctatcttccatttcttaaacttttaaatttggaaaagggcattcaattctttattttaatttttggaataaaatttgtttgaattggccttataagtaaagtattaaatgttgtctagttataatttctttccccatatttatatatctttctgggtttttatttttccttccagttttgttttcttgttttagaaaaaagaaaccgtgttttttttttctattattatataaaactatttttctacatataaaaacgttcttgtaacgtttatttgtaacatttccctagaaaggttttggttcaaggcaaatggtttttatgtattgagatattttggaaataagttaataataataataaataaatgtttaggaatcagtggcagaacttttctaggagagaaacctgtaactgtaaatgggttcaatcttcaactgcttattaaaatctggtcctaacttcctggttctgctgcttagaattgactttgttgacatatagagtaacttaatagtactaggggactaggtgaggtgtatgcaaattatatgaaattttcgaactttggagtatttagttgcaaaaataaagcatcattaactgactgtgttgtttttcttttatgcatcagattatttctcaagggtctcaagctatttggtaagggagattggaggagcatttcaaggaatgtggtgatcacaagaactccaacccaagtggctagccatgcccagaaatactttcttaggcttgaatcaggtcccaaagagaggaagaggtcaagcattcatgacattaccacagtggatggtgtcactgattctgtgccttctgaccaaatgtgccttcagcctacaccaccacctcataattcacctcaacaatttcaaacaatacaacagatgaatccaccaccaaaccatatgacaatggctactaataatcatggaggttcagtggggtatcaacattatggtttccaaatgtgatatctttttgttgccccccttataagacagaaagcttgtgaatattagggaaagcttgcactgaacagatatattatttatatatata

SEQ ID NO: 188585 - DNA, 954 bp, Cannabis indica
atcactgatttgtgcaatttggaatgtagatgagcagctagactttctattgctgtatttggaatagaagtgctgattgttcccaagccatggctctgtcaatttctaaaaggttattacgatctcttggttcttcatctgcattttcctgctgccattcaagatttataggcccgtcaatttgcacaactgatggtgagattataaattatttgaccctaagttgtaaattgattttatagattgcataattggatcctgttgtggctttccctacacacacatatgcatattacatatattgataaacatatgcatctgcattgtctacctcatacagattcgtacaaccatgttagtggggatagcttactttttaaagagacttcggctattgtcaaggtaagttaaatgtagtttcttcttttgtagcgttcagtgtcatactcaaaagcaaatgagatgttcaacatggccattcatgccttagtttgcctctatgtagggtgggttatctttactttcttatcggaagttttcaacttctatcctgacccctgaagccagtgaaggtgcatttccctctgatctgttgtccgctaagcctgtgctagaatctgaccgaaagataggtatgaagaagaattgaaacaattgcatacttgaatctcttatctgcaacattttaatctagtcgaaaatgtaattagattattactagaggtaatataggtgatagcttggtgtacatttttatagctgttgatttataactaaatgtcattgttgacttttgctcttatcttttacatgatttgagtatacaaacaagattttgtcactttcttgtgtttaggctgtacattttgtttgtatgtctactgacgttgtgtatctctgttttaggacttttatcaggacctttgtaattcctgtgactaaattttcataatg

SEQ ID NO: 188586 - DNA, 1429 bp, Cannabis indica
agagagagagagagagtccaagaaactagtgggtttttttgtgtttctgaaattaaagaagaacacgagctagctagagatcatgacatgaatcgaatgattgatgaggttgaggtgaggagtactgtacgaggaacactgataaaaccaagagatattcttgggatccaaaatgaaagaaagaggacaaagctgaagaaatgccaatatattaatgagaaaagggttttgatcatgaaaaaacaaaagagctcaagtactactgttccatcacccaccccaaatcatatgatcaaaaacgaatatgcaaaacccagtagagagaggagagagagaaagctatactagcagtggtgactgatgaaatataaggtttcaaataataaacatattatgatggaacgtcctacgtgtccatctgtggttggatcaatttctctctctctctttctttcacttctgataatacatcccatatatatgtattatttaacaccacaaaaaccatgatcgatccaataataaaaaaaatgagatcaatggaggccgggaaattaaagcacgtaaaatgattgagtactatccgcgtccacagactgaataaaaaaaacaaaagggagcaacatttacagagtcagacagtacagctctctctagctttgctaggtcattccatatatacgctaacatttttcttcttcttctttttgttgcagatcaagaaaaggattataattaattaattgcatgtaaatttaaataatatatataataatataatagggaatcgagaagagagatataccaattaaaataatatataattatatatactctagtaataaaactaccagaaaatgaggcatatatgttggagatttatttaattattttcgataagaaaatatcgagcacgatcaaacagacatataatcgttagagatactattctattagtatccctaaaacgcaatttaactcgttattagtacttcaaattagcacgataaagataatcatgaaagaagattttttttttttgagtaaatgaaagaagatttttaagccgcgcgctaagaagcaaagtcaaataattaattaattaaaacaaaaccattattaaacataaacctagctatagtcagatacaagatatatcaccaccatatataaaaaactgggattatatatagctgaaaaaatgcagtgtttaaacatggcgagaagaaaaaaatttgctcacacatcagaagatcatgaagaagagaaaaaattcaaaagggacaaaaatattcaagaacaaaaaaaaaaagccaaaaatgcaaatttggggtaattaattaaaataatatgataaatcatgttcttattgtgaagcagatctgcaggaagcaagagcttcgtttcaaaagattataacttttttatg

SEQ ID NO: 188587 - DNA, 2914 bp, Cannabis indica
gagagagagagagatgcacttaacgttaaaaaagaattcatgcagaagtgataatttgtatttgataggaaaaagacgcaaagagaagagagtgtggtaccaaacattcgacctttatacaacacaacaagggcaaccctttaaaattcaacacagagaattggaagaggctgacaacataagccaaatacttgcccacgatatgtctccaaaccaaacaattcctctttaaaacacatctctctctagacaatcctccatgccatccattaatttcaaaagttgatcttacttgtataatattttaaattaattattgctcttttcaatattaaaattactatgtagcctccattactgctagtacttttgattggtttgacgtttgtgcatgtatatcaaacttattagatacagataatcactatatagtgcatgcaaattagtgagtttttttgtgtgtatatatatgtatgtttatgtcaaaaagtggaataaatattgctataggatgatttgactagcttgttgtgtggttttatcttggtgttttcttctagcttaacatatatatattggtgtttgttcttaaagagatgctgtctgcttatcaattattatatggtgagtctttgttattatgacatttataacttgaaggatggaagtacctttatttatttatttatttttaaattttcaaaattttagcaaattcaaaattaagaagctaaagttataaagatggtgataaaatatttgatgaacataaatatatatgtagtattggagtgagatcaaataatgatcaatcattgagagaaagcactaacttatttccttgtcccatcatgcatgctatgcacatggtattgttatatacataatatttatatatattaccttctatatattaaatttttgagataatattcaagcacaaaaacatcatgatgtgtagcatacatcgagttatatatttttatttttgcacgatatttaaaattaccaattctccaattttgtacaaattcaatagtgttttctataaagccttcaatatatattaatccctagctatcatgacaaagaacagaaatttgcagcttatttatagctgtcctaacgaatttaaatggtcagcccaaatttgatgtacgtacgtacgtaccaaaagattttatttgccatggataatatatgtatttgaattttatgtgatacgagatacatatatatggacctctatagggttggtacgtagttgtatcttttattttgacctggtttctcttggcatgtagctaagcactttgagtttggaatagactaatccttctgaaatgaacttccccaaatctgtggattcattcttcttatttgggcataggattcggatttggggatagcggcttgtgaaggtcttatcttagaagaacgaatgaatctgacaaggtggttgccagtgaatgggccttctgggctggattttgggacaattgggcccagtgcgagtaccacaacttggactatgcctgagtgggctgacatgtatgtgacgccccacacgattattattgtgttataaactgttgcttgtttctagacaatgaaagattgatgctgagaggagtggggaagacatgttgggggagaaggactgattatcgatccttcctaaaaaccatttgcaagagcaacaaatatgaatatatggaaagtaattctacttcttttatatttttgtaaaaaaaacattgagattttgattctttccgtgctctttttgtatttttgtttttgtcaacttttcttcttaaatttattttctttaacagtttactttattcacaacaattattggctaatgagtatagtcaccgtgaataaaagttgatgaacttttggtcattacaaaaacgttttaggaaggtctatttttttttttcatttagaaaagatcagactctctctttcttttatttcttttactgaatagaaaatagactccttattctttttgtttcctttcggagcaatgaacacatttatagaaaatataattaatatgttattcttcaacagagactaaagaagaatgtaaaaatcctaatctttataccgtttatgcaatcaattaatatcctcgaacaaacttacactacgttatttcacaactgggaaaaatattaaaaaaggatgaagagtttaaagaggaggagagggtgagggatggaatggattgttaattttgtttaatgttcgtgctaggagggaaaacataaagatgtatttaaaatttaaaggtaaaattgctaatatatattttatttttatgaaagtatatgtttatttatatatataatatactaaatggatgtttttttattttaggttttgatttgtttttttaattttctatcataaagaatgtatgaagttcaaatttaatttcacttaaattttgatattaagaatttaagattaatgaaattggcatgatattttacaggggataagctcttattaagtaatcaatgcaaaataaatttattttatttggtcacagtggaacaaaattatagcaaacagtaatttaaacatcataatgttaatagttctgtgtgggacttatcttgttgttgtgcagtaatgactggtggaaacaaaactctaacaataaatgttgtctttattcttaataaagctatatataactgacttatttatagttattgcaaaatttaaaatcttatagaaaactggaacaaaaaaccactattttaatttaaatttgacaagaatggtatctttggaatgagcttctttttcagtatggtagcattttacatgctcttcaagacattattaattaagaacattaattgtcaacatggcagcctttgcatacagt

SEQ ID NO: 188588 - DNA, 5882 bp, Cannabis indica
catttgcttaaaatgacccatcattggaaacataagaaaggtccaattttttgttttttaatagtaatgtatgggcaccataagatatgttatcatactagtacaaaaatagtacaatatgcagttgcatattataactttgaaaatggttagccattaatgcttctctccataattaacaaatagactttttacattgttctattgagattattctcaacttgcataaactaaaacaaccaatttttataaagaaaaacaaactaaataatttaaacatgaacatattatcgaaatcactcaaattaccctaaactaaggctagtttgtgcgtttagaggtaacagtgtaattactagttagtgtaattactaaggtggtaagtatacaatctaatacttatgctacaagatgtatttatatatgaaatgataattacatatgaatttctaatatcatatttgacaaaatagatagtaattacacagtaaaataatattttctagtagtttatatttaaaatggaaagtttacagtaattacactctattctcattgggagagtgtaattaaaactcctcaattatctcaaattacataatcacagtgtaattatagtcaaacaaacatgttaaattgtgtaattatttcttattacacacaaatctaattacaatgtaattttctaaacacgacctaacatttttcttttccaaaagacaattcatagaattaatgtggtcaaaattgattctaatttttgggaaagcaaaacaataaatcgaatttatttttatcatatagatttggaataacacattatcacatcacatgcatagactagggattattaaaaccataattgtttcattctaacttgtgactaattacataacttcaaaatcaaacctgtaaaaacaatagccctatttaatttacaataattttcaaaagagagaaaaataataatgggatcatgaacatgtaagtgttgtaaggactacaaatgatataatttatataataaattctcctctaataagtcaatttaattagtttaagtacacctatttaatccaaacataaaacagattataattaactcatatctatctctctatctcattaaaattattagtaagatcagccttggagttatagataactcaatttatgatcatgtgtatgtaattatatatatatatatgtgtgtgtgtggattgtacttgttcattattatataattaagtgaatgatatgctacaaaaaggataatcaaatcgaataaaatctgattaaagaaaacaagttggcattgaatccaacgaactattcagtattataaaattcactaatttgatattatatttatctaatcattgagatttaataaagcttaaatccctattatattttctctttctaaatatatatatacattacatttacacgtgtgactaatcatgaactgcatgcaaattcaatcatctagtactcatcatccaacccagcctgcctatttatataatcataattcttaattatgtatgtgataattaagcttcaagtaccccataattaacccaatatatatatatatatatatctctctttttcaaataaaataaaataaaataaaaatagataaagttttagagagagagagagagtacacaccattcataattcagttaaatgataagcttttccttaccacttctctggaaaatatagctaaatgagtaaatgatatcatatcccatgtatatattcatatatatatacatatatagagaatatatatatatatatagagagagagagagagagtacacaccattcataattcagttaaacgatgataaactgttccttaccacttttagaaaatatgctaaatgatatcataccccataaatgtcaagtatgaaggtatatatatataccctttggtaaggactgtatctgatcatatatggtaatagcaaaaaatctcaaagataaaacaaaactaattaattaattttgatattgtaataatcaatggttagaaagaagtacctgtaaattggtaatgatgagaagtagagaagcgaatagagatgatgatgatgaagatgagcagaaagaaacatgtagccaaggccaacttgccaactaataccaattatattcactctataatacaaattaatgagtgaaaataacaaagaggctatcggcaagtcatccttggctgcacattgcactctacaagctatacaacacatacagacagacagagacagagagagagagagagaaaaagagaaagatgtagttacaatatataccaaaatagagacctatatatacacatttatatgtagaagaattaataagtatatgtagtactaattaatcccaatcctccatgtgattattttagatggctagatgggcaataccattatagaagccaggtgatattaatgatagtgataaggacaagtccttataaattacactcactcactgctgcagcacatcacagatacatacaataataataataaataataataaataaagggacaaggcatccttacatctacccttcttcatttctatatctgtatatattattcataaattctaatatgcttaatcttattatcatctcctttataaatatatatacttaatatgtattaatataacatccacatacctgattaaggaagcttcattaatactatgtaaagagagagaaagaaagatataagagagtgtaaacaaaataataaaccagaaactatggttattatgctatgggaatattgtacatgaaggcagtgcctacttctattattgcagaaaaaaataatcagaataactaaaataattgatatatgctgatcacattcacgtgcaattccctgcaacagactaactctacagctactcaaaagagacataaataataaataagacaaataaaatagtttacattagagtaagggtcataagagatggagaagagaatcttatgtctagatgagcggagattaaaaattaaggtagacataatatatatatattcatatatatatatatatatatatatgtatctgtttccaaaatgtctgagaataaaaacattgtagatgtggagttctagggaagagagtaattggggtacaaatatcaaggtaaaaaaaaatctcaccatttttaaactatttcaacaatcacactaggattcccttcctctctgtctctgtctccaattgaacttttctttgtaatggcatatggcatcttgtgttgtttcttctataaaggacaaatatttttgtcttcacaagtcagaacttaagtggtaaggaatgatcgtatcaaaaaacaaaaacaaaaacaaaactgttttattaaaataaaataagaaggattgcctaagagggtaaaatttggggagtggtggaacttggtagctagctaataataacaagtgtaggtggggtttttgatcagaaaacacaaagattactcatggattctctctgcccttatccctacaagtggttggatggggtggggtctcttgtcattgtagcagcagagcaccacattaatgaaaagaaagaaagaaaaatatatcacagaacaacaactcaactagatcatcttcaatcacagctactattatctccaaatagtgaacaataattctcagtagggccctttattatgtaacaaatgatataaaataagagggtaggtagcttgtttggacctgttagctggggttttagataactatggccaaagtaataaatagaattacaaacaaagaacaacccagcatggagacctaaaagatatcatattgcattatttctattgaaaagaagaaaaggggaaaaaaaacaaagcctctgagcaagataacaaaatcattacaaaagggtatctctatctcccacccattggaactataaaactaagcatcatctagtttaccaatgccttgaattgagcacttgtgcttctgaaagcgatagatatactacaaattaagagtcttgaggtgtctcgaatcttgttggagtatcgattcccatcatgcagcaaatgccggatattaggattataagcaaaacaatgccctgaaagaatcacaaagttaaacaccattagaattttactacaaaaccaatgatggaaacatgaagctcagctaagattcagcataacaacgtctatacatgtacgtatgtggggacagaaaacaagaaaagggttaacttgccaaaggaaaataagagtaatggtcagtttttaatggttcctacagatttaaaaaattcaaactcttcttgggatgaccgcatttaccaagaaaaaacaggatgatatggatgctgacacccatcacccacacacatacaaccaagtgagaacacctaataaaactaagaaaagattttccaagctgaaatgatttgcagaaataatttaaaccatttatacactccaaataagtaaatacataattagaataacaaaaacaaccaccaaactgcaaagggaagatcaaaggtatcgaaataaaactagacaaataaaggatcacagtaagcataatttagtttcaagaaaagcatgctaacttaagagtttcggctgatgaattggattttgatatagcagaaattgtgtagccattcaaacaggaatagaagatggtcatataaaactcagaacttaccactagaagtccctccaaaagtgatgatttgatcttgcaaacttcaccacagattgtagaattggtgccttcagccaaaaacctttctacatcccgagacaatggatattgaatagacttagagggctctgaaacatatagaactgcgtatttttccccagactgatccatggaaccaacaagcttgccaaaagtttcagctgcacatttagtcaaaatacttggtaagacaagttaccttagaccggaatgtaatattgcatagcccaaattaagatacaatcgcgtgatcaatcgatcaataaacaaacagatctactcaaatacaaaataacatactctctgaatctgatttgtgagcactatccaaagagttagactcttcatggcagaacacgagcacatttgcttctccatttgctttcttttctgcccttgaactcaggtaatcctatttcattcatagaggaaagaaaaagacatcaaatatttatcttacaccttaacattagcagtatacgatctcatataccatagtcaaaaacatttacatgaacagactgcacattcgcaagtcttttaaaatttccatccggtagggagcatgactccgagacaacaatattacccaaattaatgttgtttccacaagtctcagtaactccttgtatcaatgaatcgaccattgactcctctgttgcagcaatgtaagggtatgcagtggagaaattagatttcgtaaaggacacctattcaagaatgaagagcatggcatggtagctgttaaagaaaatctgttgatatccaaaatcggcaatagaataactaaagaagtgggcaagaatgcgttttttgttaccttgagaaagtctacaaaatctttgtctgcattggagtttgcataaagatcagaagaccgtagctgcagaaatcaaagtgaataatatcaacaacaacaaaaccaatatattgttctgctaaaatgagtttgtattgaatttttctgttcaagacttttactttttggattagtatgtacaataattatgctaaaatgagtgcaattcttctaaattgttcttaatacaatgttctgtacctcctagtctataaactaaatatgtagttgtag

SEQ ID NO: 188589 - DNA, 3125 bp, Cannabis indica
ataattatatgttctgcatttaatagaacttaagttttaaacatataatcatgtaaagtaagcatttgactaagtctagaaagatttctatttcttttattaataaatataagattacatggaataagttttatttaggacaaaaaactctaatagacacatgagaataattttggacaatcggttccataacatccaagctcagacctaattgtcacgagctcaaaaattgtagaaccgtgagaaattgtaagggacaaaaataaccttgagggcataaaaataattttactttgataatgatatcaaaactaataaattggtaggaatgaacaacataaaatgcattgtttcactaaaaataagacaaaagagcgaagcaaagctcgagataactagaatagaagagttggataagaacagatcagagagaaagcgcgcgaggaaatagagagagcaaatccacatggaaccatccaaacagatgaaagggattgtgcgtcatgcgttcccgcttataaatagaagacaccatcattcaaaaaaggaagaattctcgaacacaccatattactcgaaactctactagaatacatctccgaaatactctcaggctcggggcccaaaaccgaataagaaaaccactgtagagttaggatgaattgtgtaatctcgcaaaattgtaatcttttaactagatcaatcctagtggaaagaatcctaagtggaagtacaattttgttgtttttctaataatttttagcatcaacatataatattaatatgtacacatatcctcgtataaaagacatattgaatttcgaaacaattaataaaatatgttttaagaaatgaatagtattctataattgtagaacatgaatagtaaactttaaaatgaaagagtttagagcatacatataatgtagtgtgtttttagttttaattttttaaatattaatttatctactttggagtatctgagtgttcttgttgttttaatatattttcattaaaattttgaataaattattgggagtgctcttatacttttggccatcatccccacttgccacttgccacttgccacaactcagacccaaaatgtaaaggttattcatagatatctcaaagacattatacctaataatttagttattattttggaggtatggacgatgtaccattagattgaaatgtgcatgggtttgttattgtagagttattacatatctcaattagtactaggttcataccatttttaaagactatatatcagctaccaaatgcctacgtgagataaaaaggaccaaaacaaatgtcctttctcagaaaaatagatagtaaagaaacttcctgaaaatattatattagttatatatattgcttggtgttgttgatcttatcttccctttttttgtgtcaattattttggaccaaattaatgcacgcctcaaattcaggggagaattcaaaatctggttatgtgtccagagaatcgatggatattagatatagcacatggaattcatattaagtcttaggagtgcatcttgctcaacttgtaaactccatataaatttatatagggagcaaattttatgccattattattgtccattttcatagctgttggattttagttggtttgatttaatgtttgttaattatggaaagccaaaatacatagagtagattaatttataatcaatatacatcaagcaaaatttatagtttattgaaagagcattgatattgcctattaatgatactttgtaattggttagtaatattgtctaaaattatttaatcgatttatatgagacttaatatttaattgcactaataatagtataacatttaggagggtgctagacactattaatacattttaacattgatcttattgaaaagtagttgagtttagaggattaactactattcatagacactttatagttgtaaaaaccatgaacttttatattttcttattttttttatatgaataatatatattataattatagagaatctctcataatctttcaaaattataaatgattgaaaaggttaaaataataatttaaactctttatcaagttcgaaaagcgatttaaaaaaagattagagctaaagaaagactaaaacgaaatgaatacattttttttttacgtggttaaggaatcaatgagtcttaatccacgagttaatagtatggaacttacaataattgagcttttacaatatttttgcagagtgtttcttcttgtaaaacctaatgttcgaaccacttttatggtggtgatgatgagatcctatttattggctgccatgcactttgggtcaggctgatttgagcccaaaagatggttttatgtataaaaatagcccactaatgggttaatacatgactcctcattaataaatagcaagtttaggcatgttggcttgggtaggtgagacccaattgtgtttctgaagtagaagactattgcggttcattgtattgtcgatgttgacaagcagtgcatgaactgttgtttatattttggaaaaaggcatgtctgggtctgggtagtgatgattgcattcccaaagaaagattgtacattttagctgtgatcctttctgtgcattggtagaggggacaaacccctagatattgtagaatttgtgtaaaaaatatgctacataggtggtacccaaaacaatactcttccagatgacccttcatatgcccttcctagatattcccagtgaggttattatgggccaaggtgccttggtgaaccttgaatagactgtaagaagtttgtgatgacccgggaaatgaaattttatcccaattattaggactttctcgtgggaggtttatcgcatatcgagtattcatattttcttccatggttgtcctcatccaagtagatgagggaatagatctgggcggaggtttggatctggcttgggcttgttcattgaagcctcatgcagacttttttgggccgtcctgtgaatgccacatgtcactcgagtaaaaacatagacaacataaattatttatttcacgtgcatataaaaatacaaaatatgtaaagattataagtgtgttatgtaatatataaatg

SEQ ID NO: 188590 - DNA, 7148 bp, Cannabis indica
atagtttaggattgattgtattgttgcaggaagaaagtgaactggttaaaattgacatcaattgccttgttcaaggtgatgttgtggtcgagtgtgttagcatgaatgatgacatgcagtgggaagagatgatgttccgatttatgtttaatactgcttttattaggtccaatattttgatacttaatcctgatgaagtcgacatgttgtgggatgctagggataaatttccgaagaactttaaagcagaggtatgtatttctgcttactggattgcatttgttgttttgggttcctttttgacattcaatctgttggctggttgttctttggatgaagattcttttctctgagatggatgctgcaacttcaatcattagacgtagtgtctcgttatttgaggaaaaggagggtcttcctgaagaggcatttgctaaagttcaagagttctttagtcacgtggactggttagatctgagggctgatgctgccttgaatgccctccaacaaatgagtgtatccccccatactgtccatgaaaaatccgacaatgattctcataagagtgctgaaactggtgttttgcagcaacttcagaaaacaagtccaaaagaggatcaaaagaaaatgaatttcaccaagtcagatgatgccttacctgagaatctggaggtcacttgtccaatgactgcatctttaggtgtctcaaactccactgttggtatatcacctgaacctttgggttccaatagtatttttcttgccccgttgacaccttgcaagcccaggcctttacaacctcacttgattggtaataccatatctccttcacaatcacctccacctccacctgctccactgcaaccatatcacatttcgacttcagagcttgaaaattcatcaccaagaaaaggggccataacattatcacaagatgaagctcaaacatcaaaaacaagctcctcaactactcctggagctccaacatcaactacccattttggaaatatttcatctagcccaccctcttcccctacaattgatgcaattagttcttcaactcagcctcggagaactccatctagaaaacccccaccatctccaatcactcccgctccttctacgccatctttaagggaaagccttcaagctagacctcctcctcctccaccaccaccaccccctcctcccacagataatgcaattacgttatcaactcaattaactcaaactccatgcaaaacgactccaccacgaccacctccccctcctcctacactaccctcaagggaaaatacttctattggtcctagaactcctccaccacctcctcctcctcctcttcaccctcggcgctcgaaccccttcttcacgtgccaccaccgcctcctcctccttttcaccttggcccaagaaccccttcttcacgtcccaccaccaccacctcctcctcttcaccctggccctcgaaccccttcttcagtgccaccaccacctcctcctgctcctttcctctcatcaaaacagtcaaagtccacttcacagacctctttatctgctccttcacgttcccccacccctgctcctttccttagtaggacaaatagttcctctaatggtggaaaaggacgattattgcgcaccatcagttccaaaaacaataaaaaattgaaaccattgcattggatgaaaataacaagagcaacacaaggaagtttgtgggctgaggcaccaaaatatggtgaaaatgcaatgtatgatttacaatgctagaaaaagaaaaagatatatgtgtaatgaagttaaattgtgatttcactcttctgttattttaagccttaaatttatttgtttatttttctttcaattagagctccagagattgacatgtcagagcttgaaagtcttttctcagcagcacttccaaatttaacaaacgggaggaaatctatgaagcgtggttcagttggatctaaacctgagaaagtgcaactggtaatttaggttttggctctcattaagtctttgcttaaatattcaaacaggagctttctttgttagtcccttttttatttatttgttttatggcccatatgtaccatgtgaaggtaccttgaaataaattttgatttattagatctaagcagacctttgcactttaacgctggacttatttttggtataattatgtttatgatgataaagcacactggacctaagtatttgattgtcatcagtggagcattacaatttgtgtagaacttaggcaatggtataaaatgagggataggaaattaagagggaaacgggaaatgaatactgacttgataatctcatgctatagtgctctgaaggaatactgaaattagaatccatttgctattcccgattcttgcagattgatcacagacgagcatacaattgtgagattatgctttcgaaggtgaaagttccattgcatgtgttgatggtaagcctttttaaacatattttactcagtgaattcatttatctaaccttattaacttttaattttaacagtagttgaagaggcaatgtattgaatagtgttagaaaactttgcagtgtgtgtctttctcaatgacattagcttccaaaaattacttttgttcataaaagttgactgcataaccagttggctaaagtgtttttgtgtaaaagtaatgaagctaccattttgtttgtgttgagactaaccatacgtacatgtagaataagagattattaaacggcctttcaaccatggttcacatttgcaatacataatcctctctccatggtcatctcaaagagaaaggggaagccaatagttctcaaaccaattttgaaaagaaagagaggaacccaagaggtgtagctcaaaacaattaggcatgtagtgtgctctcataagatatgaggtttgagtatcttggtgttgggtatctacatagcagttagtatagttttatgtctctcaaataatgtgggtaggcgaggagcatattctcctccatcccaaaggagaaatttactctgaagtttagaaagatatatataaactgcaattgttgtatattagtcccttttcgagaagttttttcttaatggtaactgaactaactaaaatagaatggagctgggtgcttatttgatggaaccctgtgaagagagttccttggcacattttttgctatgctggtttatctgtatgaaagtcatcaagtgggcactacctagtgatcataattggatttaagaagaatattaatcgtctaaattattttctggtattgctccttgcagtgcatgttgtacaggatttcaacttaattatgctttgttttgttcttcgagatttattgtgccaaattcattacacattaagaaatcattttctctagttccccttatcaatgtgaacttttatatgacattaacagaattcagtgctctccctggaagattcagctttagatgttgatcaggttgaaaatctcattaagttttgtccaacaaaagaggagatggaacttcttaaggtaggacacagtttttgagggattaccatcttcctgtctgaggttataattggcaattatatatgtgttcaggcctacactggagaaaaggagaagttagggagatgtgaacaggtcagtgagatgttattcttcctttccttctgttaacctgtacccatttattggaaatttgatatgagcatctccatgcaatgttccattttgttttctagaacttaagtttgttaagatctatgaacttaactcttttgctatatttctaaccaaattgattgcatttgagtttatgattgggtgagtaagggtatgtttttgtgagcagtactggttcatgtcatcataaatgcatcttattaagaaaatgagagtaggatgctttcgtgcgcatcctcagtaacagcatgcttccataggtttttttcttttctttaaatctgattttgaacaactgactgtagctaggccatgattaaacagatttggtgtgcatcttaaatagctaaatttatacatatacatatccttcctatcttttacagcttataacatatttttatttgcaacagttcttcttagaattgatgcaagtaccacgtgtagaatctaaactcagagtgtattcatttaagatacagttccgctctcaggtgaatacatatacaaaattagatcaagtagtgttttttttcttcctcttctttattccttacttacctcagcttttattttgttttgtaatttcatgtagatttctgaccttcgcaatagcctcaatattgttaactctgcaacagaagaggcaagttattctacctgctctcctttttttttttcttttcattgtaacaaaattttaaagtacaattcaaatctttttttaattttatcactgatgtttcagattagaaattcaaataaattgaaaagaatcatgcagacaattctttcactaggaaatgctttgaatcaaggaactgctcgtggtgagtagattcttgcgttacgttctcattatctcttcattatattccttatgttgatatttaccaacgcatctatgagaacgtagcaatgacaccccgtacatgcaaaggaacaggacactcatccacattgataaacaaagattatttagtgtattcttttgaaaaacataaaataaaatacagaagtaatagaagggagtcaacctccttgtagggacccaagtacactttcgtgtcaggatggtgttatccaatgtgtgataatatagtaattcaaaataaaatctaaagcaactcttttaattagttctactccaagatattgtaggcgatgatttgacgagggtatttctgagcaaagaaataggctttctgtgtggacatcagtaattgcacagcactgtaggagaggtttatgaaacccattcttcataatttttggtgggtatgtgatggcatgctaggccaccaacacccgaaaattgacatagctggattatatgtggtattgtgatttaaatttctttatcttattagttgtacttgatatgtcgtaaaattctctgttagggtctgctattggatttaagctggatagccttcttaaactgaccgagactcgagcacggaacaacaagatgactctcatgcactatctttgcaaggtataaattgatgaattttcttttccattttataatttaatgtgattattgggtccctttaagacaacttaaattaaacaaagatgtcaagaggattttgaggtgcatagcaaggaaccttgttgtgagctttatgtttcaactctcaaccagttttttatatgacccattattgagtgcacatatgtattgttgacgatacatatttttttagtacatttcctaccaccgaaccctacaatttttggctttagtatttctccgtgagtaatcaaacacacctcattgtgaagaaactttaggcttcaccgctcgatctaacctgatgtaattttttttaaccatgtattttgcagatatttcatgttgctcactattggtttgttcgatgacttgtaggtattcgctgacaaactacctgaagttctagatttttctaaagatctcgggagcttggaacctgcctcaaaggtatattttctcttgtcttgtgaaaaccattgatatttaataaaatctcactcattaaattgttcctttaacttctctagatacaactaaaaattttggctgaggaaatgcaagccataagcaagggattggaggaagttgttcaggaattgtccacagcaaataatgatagtcttgtactggaaaacttttgcaaggtataaatatacatcacccaacttatatatcatctttatttccagccaaaagaaaaacactttgcatacctgtgccttttcctttatagttaaaaggaggttcttatttactagatcttgattgacgtattcttcgcaaagccattttacaagcaatatgattttgtgggtatgcatgggcatagcacagtacttatttctaagatctagtaattaccatttgtgcacataaatatattacagatgaggatgaattagccttatgccaatgcctaattagcataattaatgagttgctgctattttgaaaagaatcttcttagttttggagaaaaaaatgcaacttataaaaatcgtttgccagaatatcagactcccaaacccgtcaatcatctaaatatcttttactttatgtatgctagttattgtgtagctaatgatactcagtgtttgataaatcaataattatgattagtatgttttacataatacctgctaagtttttttccctcttatgcacagaccttgaaagagtttctccaatatgctgaagctgaagtgagatcattagcttcattgtattctgccgtggtaggtttttcattccaagctgcttatatttaatccattagattattatttattcatcttggagttcaaaaactttacagggtagaaatgcggatgccatgattctttatttcggagaagatcttgctcggtgctcgtatgaacaaggtatagacaatcttttgaaataacagaaccataatatattcaataagagaatgattgccccacttcactagcttcagttttttgattgtcttttttttttaaacctacctgtttcctttgctccagttgtttcaactttgctcaacttcacaagaatgttcaaccaagcccaccgggaaaactgcaagcaactcgagctagaagcaaagaaagccgcagaaagcaaaaatatcaagattgttgattcacataaacggtctgaagagtatgtcaatgtatgatccagtatgcctggaacggaattcaaactatcgactcgctgcaaagactgttctttgttaaattttgaagagaaaatgtatatttgtcagtaaagggttttttttttctttctttttttttttcgtctaaaaggcaaagagttcaatcaaaaggagttaggccagtagcccaccgcacattacgccgccgagccggccatctaagaggtaactaacatacttaccacaccaagttcatattcattgttgacaggcataattaaat

SEQ ID NO: 188591 - DNA, 2407 bp, Cannabis indica
tttttttttttttggcaaagtatcatggttaggttaacaattggtttgtttattcaagttttcaaacttattattttcaacccaatttcccaatttaaataaaagccacgttattcattaagtctagctgacaaaggatagttgttattaatttttctttcttgcaagaaagttgttattaattaattggtctgtcatatgctctttactatacgtagccccggccataacttaatttttcttcatcgtgatattattttgttactttccaatttgtccgtattctagtcgtccctctatgtgtaccccaactacgttaggttacattacatgcatgactatttataaacattcataatattttagagggcagcaaaactcatgcataattaattgacttattcactcataagagacagaactacatatatataagattacacaaaaatgtacgtcaaaaaaaaaatgaagattacacaaaaacacttaattataggaaggttttttctcattatattgtgtacctatttaattagctcacttgataaatacgggatcatcaaggtcacgaagcccaaatattaatcatatttctttatttatccaaaaatatatatatatgtatatcaataatatttagtgtaattataatcaagggcttagatacttagtgccgtagacaaaatgagtagctggtagtattatttaatctaaatatacatatacaaacacaaatgggagcggcgatgagattaaaattgttaatggaaacaaaaatatttggaggctgcaatttttacctatgtatattcttcatctgatgccatactttaattaatgcacaatccagtccagtcatcatcacaacaattttatagcaattattaagtgttgattaaacttctcttttattttgtttggatgagttcttgaaaattgtacatcataaacgtatgtacgttcttaaaatagaaatggaaatgtaattaaagaagaaaaaagaaaaaggcattattgcaagaagcattttttaggagaaaaatgggcgcaataatattaggaaaatatgtacgtgaaggcataggacactaaagttacattcctacacgtgtcaaactatcaagtgcggtagccagctggatggtcccactttgattctttgaacaaggaaccatatcccaattattaccgtacacaactgcacatactattattctctcggggctgttgagaggagagagtgtattatctatgtgaaaaattaattgttattatttggtaaatagttagtaatatttaataataataatttaattaattaaattatataaggataatacgtatgactcgttcatttccatgtttagtttagtattgtattaggtatattgtattaatattattttttgtatgatttatattaataggttgtgtaaaattatattaatctttaccacaaaatcaatctaactttgaccccatctaagtctgaggttcgagtttaggtccggagtctaggttcgggtctgagttcaagaccggggtcatatctatggtcgggtactccagttccagaccttttataatattatcataatacaggcttatacagattttttttatgtattaaagaataagacttacattgtattaaaatttatggtttaataatgtaatatttttcaaatgtaatgttacttgttattgaataaattacgaccttcatatgacctaccaaacgagtcttgacacgtttagatagcaattctcaaaagaaaataccctcactattaaaaaattggatttttgtgacaattttaaatagtcaactaatgtatttatggtagtctttataattatcgtctatttgaccgtcacaaaactgggtagaataggcgtcagtggaaagctattggtaaaaatagtctacggtttaaaaccatcaactatagtatagcctatggtttaaaatcatcggtaaaaactatagcctacggtttaaaatcgtcacccacaatttaaaattgtcagctagtatagccgagagttataaactgtaagctatagtgttaaatagtgttgcatccaacccacccaacatcatctgaacctgcttcttgactagtgttcaaacctattggcagggtgcccactcaccctgctgcttcccaccctcaactacctccaaaagttgaaccacaatcatcatctccatcaccatctcgtgtatagtcaccgagtcatcaaaagaaataccatcttgcgttgtcactgaatctctaaaagaaacaccatcttctacctcaacaatcaaacctaaaaaactatctcaaacacaaacttcatctccaaaagaaacatcatttgtctcaacctcaaacaccaactcctgtggccaatgaatccc

SEQ ID NO: 188592 - DNA, 3475 bp, Cannabis indica
cccaagcaagatattgtgcgccttgacgtcccggtgaacgatagcaggaacacagtcgtgatgcaagtaggccattccttcggctacacctattgctatcatgagccgggtgtcccactctactaaacctccgcacccctcatgaagaagcgtacccaaacttccattggccatgtaattgtagaacagtagcttcgttttccgattcgctccccacccaagtaatctaataatattccggtgacggatctttgccagcgtggcaatctccgacgcaaaagccgccgcagaacacttctctgacgctcggaatttcttgacggcgaccggcattcccgaggcaatgtcgaccctgtaaacgacgccggttcggcctcgcccgattacgttgccaggtgtcaatgattttgccacgtcagcgatcgataaatcgagcttttggaacagagtcacttcccaaggtgggcccacgtccacgtcaccatcggcctcaatgtcactatccgagtgtgacgctcggtctctaagtccccgcttgttggctccgatgactatgtagagagctgtgaggaggagcaaccccgccgcgcatagaagcaccaccatcgccacacgcgccgccattgtatgcctaactccggcaacgcgccctctgtcatcgatgcattggttccccgaaacacaaagagaagggttgccggatagaacgctcagaggaagcttcgaaaagaagggcgtgtcaggcacgcgccctgagaaactgttgtgggagacgttgaggaccacgagattttgcatgtcagccagaacgtggagatcgccggaaagttggttgtaagaaaggtcaagtatccccagcttatcaagcgtcgttaattcctccggtacctcgccggtaagctggtttcggctgagatttacagcgatttcaagagctggtatgtttcctaaacttggcgggattcctccgttgagttgattggagctcaggtcgagtaactgtaacttcaaacatgattcgacttgactcggaatcgaaccagttagccgatttcttccgagaatgagcttggtgagcgaattaagtgatccgagagcgggacttaacgatccttcgatcaaattatcagagaaatcaacgtattgtaatgacacgagctgataaaagcttctggggaggcttccggatatggaatttgaatgcaggtcgaggaacgtaagattccggcaaccggagatttcttctggtattgctccggagattcgattagtccctagatcgaagaaattcaagaaccttaaattcccaacttgtggaggtattttgccagtcaatttgttttcactagctctaaaacgaatcagcgatgagcagtttccgattgccggcggaatttccccgtagaggttgttggagaggaggagcaacttctcgagcttaactagctcgaatacaccactgggtattggtcccgtcaacaaattctgagacaaatcaactgcctcgagattccggcaccgagaaatggacgaggggatgctcccctcgagcttattctgccacaagaacagcaatgtcagattggaaagttctccgatctcggtaggaatagtccctgagatctggttgttatcgagctcgatatgggtcatctttttacagttcattagttgaaccggtaagtcgccggagatctggttcatactcagctggagctcctcgagcagagtcaagttcccaaacgatgaaggaatggacccggtcaacgaattcatcgaagcatcaatgacggtgagttgaccgcagttcccaagctcaggtggaatcacgccaaccaagttgttctgccacaggagaagattctgaagcttctttaagttgcccaattgaggtgggatcgaaccagagagagagttttcgtataaatacaagttctgaagctcagtacagtctccaagctcgggtgggattggaccggagagaagagcagtgtatatagctaacgtttgaagtttctttagctttcctaaactcgaaggaagatatcccgagagactagtttcggcgaagcccaacatgactaaattagcacagtttccaatctcatgaggcagaggaccttggagatttttattaccaccagctctaatggattccaactgagttaacttccctatagaacttggaatcccaccactgagttggttatcataaagagtcagccattttagactcgccaggttcccaattcgatcagaaataactccttcgaactcgtttgaattcaaataaagagtttcgagtttcttcaattcaaaaaccccatttggaatttctcccgctaaaccattctcgctcaaatccaagaacgttaactcagatagagaactaatctggtctggtattgagccagtgagattggtcccagataaaacgagcttgtttaatgtcaacaaggaagagaaattagaagggatttgaccaaacaagtcaacgtacttgatgttcaactcgacgacgtcgtttcgatagttgcaggttaccccaaaccacccacatggattttcgtcgaggggattccaattggttaacggctccggcggcggtgaccctttaagactctgtttccatgtaagtaaagcttgaccctggttgtttaaggagaaagccacgaaagggaagaggataataatgagaagtaatagtgaaaaagaagaagaagaagatgaagagagaatagtgcgccatggatttagaggcattacaactatagttcaaactgtccaaccagagaggaacacaaaaagaggggtttaatcctagagaggaaccaaatcatgtctggtgggctatattatgttttcattttatgtttttatatttatatgtatttatattattaatatgtggagaagggaaaaaaattaatatgaaagacccagaatctccggatccaagttatgtttgtgtgcagagaagaaaataatgaaattttagatagtttaattattatttttttaatatgatggagtggtgaagtggggattattcttgtgtttataattaaaattaaaataaataaataacagtagtgagtatagtgacgtgtgtctaaaactatatagtgttgagatacaataataatgatatagtttcatgttctcacttggagttttgcataagataacatcaaaagattgtagatatatcacatgtattttgtacattataatacatttgtatatttatgagttgcatcatatttggactatatattatgaggaggaggttgtgactcattctttgttttttggtggagttctaagcaaagaatcaaaatgaatcaaacctacatatattatgtatatataggtcctatcctatctttgcttctttgttaggcttatatatatactaggtgattattacgtgcaaagccacgtagtgttagtattatttaatattttagttttt

SEQ ID NO: 188593 - DNA, 1422 bp, Cannabis indica
ggttatgacaaaatttatgaattgtgttgatcttggtagtttttgtaatatttcctggatttcccgtgtgaacaatggtgcagcccataagcttgctgcctgggctgcgtcccagaattttttgtggtttttttgattccttctgttgtgaactctgccatgtagcagtgtttgttttctgttgttgtttctttgctggttttataaaggttgcctttctataaaaaaaaaaaaaataaaaaaaaaaaaaaaaaaaaaacaataatatgtgatacatgtatttatatgaaaatatcatgtgttttaaaattactaaactgcccttgtacgatgagtaggatgatttttagtcttaggggcaaaatgattttttgaccaaattatagtaaaatgagaaaaaagggttttacttctgaattttaaagagagactctatattttggtcgcagcgaccttgaggtgacagtttaattttttttccattttattttggtcataactttttactccaaacttcgttttggatgttttttatatcgttagaaagttcgttacgatctctattatttggttcaaagttggagtcctaaatgtgaataattataatatgatattggagattaaacttattgtgttttaaacttgagattgtatagggttacctatacttgttcgagatcacttatggattggaactctcctcatactttagaatctaggtaagaaagcaaaccatgcacttagagtatagtgcaataacgcacttatatatattatgtggataattggatagaaatgtgagttttattaccctaaagtttctatatttatgcatgtattaaatgagttgtatgcaaatatatctcgagaattgtatgtgtaagatgtaattggattaggcatgataaacaccatcaggattgcctagaatttctcccaaaatacttggcagtttaggaataagtcatgtggcaatgggatttacactacggaacgtgtcatctttaatcaattctgaagtttgttattttgctagaattacaaaagattggtcatttccaggaggatctacttggatgacagatggttcttgtcttttgctctccgtgagtgaattcgacccaaaaaagatatagaagagtggtgccgttgtaaagtgcgagaccagtatatatataatttgtagagtggtgccaatgttgagtggtgtggctatacatgtaaaaaatattagggttaaggttagagttaaggttaggattgtattattttttcaatggttcatagtttatgaatttgtagaaacgatagaaaaagttattactgtcgattctaagagttgattgatggaaaaagatttttttgtagtagtgactcattgcttcttttcagcttctaacaacatttttttttttttttgaa

SEQ ID NO: 188594 - DNA, 2979 bp, Cannabis indica
aaaaaattaataatatatataaactaggaaaaatatatataataaatgcatatgtgatgttattaaaaaaaacctttgcagatgaagctgtagaattttcttgttttggttttttcaagcttgtttctgaattattatcttgattatcagacctttttttcttcccttcagaactcgtattaccttgtcctcttccactgccttttgtctgcaaatatataatttaattattaattagccatgtaaaattaagaaaataaaatcccattttaatttttatacataaaattttaattatatatatggtgcaaatcctagttgggatgcactagttaatgttcatataggaaaaaatatagaagagaataataacaataaatcatgcaaaagcaaatgaataataaatatataggataacatttacgtataataacataaaatatgttatgaaataatataataaaaaaatttacttaccggagtagaagtttgaagcccttgtttcttagaatctgacaaacccaaagacttgttaatacaaggcttaatattgttgttattagagccatgcaaatccatgaagggcttccctaatcggccaccaaacgatataacatcggcgaaattcttaacattactagcgcatgaagaataagagtccatcgatcccggccccagccctggacctggccctggcatcccataatgacccgcggaagtcataaaggagccattattattattatatcccataatattattattaaacggccttgcttcatccatctcatcaccatcgccatgtccactatgattttcgagcttcaaacttggaagaaggtagttacatggaggaaaatgatgatcctccattattgaattagagctcaaggagatattgcaagtttgatcatcaggattgaagtagtggttgttgttgttgttgttagtagttgtagtagtattgatgttgatttcgagtggatcgggtggtgcaattgaccatgtgctgattaggtttgataacttgttggttaatctttcgttttccaccattgattcattgatcaaagctgttgaaggagtagtagtagtggtactagtattgatcatcatcatcatcatagtactattactcttttgatcatcaaaattattattattgtttgatgatgagaagtgattattatgatcatcccaactgtttgagtacttagcactattagtattagtgtcaagcttcttcaagtagtcacatgctaatggctcgtacatcccattattactattattattattgctctttgttgatgatgatgataacatatctaggaaattttctcccacgtcttgattatggttgtgtaattctccattgttcccaacatttctgcacaaatacgaaatatttataaagaaaagattttaagttcgaatattctgacaaataatttatttacaagaaaaagaaagttaatttgatttagaaaaatctaagttcttataattatgaatatgattgtgaaccttcctcctatgtgcacactacacctacccattaaagcatgctttatttatttttccttagcttataaaagattcttctttccactttgaaaaaccattataatttctaagaaagtgcaccaataattaaaaattaattctttgctttaaacaaattataccaactagaatttaatcttaactagacttattaaaaaaaatgacttacaataagacatgactccaaatatgattatcagaagcggtttgttgctcagccatcaagtcgtcgctagaagaagcggccggctcaataaggcggcgagaggactcaacagtgaggccagagtggtttgaagcattagtgaaggaagtagaaattgaaacatcttcatcggagttggagttagggttgggagcgatagccaccgcagcttgatgaatattatgccatggaatattaccggaattattgattgtagtagtattggtgttattattgttacgatgatgatgatgacaccatgaagagagagctgatgagccagctgcggccacggccgcagctgcagtagttggatggagatcccaccagttgcttggcgatacaacgccagcagaggtggaaatagccaccgaactctcggcgcattcttcagccatattgatctctcttgtttaaattattattacaaagctttttgttgggtatgaggtttttttttttttataatttttggggtggagaagagaatgaaattttgagaagggttgtggggtgtgatatataacatccgttggtgagaggaattaagggtttttattttttgttaaatcaattatgaggggacaataaaatatgcaaaatgagtattccactatatatcgtggggcaattattataaatgagagagaaagaaggctaaggccacgaaagtgctttggtttattagctagggttttgctactttttttcttttttgttgttggtcaagtttggtttatatatgagagattttattgtttgtgcatataacatattcatcctcatatatatatatatacacatatattaatattctatttattaatattgcataaaataaataggaacagaattatcatatatgacttttgttgagttgaggatactaccaagaaagtgcaaaatagattattatggatcagcctcgttatattttggataaattgataaattttatgttatatatatttttaataatttatacaaaaaaagaattagcaattaatttaaccatgcatgaagtcatgtctataccggaaatatatattcatttcattttctataaggtttaattggcaaaatatttagtcactttttttaaatgattttacaatattattgtttttaacttttgataattttttgtaaattagcttttgtctaaaattcaatgactgccacattttttaaccatgtatctagatcgt

SEQ ID NO: 188595 - DNA, 2095 bp, Cannabis indica
ataatttgatagatatcaaaattctgggaacatagtttagtacatggacaatgactgaattggtaaaattgaatgaaattggacaaaagtccttaaatccaacaatctcaatagttcagggtaaatttttaatagccaaaaaagttcaagaagcatgatttggtacatatcaaagttcagggagcaaaaattataattagccttaaatttatgctttaagttccttcaattctttgcgttcgaaattacttcaatgctctatcaatttggcatagtcggacaaacaaatggcccatctatcaagtgagatagatccagccaggaagtccgaatcctactctactttctggatctttggagttcctagaaggatggatcatcttcgatcacttacccaagagataagaaatgctagaacttaacgaggattccttcaagggtcaccgggattggaagctaaaagagtatttaggatggttgatctctcagaaactacttacgtggcacactctgacacgatctccagaaatatggtgacatgtcccttctaccaaaccttagaaatacacacaacagaaaggaaatcacctttttaagaaaaataccactactctaacatttattttttccaacgacagctcacacttctttctgtcactgtcaacaatattatatcatatgacaatgttttaagtttaagaaattggtaccaagtccaataggtcaaatgtaatgtaaaataatatattttataccatcactgagttttgttaaacaaaaaccttagtatagcctagatctgtctagcccattaagcatatgtatttataaatatggcattatgtcttccatacaaaaagttcacaaagtaaaaaattacatatccgagctgtaaaaaaattcattgtaaaaaacttataaaactgttttgtaaattaaaatttattaacgtctaaaccacataaaattcacgttattctctttttaattttatttttttttaacttttttttttttttgtaaaattattttcttttaacttaatctctcattatatttggttttcggtaaatatatattgaggggtatagtatgtatctataacaatcataaacaatgaattatttaatatataatccgttactagaataagcaattaaatttatcaaaaatataatatgtcacagggtaattaatctacatttaacaaaatcaattaaataggtataacttcaaatttaatgttaccatattctgtgtgtgttggcattactcttatatatgtgcattaaaatgtatccagttgtctaattattataattatcttaattatatcaaaatgggaatattaattttttatttatttaatataaaatataaaagagaatatttttatttatttattttttacaatgcccttgtgattatatttgattttatataaaaatttacaataaaataataaaactatgaaatctaaacaaaattcgagattattctgaaacaataacataacacaataaataactaaaataaaaacttcattgaaatgaaaactacatataacaataccaataacactcatattacttaattaaaataacataaaaaggacacataaaataaaattaacaataattttaacggacaacaacaacaagagaataaaataaaataccagactaacacaaataacttcagaaacacaaataatcctcataactaaagaacatttagttcaagttcatgttattgttgttccttaatggaaaaatcgcatcccttcccccaaacttcattgcattattgttattggcttgattttgtgtatttaagtcttgcctcctctgcatgcccccgccacgattattgttatacgccgtagaagtagtagcagaagtagagtttacttccctattcatgagtggaggcacttttgctgcagcagctgccgccattcgagcagtcttagtttctttggctaattcttccattctttattaatatctttcaaattttggtcaataagcgatgtgagatcattcaaatctgtaacagttaaaccttgaagattcatcttaccagagagattgcc

SEQ ID NO: 188596 - DNA, 1833 bp, Cannabis indica
aagggttttttttttttttctaacatatcaaatatataaaaaagagtaataaataattcaatttttacaaaattttatcggatgtaaaaaaattatctaaacattctatcaaaaaaaaaaaattatctaaacattatttaaccccacaacaaaaaattgaaaagaagaaaagaagaaaaaggaggattgcagcataagaatctcaattatgacatttagtgctcaatctttatgtgtctaataacaagtagaactaattaaacatgtgatacaagctatacttcatttaatttaataacttgagacctttcttaagacaatatggtaatattttgaagggaagagaaagtaagagattatttcatgcaaaaacttacaagaggtactagctaagcaatacataggataaggacattaagctaggaaaatacaaacatgttatacaatatatacttcatttaatttgtgacagaaaaaagaggattaaaggcttaaaatcttaaaggacaattgactgcggcttgctttttcgttttattttttaactcctgataagtagtaagccgatagctgttactataagggtggagggaaagccaaacttgagatgagtccagaaggagagagtgaagccaactggcttagcccggcgagcctgctcgcatacaatcaagtttgcagctgagcccaacagtgagaggttcccagctactgtgctaacccaagccaatatgagccatgcccttttctcttgactcggagatatggctgctgctgatgctgccactcttcctccaagtaagagaactgtaagaaaaacatgtatatagatcagtaactaataaagaaaacatcacttcaaaagggccatattaaaaacaatcattattataattagtactctttattacttacctgtaggtacatttgaagcaatatttgagagtattagtatgacaatggctagaacagctatcccaccagcatgatcgattcgtgcatggggctccattatagtccacaaagtgctgggaattcctgttctgttaaagccatctactgtgatgaacattccacagaagaaaactaggagagagtaggagaccttcacatgtcaaaaaccaaaaacaaaaaagaaaaaaagaatacatgttataaaggttacttgtatatgaagtaattaaagagatatatatatatgaatttgaaaatacttaggctacttagctgcactttaccttgtcaagacatggtccagcatccttgaaatcaagaaccataagaacaagtgctgctgtaagtacagtccatgacatgtttagccccataagcaatgcaacgaccattccaagagtgacaaggtaaagacaagctttccatgattttctcctccatttcttgatcaaagtttcttttttctcagctggctcaatggggatgccattttcgatacagttagccatttcttgaagtccatgttctccttccaaagcaatcttttcctccaactttcttgcaaaagaatcaactgcagccccttctctagaacaaccacttaagttcctcccagactcaacatcaccaccaccacatggggatctgcgaatatttccttcgcccgcggttgcatacaagctcacttggtttggtgagcttctgaactcagaagtgggattattgtcctcaaaagatggcctatgtgacatgtgaactggtgagaattggtgtgaggctgcatcatcaggacatttcacctcctccaaagttgtttcttcatctttcttcatgtataatatcttccaatacatgcctaaaagaatcaaagcattaaca

SEQ ID NO: 188597 - DNA, 937 bp, Cannabis indica
ttttttataagctacgaattgtatatagaaatgttttgattttcattttatacattttttattttaatgtcaaaacaatattaagctatgttgatgtagtgttgcgttttattattgattaaatctcacagctacgttttcttcctctttctattattataatttttgcatttttttgtgttgtttagattgttcatcatcatgttgtattttgttgagttggaagaaagaattgttggggttaaactatctttgaccagaatttgtagatgcatctgtgtttctatttccttttaaagtttttgtttgtttagcattgaatattttcaccaaatgttatactgtttttgcttttatcatgtttttagtatttcaagtttacctaatccatgtaatctcatgaattagttgtaaatatatttagattaaaaacttgtttagatgggtttggtccttctttttgtattaaaaaaaatgtaatggcaataatgaatccactacaattcccattacaacagcaatactataataatgccactagcatgatcagtcgctctgggcaatataggaaactaaaacaatagattaagcctggtggtttcaggcaaccaaaatgaccaaagataaaacctatcataataatgacaattaattaggattagtataaactcaagttcgtaagattcaaaatttgggaagttaaatcatttcaacttcaaagtagatgatgaaaaaatacatcattatcaactaataatacaagaaagttcatgccaatgttatagcaaaatgttttaccacagaccccagaaattctcagcgggataatatcagtgggtttttatttttgtgcatatgatatcttttgcatagtttctccaaggttgcaacagaatgctgcaatgaattcaacttcatgtccatgaacataccctgc

SEQ ID NO: 188598 - DNA, 3398 bp, Cannabis indica
caatgatcagcacaaaatatttttgtactgaataatccaaacaccaattctaaaagcccagccttaggtctatctgctgaagatttcaacatttctttatatctcgatagactagatgaacattcaacatttcacctctgttctctcttactctcttttcttcactcttttcttcactgcatcataatatataatgaaatcgatgacagtcgacagataggaggaacaacagttcttaaatattttaaatataacttcaggaattaccgattagatgcacctgggcagaagcggtggacaacacaccggccacaatttggcgtagaatggacaacaacattagcttgcctgtacagagattaacagatacagtgccccacatcgattggaagagaagaaattgcaaattttagagggataaaaatgaaaagattgtcctattaattactgttattttccattcaacaccccctactaagaatcagatacaactcacatgtgtatcggtgacggtttaagcacaaatattaatagctgcaagtatctataatttactgagtttgacaatttatttgcaaaaatattgagaataaaaattagagcgaaaaataataagcttgccaccagtgatatcatctacacaactggttagcattagcagagtggctaataagatctcattcataaataaaataatcaaaaaaaaactcgactaactgtgaacttctacacaaaatctagcagcaaaattatgaaaacttctctcacaaagttaagaaaaaatgcaaaatcttttgagtacactatatcatatttggtacccgattttaaataagaaccaaatggaatgaacatccgtattccagtaaattcatttcctattttcacttcactcatgatcattgatcaacaagaaacatataagttatttcacgaaagctatcacacctgattgttgtcctcgttatttttgggttcatcgacaccatttagaggatgcaccttcttgccttcttcagctgaatcaacattggagcaatggttcttcagaaccattgaaatatctgtctctgaagctccagcaagtttaaaccgctcaactgcagcatccaggttcttcttccaaccacccattcctagtttacactctacttgggatcgttcaaaaagcatatttccccagaataaatgaatttgtgatctcatcaccgctgcttgttccgctgcttcctcagctgaaatctcaacctgaccaactactccagaggactcactttcatttccaccttgttttttccttcttttcaggaattcttccctcttgactgcatttggatccttgagttctttttctctctgctcctccaacttctcccacatctcagtggcaactttcatcttctcttctgcactgtcaaacagtttcaatgtttctgaagaatcccaacttgcaagatctattttcttagcaactgcaaaagaccaatgaagtttagccatttcaaaatgttgttgtcccagtgccaataatccctcgtaaaagtccggcttaatggagagtgcttcttcatatttctccctggctaaagaatatttttccttaacccagtcataagctgtttgaagttgggtggtcactacttcttttccagcagcttcatctaaaggaattcgtttcctagctgcacacatatgaacatttccccaattgaaaaaagccaacgcagccacctcctggaactttgaggctgccttatcaaaaagactttgagcctcttcactagttactgtctcctcaagtgcctctgaacacagctccattccaagctcatgcaagtcaatatgagcatcagggtcaataccaacatgggtgcggaaaagttgagcaaactcaaacagccaatcatccatttcaagttcctttccctcgggaatttctgaaggtgctggtttctcttttggaacttctttatctgtcttatcagctacagaatcaacagcttccaacaaagattcaccaagcgaggaatgagatccactttcatcacccttaacctcattttcggaaggtttctcctcttcttcttccagaagaggtggctcttgttcaggacttacctccacaatatgcagcctcaacatcccaactgaatcaattttgtcagttccagaatcttttagaacatggttatcagcacaagactcggccaacctaagttcatctgtagaggttatagtcaccaagtccccatcactatccttgtacttgatcaagactgactttgacgaaggaaagcgtttggtcactacttccctcaatactctgaaaccacaattaacaggcatttgggcaagcctaatgtcatgatcataaacaagcttcaatggtctacattggactgctgcatccaaaaactgcccatgagatgaaaatgacacagaggaagaagatgatggttccttttgattacctaaactgtgaggttttgttgaattgcttgacggcttcaattgaagttttggtaactgtgttttggactcagcaccattctcagctgaaagaattgtctgagacttgtcagctttgttgtttgtagaagcagcagatagccctgtcaaagtagttgtcttcttttgcactggtcgggttggtagacacggtcctaacccagcaattggagcaccacggacagcagatgctccaagcgcggcaggggaagggcgactctgaaggtcttgctgtgcctcttgacgaggccctagtgctgtccgcagccgctgagcaatatccaaggcatctcgatgattcggttcaacccccaacaacaactgcacatcctgcatagccatttcatgcttcccaatagcctcaaatgccctagccctcctaagaagggccctgacataccttggctgaacctgaagcgccatagaacattcagcaatcacaatttcataatctataggcttcatttgcataagacaagccgctctattgccatgaaagactgccctatctgggtgatttttcggtgtgagcttaagggcattatcatactgctcaagagcacccacataatccttattctgaaacctcttgttcccttcctctttaagctcatgggccctcttcaaaaatatggaagaatccaaatccacagcaccattagcaataggggttgaaacgttatccccagaaacttggttcgaaccaccctttttcttccttcccccagatttccccatataaaaataacactctccctcttcttacacaggcagctagggtttaatcacacttgcactttgatagttcaactgcaccgcacggtttgagacggcaacaccgaacagggaaaaccaatttactttctgttttgaacgatttccacacgtaa

SEQ ID NO: 188599 - DNA, 1834 bp, Cannabis indica
attttataaaactattttcacttctaaatttttttaattgtaacaaattttgaaaaaaaaatcactttaaaaaattattttttttttcttaatcaatatgtggactttcaccccaacctggactataggacccagatttggccctaacctagacccgaaccttaaccctagcttggacctcagactaggaccgagaccccagacctagactaagcaccgatcccagactcagattagactggagtcaagttctggcctagggtttgaagtccaggtctatgtttgggtctgtggctattgggccttatttttcgacctggttgggctgccacctcaccttaactcccacattagtatgatattgtcgactttgggcctaaatcctcatgattttgtttttggacacttttctaaaaaccctcgtactaaaggagtatgtggaacacttatattcaaggcaactctttcctattctttagatattggacttgggttgataccccaacaattctcccctaaaaccaatgacaatagtactcgtggccttccctccagtgaaaccaccttatgtcgctagatctccatcttgtactgtcgtaatcatcaacagaacatgtcgcctgaccatcacaatgtcacatagacttctgatataaggcaccatattgatctttaattgcaaggtcacaacattgaggggttctctcacacattgcaaatacagcccctatcccaatgctccaaaatttttggctcattcggagtctatgctggggtccaggtgagattgggttcacgtcgagatatggaataatgaagttttatttatttattttagtaaaaaaaatccaaaaataatgtttacaaaaaattaaccaaacacgccttatattttacaaactataaatttattttttcttatttttgaaaacctaattttaaatattgaaaaataaacataatacaaaatatctaaatacatgtttgtcatcatgactaaaaaaaattatattttgagaacaattagtcgcattggacaatatttttttaaaaacagttttcaaaaaataagaattgtgagaacaacaaaatgttgttttctattttaataacacaattatctttttatcaatatttttttttatcgactatatcttatgtcatttaattctcttatcattgtctcacattattttctctctaatcgtttttcacattagtttctccctcatcactttttctctcttcattttctctctcaccactttctctcatcattttttatattactttctctctcatcactttctccctcctgaaattctttctcacaactttctctctcctcattttttctctcacctctttctctctcatcaaggtccgtggtcgaggccagggttcatgtctaggtctgggtctgggattttgttttgggtccgaggtttgggattttgttttgggtctgaggtccgggatttggttttgggaccgagagctgggtttggggtcggggtacgggtccttgtctctggagttggggtacgggtctaggtctgaggccagagtttgaatccatgttctaggccagtgtcgaagccatagatggggttaggggccgaggtatgggtctgagtccatgtccgaggccgggtcgggtcgagtgttaaggtttgggtctgggtccgaatttgagtctagatccaagtcgtgtcttgttcatatcagaatctcaaagtattagattgttttttaaaaaataaattaaaataatttattttcttaaaaaaataaatcaaccaaataccatttgtattttgaaaactttaaaaat

SEQ ID NO: 188600 - DNA, 3297 bp, Cannabis indica
taataccaatgtagatatcataactttatatatacaactatgttttactaaccaaatacaatgatacaaaaattactttaataaaacgaatcattcatataatcatacttttaaattaattgtagaattttttttaagaaaacaaaaacacaaaaccttttacgtagctcagcacgtaactttcatctagtatatatataaaccttaattatttatcattacactttttgggatattacatgaaaataacacaagaaaacaccatttaaatcacaaataaatttaataatatgtgagacaactaaatggctagaaaatgacctaacacatatgaagaaagacagaaagaatgaaagaaaatggcagcctagtcttaagctgtgaaatatcagatttatttatcaacacaagttctgattaagttataaagttatgtttataacggtagtcaggaccattcagtctatccacggtcaaatgttgttatattaagtcttttctagttccgtttgcggccagacttcatttgcttcctggtattagatgaggaaggctgcttcgaaggtactggcaatacagttcctcctttgatgccatctgtatccttcatgctcttgagcgctttctgggcttcaagatagacactgaggtccctaatctgtgaaaccaccatcaaatgtgttgtgtaaatagctttctctaaagttacaaagagtgacagtaataaaaattgaagttttaaagatacattgaattgaattattacctgttcttccatatcatgtatcttttcatccctcaactctagttcggcagcttccctattagtgaatagtgacaaagtagaaaagatttaactggttagattttacttcacaacattatgacaggttttaatacaagagactagtcatatctggtctataagtaatgccacctttcttccaaatccttgagcttcttgcgcaaaacttcttggtctttgataagatttcgattaatcttaggagacaaaacaaacaaaagatgaagccagtataacagaataagagcctgactgacattttgaaaggaaaaaacaatcaaatgaagatcggtaagagtttagggactaagaaaatagacagcctacatctgcaacagtatttttttcctctgtacacttttccatttgatttaggatgtcctgcattttggaagtcactgccctgtctactgcttcataaattgtattgtccagtttacttttggcttctgttagtagagattcataatgctgaaaaagaaaaatagcaaaggaaagtttactgagggaaagggaaatacaatatacacaatcatcaaaataagtaacaggtcaatatgacaggaacagtactcacttgtctttgattctcaagctgattagcaaggagatggttatattcatccacaatctgttgtcaagtaggtaatctaaatatcagtacatgtcatgagaaagggaaaagtgataaacacttaatgaaaaatgagagcaaatgagtgttataggttctcttctaactaacaggttaaaataggaaatgtaaaaagctccagttttcatacgaaatacatactacatccactttgctgctatagagtgctccactaaagccagagtcctcgctacatgtgcagctgccacaatctccttcagatgacaagcagcgagagttcatttcaccaaacttgccatcagtttttgattggttaagtcggtgaacataaatatcaccaacataatcccagatttgttgtgttgttaagtcaagagaatagcagtgctctgtatccttccaatgcctgattgcatgtccttccttgtaccttcaaatatagcaataaatatcagcaactataaattcatgagaatcaaatgtaataatgtcaagctcctatgagtaatttacaaactcttgaaacatgcaaaaaatagctagtattaatttgtaccttccacatccgacgaaaccacatatcacacaaacccacagattctctgatgtcccacaaacagagcaagttggtccatcatcctgctgctgacagtattggcaaacctgatcacatacaaccagaaaatttcattggcaatgtttcaaatattcacttaaaatgatgacaaacaatatcaatatgttttcaaggagtcgaggaccaacgcaatgagtacacattaaagaactgtgatacattagtcttgagaaaagtaaattaattgcagttctgtctaaaagaatcaaatacttgaagaatgtaatccaacctggtcatccatatcgaagatttccaagaaattaagaaacaaaggttcagatttcggaaacataagttcgatctcaaccttggtttatgcttgcaacgaaaaacactcgaagatggaattgttcaataacagataagtgaaaagatgagctccagttaactttacacatccattccataaagaaatataaattaagagtatagcgatgtaattatggtcaatagtcagagtcagatattaataaaagcagtatcccatgtcctttctcttacaaaaggcagaataccctgataagaaagtacaggggaatagcacacttttgggagcccaaaccaagaaaggtgccaaagaaaccagccaccatccttgaacggcaataacaatccttattgaggtggagttcaataatcaaaaactgacatatcatgtgaccaaagtttttggcaagcacatgctagatagccgcacaaaaacattgagatgaatcagggccgggcagctaaggcgaattaggccagcgcctagggcctacccagcctcggggccaaaaaaatattttctttttaaaaattatatatattttagtagttttcaaaaataccacatattttaactgaagggcttaataatttttatttatgtaaggccgacccaatctcagggccggccttgagatgaatgatgcagtcattgcaggcaaccaacagatatctctatttacaaaatagatgtctaattataacttttaatgagaaccgagaacctgctcaccgggcaagataagtcagtccactttgaagtgcaatggcattggaaagaatgatcacaaagggtactcagtattccactagtgtctgaatccaatctctctaacaattaccaaaagaaatgtttataagtatcaatccactagtctgcagaaaataaacaagtctacatttttttcctcaatagcaaaaatatgtaaaagaaatgctagacatcaggtgctaagccagtaaggaaaa

SEQ ID NO: 188601 - DNA, 4634 bp, Cannabis indica
aataattgttcaagttgaatctgtgtagtgtttatattttgtgtgtgtgcagattggagttggttttgatccgaaacaaacaattttcaatatgaatagaggaagatgcaacatgaaagtgaagtgagtgatcgagtttaaatgattacacacacgacctaattatcatgtcatcttctttcttaatccacaaaatgacaaaggtgagcttatttgaaagcatattaatctactttatttaagatattgtttggctttaattggaaggaaaggaatgctaattaattacttaattaaataatgtattttatataataataataagtgtggtctgtagtgaagcatctctactttaataaattgaaacgcacatttttcttttggatgaattagacagttttcatttcgatccaagtcgttgtcggctataaattcatccttgtattattataatttatatataatgaaagataaaacgtgagcatcgctatgttaatgttatgtggtaggaagttgctaatcctaatacagtagtggtcgtattgtatttgtatcattgtatctaatctatctatatatgtatatgcatgcatataattaattcaggaaaaaatacaaacaaaaaaagaaaagaaaagaagattgggaaacaaaaaagtcaatatcatatcattaggtgtaactaacatttataaataatttaatgtaattagagactagagatttcagatttgaaagtaattacaaagatttatgacaaagatgttgcgcctgctaaattaattttgatttatttgtattttaagaagcaggcatgattcaacgcattgggttttgtatacgtattctcttcagtacttaggcttaattagcagcacataatattaaaatttaaaatcctacgtactgtggttggtgaatgagcacaagttatttgatactattatgtttatttatgtccctttgtccaattcaaccctatttattatttattatcaatagaacaatttattaggtcttgtttaaaaaaacaataaaaggtaattaatattggtgaatcttaataaaacagaatatgtattgaagtgttatgtgttaaaaatgaaaaacacatgaaatgatgagtttgtgagaagaaagcaaagagagaataatgtttgttacttaataaaagagtaaagagtagagatggaaatgaggtgcacgtgttgaattgagtagagggaaagggcatagcatagcaggggtaaggtaaggggcatcttaaaattgactgcattattattattgattgctggctgatgatgatatatgacatttgtatataaataaggaaaaagaatcaacaatgattttaaaatgaattaaatgttgcaactttactaatactaataataataataatatattttaagaattccattgaaggcttcaaatccgtgttgagagaccaataagttcataccatataggagtggttgtggctctggttttgggtgtggttgtggttgtggttgagggagacacttggaagcttcatcggagaggatttgtgtcagattctgccttcaaatctaacagactaagagacgagatcacacatttcaattgcacgcaccttcttctttcttcctcttcctaatcctaatccaaaaactactctcttctttattatatccttactatatatatatatatatatatatatatatcttgaaagaaattgataaacccatttttgaattagatcaggctacaccattaataattacatatatatgtaatattaaaatttgggttaagagatgcagtgttcacaatgacctgaaacttttttatcatctagtagatatttgtgtgtgttatgggctgaaaagtgtgtagtactactactcacaatctcgatgactgtttttcttacatatattactcatgaagggggcaacagggttcgatgagcagagaaatatatagtatgtacacacatttatttatatatatatatatatataaatatgtatgatgtttacataaattatcagtactataataataccgttatggactttatagcaattattaatgtcataaatatccaagcatgcaaagttagctcttagttatatgtctatgtctatgtataatattcgtatatgtattgcatattaaggcatatataagtgtgactgtgagggttagaattgatagagtatttagtgtaattattaagtttacatagtaagaagagtacgtaggatagggaaagcaaatggtcaaagtaaatgatctataattaaaaaccttgcccgttttcctctgtcaaaggaaagagagcccattagcaaaaattactagaattatttgttgtttttgtcaccaaatttaggatctttaagctacctttggtggtgtattaagttctctgagttgttaaagaactcagaagttttagaaaaccttattaattaatatagatcgaaattgtcgagtaattagattaattttgagagtgaaaaaaggcaaactaagaaagggaccaaattcttagcctagcccaaatccaatcaaactttgggtttgtgagacagagtttgggaaaaataatgatttggtaataaaattaatgtgttaatgaaatagttcctaaaaaatcatatcaaagtatactagctatctcttttctgaagcatttataattgacattattatgccttcttcaccttttttttctaatgacataaatgccttaattagcttgagaatcgtacacataaaataaagtgacttgtctgcaggtataacctttagtaaatattttttttttcttgttcttatataatgcatacattacaaatatttgggtccatgtatactatacctcagatcgagtgtagtaactatggagcatgctttgaatacagatcatactgtgagtatatatatatatatagacgtaataatatgcatcaattatttcaagattaagtctcatagtatatatatatacatgtatcaactgtctttgtacgtgtgcatatatatatatatctgctacactgtgccagggacatatatatatatatatactgtatgaattgaaaattttgaacatgaaaatgaaaatgaaaggaagaatcttataatgccatgtcaagtgggggcaaatgttgagaaaaggtgttatgtcattttgaaaaaagtgaaaattgaagggacaggcctttattattccttcacccaaagctccactgatccgtagtacaatgaaatcgtaggaaatccttatcgactagtaacatgtttgtattcacatgcaacttataaataatgcatggacacctccgactatacctcctgcttttccttcttttttattccacaaatgttaaaaaggtatctctagtacaacttaagttataacattgttattgtagtagaattaagtatccaattttatataatttaatgcaataattttcatgaagtattgatttttaatcgcaaagtgccacctctaattagtgctaaacatgatacttatttttttgttctaattcattaatacatgatgatgaagtatcgattttaatgtagtttttttgcttcttttttgctcagtatgtatatacatagtagatgatatttattttgctatacagttagactacaagaaagggctctatcgataacattactacatcacaaattggtatgtataagttctaccaacgtcaagtgttactgttgctatgattttatgataaaagtgttaattctatttcttgagtacaaatatatgtgaagttaatactaaaaaataagtacaatatatgtgaatctataatagtgtaaatatactttcataaataatttgatatatatatagatcaagatttttcttcttcttattactccttctttcgttggataaaaatgaaacattttctaatgctactgttgatttaagagtgtcttttcgaatcttgtaacagaaattgaataactaatataattcaaaataattacaaaattaacttcatgtaaaaatagaaaacctaaataatttgatggttgtgacgaatattttatttcttttggtcttcttttatgggtgaaaaaacagaagattcttttagaactatttctattgctaattgttcagtttcataaaatgcatcgattaatgctgaatgcccatgtggccggggtgaaaaaatggtttcgtaggatctggtaaaaagtggtcaaattatgtaaaactaacaagaatttatcaaaaatattagacagattttctactataaaatgagaatataatttctaagtgtaaggaaaaaaaaacaacactcctaccatatgtagaggtaaaaaacatgcacgatccctttaggaattccattaattgatgagtgggttagtttatgacaaaatgttaattatagcttatacaactgcccagcacttaagtacggacactatattttttgtttccaatatatatgtacagcaatattaatatataatggatcatgatgatatataacaccttttgaaaaattataacatatacagatacaataataggggaactagggccacgtgtacgaccctttttttttttctcaaaaaattat

SEQ ID NO: 188602 - DNA, 2303 bp, Cannabis indica
ttaagcctgaaaaaatgtgtgataatgaatgttgtgttttcaaaatgggttggagaatggaatggggacaatatgatgtgttacacagatggggtcagaggcacaagtgggggtggggagagagtagtgaggctaatttgttttattcaatcttcatgtcttactgaactgtccaatacctgtaatcattcctgtgagggaatagtgctgctactgctgcagaacgcagatgtttctttgtcctaatggcactatgagttgtaaagttgtgtcttctctctttaaatatacttaaaacatataaatttacccaaatgacacctttccctttctcgtgctcacaatgagtgagacatgcataagctatcattagtgtcacgcccttgttctcttttgttttaagcttaagcttttgtgttaaaagcaacaattccgaccaacctcatatatacaattgggtattagtgggccagggatactttggggttacatggcacatgtattgttgaccattgcatacatttaactactaaatagaacaaggtgacaaagtaaaggtataacctattcgggtacaatttcaaagacctttttcacatgatgtttatgacatatatattaatttttttctgggcatcttctcaagtagatttgcagctggctgagttaaatggcaaaacttaagatcatttattatttttcttgtaaatgttagaaaaagctcagcattataactaaattcattaaataagtttatttaaaaaaaactaagttacattcccacttcttttcttttctttaggtaaaagaatgttttaaagatcgtaaaccggtaaaaggtaaacttatgcatcccttaaacctaaaaatgtgaaacacacttatataggttgataaacaagctggctttatcccgggatgattatgcacataagcatgctccaaggaagaatcagaaggacaatgtcagatttctgaagtagcaatatctgaaattcccagctcaacacaaagcgggtttagaccggactcttccaaaagactaaatgctgtaaatccgtagtaggaatggtaaagatccggtagcattcccgggaacttgctgaaaccaccatactaacaaagacaaacatgagcattaaaaataaggacattcacagtaaacctcacattaaaactagagaccaattaacagagaaaaaaatggaaaaaaatatcagtctacattattacagcaatcatatcaggttctttctcccactcatgtcaaatgcaagatttcctatctaccctctcaattatttgtattacacactcatacaccaataaaaacttgtggtggtccatacataaaatatatagatataaatcagagaacatattacatcagccattttacagaagatatatgatctgaaattcaataagctagtagtaggaaaggagaaccacatacctcagactgacaagttagcaaaaatccacgcaaggatttttgttcaatgaatttgtggccccctaaaattcgaagtactgctccgatcctacacaagcataataaaccgctcgtcaaaagcaaaataattcaaagcttttgcaaaatccttccaaagatgtcctttcacctaccaaaatgcataacaggtatcactatccttgttggcccggccttgaaatccaccatcactcgcctgcctctgcagcaatacaagttgtattttcattcattaatttaaataagaaaaacattatgttaactatgtcatcatgtctcaaccgttttcacttgctttgttatcaaaattgtgaaaccttgacgttttagccatgaagaaaacaaacctgcaagctccaatccaggagtaatggtacattaattatgcaggatgaccaatttttagagataatgtcatcttcaatgaagcccatcaactggagagatgctacagcgcaataagttgcaccacctgtgccactaaaataaacactgttggataatattattggaaactactggccctgagaaacatgaaaaaaatgcttcaagaaagaacactgtttcaactcaccatgagattctgaaccagggatcaaaccaaagcctccatcatatgactgaaataaatgtttcactgcacataagtatctattataccggatatcaagtcttcatattgtaataacaaaaaggaactcacataaccacaagaaaccaagtctcatctcataaataacaaaacctgacaacttaatatgtactctttggcttttctccttgtccatgccgctccaatttttcaact

SEQ ID NO: 188603 - DNA, 1828 bp, Cannabis indica
atctaaatatctgaaatttgtctatcaatttagccatagttactaattattatacaatatatcatcttcttatgcattatatacccatacttagctcaaaaattgatagtattatttgttttttcttaatctttttgaagaaacaaaaatgggagtcaatggtgaaaatagtagacttgatcgagcaccacacaccacgccatcattcacactaagccaactcaagaaagccattccaccccattgcttcaaccgttctcttctccgatccttctcttatctccttcgagacctttttttcgcctctttgttctactacgtagcaacttcttactaccaccttttccctcaaccactcttatactttgcttggccactttattgggtctcccaaggctgcattttattcggcttagggctcattggtcatgagtgtggtcaccatgcctttagtgactacaaatgggttgatgacatggttggtttcgttatccactctgcttttcttctcccatacttttcgtttaagtatagtcaccgacgccaccattcaaacactggctccattgaccgcgatgaagcctttgttccaaagacgaaatctcaaatgccatggttctctaaatacttgaacaatccactagggagagtcctaacacttggtttctttttaaccattggttggcctttgtacttagcttgcaatatattaggtagaccatataaccgtttcgcttgtcattacgatccttactctccaatatactcaaaaaatgaaaggcttcaaatattgatttcagatattggtgttttcatcaccacattggtgttacaccaacttgtcttagccaaaggattgagttgggttttgttcgtgcatgggataccattgctaatagtaggtgtcttgctagttttgaccacttatttacaacacactcaccctgcattgccacactatgactcgtccgaatgggattggttgagaggtgctttgtcaaccgttgatcgagattttggagttctcaatagtatttttcataacgtttcaaacactcatgtgttgcaccatttattccccaaaataccacattacaatgcaatagaagcaacaaaagctgtgaagccaatattaggagagtactatcgtttagatgagacttcaataattaaggctatgtggcgagaggccaaagagtgtctttacgttgaaccagatgatgaatcttcgaagaaaggtgttctttggtacaagaacaaactttgatcaaatcggcagtggaagaattggttcaaatgttgtgattgtgtgtatattttaagttaagaataagattcatcccaatttgttttagttgttatgatttggtgtttgatttaataatgggtctcttgggcatgtgatgagctttgttttagtttaaatatatgttatatgtgttttggtaagttgggatatgtcaattaaaaattaataccacataagattcttaatggaatcattatattaaattataacacatgtggtgatatcttatacaaaaattgattatgatgacaagaatcatacacacaataaacaagaatcattatattgcatttagtaataaaattttgataaaatcaagtatcgtccataagaactgaatcaccaattactatcaatcaatgttttgtgtggccaattaaaattggtttttgtaaataggaaagtaaatggtatgaacaataaacaagaacacaataataataagataagcaagagaaaactttgaattaaaacaattgggagaataattacggatgaggaatgttaattacaacctct

SEQ ID NO: 188604 - DNA, 2939 bp, Cannabis indica
aatacagtaacgaactctaaaattttacacaagattgagaaggtgaatttatatttatatatatacctttgaaaggagaattttggttcctggtctcttgtcatcccagctaaatgagtagctatcatcatctgagcccattgtatggccattggatttaatgtaatctaagtataaactatccccagaggctctatgaatccaagaagcaccccaaagaagctcatcctaataacaagtaatatggtgagaaaaaaaataataaaaagaaagatcaaaccaaaaaatcttgtagtgttgttagcatacatggtatcctgaataggagcagtaaaatgggcaaacaactgaattaagcgaatcgctataagaaccgcgatgcttatcggcgaaatcaaacacttttttcgcggtttgaagcaatttgttcgagtaagaagggtcagaactcttgaacacaatcgaagctgcagccaatgcagctgcagtttcggctgcaacatctgatcccggatgttgagtagtaactttgtatacatttcgcggtgtgtccatatcttcaggcctttcccaacaccggtgatccatgttaggatcacctacctaaaaaacgagcagagtaactcatattcttataaatgagccttaacctcacgatagagttttggtaattactcacctgaacgtataatgtttcgggtgtggatgtagccgctttaagaagataatccgtcccccaacgaatggcgtctctagcatgctcaatttggttccccatttcgtccccgaactcgatgacactccatgacaataatgtggttgtaaaagccattggcaaaccaaatttaacattgtctccagcatcatagtatccaccactaagatcaacctataccaaaacaaaaacatgtcatttattaaccataacatgtttgatttggtgatgatgataagtactaattaagtacatacatgataagaagagccatcggacaaggcagagtctcctctccaagtgagcctttggtttgagccaccggataacttcccggaccgctgtccttcgaaaaacagaatggatttctcaagtgctgaagtgtagtctttcgatgtaaatgcataggaatgtagtgaaagcaatgaagttaagtataaagttagaatctgaatctttagggagaatttgaaagagggtgtcattttgtttctttgtttattctgttattagttgcaatgaagctaaagggcttagaacttagaagaaaggatgttaagctctgtgttgtagtactctgccttttatagagagagagagaggtgatgatattcacgagatcagttgcggcaaaccagagatttagtggggacaagaagaagcaaagtttatccattttattggatatgagattgagaaggtgacaatcataagagagagtgaaaagtgtgaaaataatttaaatgtgtctcttgtaattggttaacaatactccctaaaattattatattaaattatatagaactcgatatttaattacattaatagtaatattaatacgtaaggaagtcttagacactactaataccttttaacattctcaaatattgatactcaatatttagtataagtctctatttcaaattaacgccacgagatatgatattgttacaattatttattagtaccatattatacatattgctaaatattcctagaggtgtcaccaagattggtccccacactaattgagtcttaagttgtaacaaattatttactcattttcaaaaataaatttggtatctaaatcgcagggttgagtgggctctaaccatatttttagttcgtcttaatttagcctaattttaaatttcacgcattaataatattaaattaatagtgaatattgaatactagtgatgcctaataatactattattaagttaaattaagcttattattaacaatattattacttttttttgataagtgatcatataataatcatgctacattgttgttaaagtcttaatcaatgaattctttaaccaacctaaccataccatacaattggtgcttcttctgcagttggataatactaatagtatatctatcaaacatgtcataatctctaatattctctaatttcatgggctttcactaatcaaaaaaagtcataaaaaaaaagcgtaatttacgtgagtgaaaatgagattattaggcaagtgtttttttttaataatagttttgatagcataattcatggcacatagaaatgtatctaatttgtacctataaggaacaaattagtcacggacacatgtatagtaaagtgtcacatgtcaaaacaataaataaaataaataaattagtaaagtttcaactttcaaaggctattattattattatgtctatgaatttattacacgaggaggtgggagtgactataaagaaaagaaaagaaaataaaaatacctaaaaaatttctaaactataatcactattgtttcatgtgatttttgggtcatgtaatagtgtaatatgagcttcacatggttggtcaaggatttctagccgtttttcggtgggaaaggctgaaagatttgatttttagaacagactttttcagaaccaaacaagacattaaatatatgaaaattctattagtgcactttttttgaaaaaaaaaaaattgtcaattttattttatgattatgtatattgtagttagttaagacatcatgtaaaattttaaaaaataaaaaataaattaatacattaaaaataaaaatttaacaatttattagatgcatgtatgatttgttttatatatattgtatattattcttaatgtatatgagtataaaaaaatatttcgactaaatttttttcttaaatatcgaaacaaatatacccataaaaaggcactataaaagcagtgtag

SEQ ID NO: 188605 - DNA, 1268 bp, Cannabis indica
ataaaatatcaatttatcttcgctattgttaagatattgaactttcgttatcactagctagttttctgtttctctttcaattaagataaaattacataatttgttagccagtttaagggttacatcaagttaactaattgatagattaattggggatcatcaattatcgctttgagccttataagtacattacgcaatcttcttgtcccacataatgtacatttatgatttaagtgaagtctctatctactattcaataagcataaaggacatgccactattcctttgttttttcttctgtgtaacgatccatattcctagtcattgtatatcatgaaatcatcaaatagtgacctcacaccaattacttcacaatttaggtaataaatgattgagaagaaacccagtagtgtccgtcttaatttatattatggtgacattaattaattgaagaatgacattaactaagacagctaacacataaattaataatgaaaaattaacatgaaagtttatttaatcccattgttctcacttcacatgtgcaatttaatttattattttgttttctcttcaattgacataaattacgaattgaagcttttattaattaattaaaattaaaattattacagtggcacactttggaacgaaccaaaggcaaagagctgtaaaggagagacactgccgttgaggggttcaacgtacccgggtggtctgccaccggctctgtttgtggtaaaggacgtgttgagcagaatgaggaagcctgtgacactgctcgacatcaccaacctgtcactcttacgcaaagatggacacccttctatctatggctttggaggtcccactgccatggattgcagccattggtgtcttgctggagtccctgatacttggaacgagattctttacaatttgattctttgaagaaaaaataaatgcatacataaatttatcattgatcaataataataaataataatgatgatgtccttattggaatcatatgatacatacaatatatatataatgaaaaatctcaacatatttctcattttttaaatcatgaaaaataaggttatagtaatgaatgatgacatattttttcagcgaagtagcaatgtggagttgagtactgatcattacagttatatatgtatatatatatatttaaaaatctcttttaagtatcgaaatcattacgtgtgattttcttagtcacctagatgattgccgaaattgatggctaaaataaattagatgga

SEQ ID NO: 188606 - DNA, 5188 bp, Cannabis indica
taaatggtttttcaattgtggatggctatagatttcaatctatcatatgtatctattgtttttacttcagattacaggttctgtaatttaattgttatgatgactgaagttagtcatggttctatagtttaatttgctcttcccaggcatttgcaaggattgaaaatcattattttaccaacaagggattcttttcttcagattcatacctattggataacattgataagatacgccacatagacgctacaattgttcaggttcatatttactttttcatccatgttgtgacatgctcttctgaaatgttcaagattattgctgtacttaatacttcttattgtaatttcaattgttggctcaacctaatagttgtgtatttacctcagacaaggaaatgtaactagtaaaaactatcttttcagggaagatatgatgtgtgctgtcctatgatgtcagcttgggatctccacaaagtgtggccagaggcagattttaaggtaaactgaactaaggccattttccctttttctttttcaccatggggctaaatcaacattgaactttgttggccaaacaaattactgaactctaccatttttaacaggttgtgaaagatgctggtcactcagctaatgaaccgggaataacggcagaacttgtagctgccaacgaacgactgaaaaataaaattaaggctggaagatgaaaggatcaatgatgccataccatgtttgccgaggcaagttttggaggtttcttgtgaataagttgaagcaagtttcttgaaattgctgcttctccatctgactgtaatgccaatttcttcattgaaattgtcatttccttttctcccagtcattgaaatgaagtttctcactgtgaactcaacttgtagttttgttgatattttgaatatgttgtgtattcatgcacattatagagaattacaggattcatatataaattttttcattacaaataaataaaaaatgacgagtatagcacacaggctagtcaaaaaatacatgtgaaaaaaaaaacgaggagcttttagtacaattaaaaaagaatcaatgatattattgaacaaaaaaaaattcaatgatatgattgaacagttacaacaagatacaacaagatatctatcatacagtgaggaacaatttaagccaccttcctcgtgcagctctttggtacatgaagactgaaaatttggctccttgggtatggtactcggccctcttttttcttgacactgatcttgggtatgttacaacaagacatatctatcatacagcgatcgaggaacaatctaaaccaccttcctcgtgcagctctttggtacatgaagactatgaaaatttggctccttgggcatggtactcggccttcttcctcttgacactgatcttggggcaacaggaacaagatgcctcggttgttgaagaaatgctatgtttagacggctttgcagcttccttgcgtctggggatagttgaagacttttcctttattacgccaagtcgaccagatgttttaactgttctgcttgatgcaatcctaaaaagagagtttgaagtttatttttactttttatttttttccaccataaccaaaaactgaaattctatgaaggagcctcacccttgaggtcgaggcctcaatttggctctttctgagcttttttctggggttgttgaaactgctacaccgtgagcctcatgcttcgtagtagaattagtccgtgaagtcctagctcttccctgcacatatggtgacagtaagttttcagatacttctctatgatctagagaaaccttgtagagtaatgaaatccattttaaattataaatgaatcatatgtgaaggggacttacaagcacatgtattttatttattctctttccagagtctgcacgaggaacattttcactttcactttgttcatggtagatttcgtttttctagtcacaagaatgacttggtttagaataatgagtcagaattaaaacgaaaaaagaagtggagatattaccaacctggaatggggtctgatgttttctcaataattttactcctaatggttttactgatgtgagttctttcagaggtgtgggttgtttcttctctaaatttgcttccttgagaatactcctttcctaaatgagcataacaagtaaaatatgtaagtcacaagattggatcgtttctgtaattgataagctggtgagaaaacatttcacatacatcagttctcagtctaaaaggcttgggatttgttggctttggtttcttatactttgtttcatgaacacctaaagcaggaacagaactcgtttttagcgtcttcttcgttgcttgattggtctgcatcattgtaaaagttggaagatgaataaactgagatccagttacaagtactaatttctagcatcatgttcaaatgggccttaataccttatttgtatcgtgattactaacagttttcccctttgactgattgttcatttctctgcagtagggtaacaaacaagtccagttaataaattccagtccagttaaaaaaaaaacataaaaaagttgaagggaaataagaaaaaaaaatcatacctgttaatattggaattttctttttcatcattctcagtgctttcacctccattttctgtgttatcagaaggcaaagcattttctttatcatcaatgtcagcatcctgagcctgagggctgctccttttgtcttcacttgactttccttttactgcatgctcacttgaatcagttaaatgtttgaccggtccagtatgatctatggaattttggtgatcactgtctcctgaagccctctcttcagaactacacaaggaggagatatttcctcttgatgtttctgatagaacttcaactggatgctcatcggaccatgcttctgatgtttccagtgtctttaaattctccacatgaccaattgtttcactgttcttagaagtgcctgattcagaatagccttccagagaaacatccgttggtctgtgatcaatctccatatccctcgaatcattttcaccatcttcatgagactgtagaccacaggactccttcaaatccttttcctttttctttctcttcaaatttttcaaaggttttacttcccggcccttttgagtgtgagattgcaacgagtcataaaccctgcttttaacctctcgtcccttaaataatttccttgaagttgtatctgtagtctgcttctttcccttcacaatatcaagcttcgacatggctgtacataatttcgccattggagttttaaactctactgaaatcttggtcctgcaaaccttctttggagactggaaaaccaaaccttttgcaatagctctagtctttggcaccacaatgttatttcccttgggattccgaacacttttaaatgtatctggatttgatattcgctttctattccttggagtagtcaaagcttttgttgctgcatttgttttcttcaaattggcttttggggttgcagtgatctttgagagagatttgttcttatctttcgagtcaaatagcctgcgagaaatcgaaggaactaccggcattcttgttattttaggcttggatgattttgcaggagctgtaagtgggcacttgggactagaggaactgacaaaagcaaaagcaagagcattatatgagcaaaagatagatgatagaaattattttagcaaacttagtcattaaagctaggtacctcggaggtttcttgtatagtgctttccgaaaccgtatattaggactcctcgctgccataacctgtaaaactcaacaatttgaagcctaaatattagattagtttacacatgaaagcaactcaaatcaaaacggaaatttataactaacccgaagaataaaattcttttctattgcttcagggtcaagttcctcttcatgttttctatcacatcctattgaaaaagaaatagtaagagaagagattcgatgtcaaatgtatgcattcccagctaaggtaaacccaatttggaaagaaaactgtatacttagacaattttggaacgagaattctcaaccaaacatattaagaaaatagtaatgagctacaaagtataacagaaactcaactctttcaagttcaggtgatttgaagaaccatccaaaattacctaatatatataggtaaaaggtttcagtgagctgataaattttcataattcagtttctattctttttctccatttttcttggctaccaaacaaacaagcctacaatctcaaattaagtaataaaacaacataacaaactcaaatataatcagatcaagtaagaattgaaacattataaaagaaaaactagccagagcaaaaaaccaaaaatagaaactaagttcaaaaagtgatggcaagaaagaatttaatttcaacacgaaccgaagcgcaagcagaaccagtaacgatcgtcgggacagcactgttcgggtatagtgaagtcaacgaacttgggtgcttcaatcttctcataaaagtcatcccctcgtccgccatcttcatcgttgatctgctccgacaagtgaggctcctccattcgtagagaaaagctaggcaggcagagaaactggatttggaagtggaagatagtggagcgttgtctgggtttgttatgggacacggtgaatggtaatggtgagagtttttaaatttgggagtttgggaaagaggaaagagaaaatcggctttgggttcttcactctgtaagtagccgttgcaaaagagttttttttttatattttaatattttcggacaagaaggccaagaaaacggcataagcaggggcctttaggtcatttcatgtggttgtaacgggaagatctcggctcttctggtccctacttacctcttagttaattacttactagacgcacgtggaacacattaatgtcaagcccaagaccaaggccaagcccaatcctaggcccaaatttgacccatcaactaatactatcttcttcttctttttaaacaagaatagaaaactccattaaataagaatagcgaaatcaatcattactatattgttaatggcaaaagaaatattgctactaaccgaaaatacaatatgagcaagacaataagtagagttgttagcatgcttcctgtttattgagtc

SEQ ID NO: 188607 - DNA, 1612 bp, Cannabis indica
aagtagacgtagcttcattacttttacgatacagggaatgaacaactataaatttattgtgtctctcttataattactaactactttttcattctcaccaatctagtgatcgggtgtggattagaaatctagtctaaatttctgagtcaacatcgactatatgatatacagtgtcctgttaggcgagagtcaaacataccgttagtcaaatagagtagtgaactcacctaatgaacatcattagcaaccttttattcaattgaaaataactgaaaaataaatttttcttattttcatgagcttcacccattatttcaatatttaaaaatttagccctagcagtcatcttaggagtgaatctactagaattcgattaataaacatctatcttacgaaatataacggtgttaaagttattttgacataccccacccttagggggacaaagtcaatgcgtcttgaggagccttcaaaataaaattcatgttatattgacaataactgagatatcgaatatttttattaaatgagttcattatttttaaaatagtatttttattcatttattttaaatatttatttaatttatttaatatcaatttaggtactaaaaattaatatcccaatcaatgttataacttaaatattatttttattaaataattatgaaaattatcaatttatatatgtagttcaaaaataaattacaaaaatttattttttccttaagtataaatttttaaaataaaataaattttctataaaagttactaattcaagtaggtctaaaattaatttatattaattttttatttaattataaaatttcaataaaattattaacgttattattatataaaattaattcaataatatattaatatgagttaatatttgtattggatatgaaaaattctttttttatagtgttagatattatgtacaactttgatggtaataaaatggggtttatgtccgtagtagttgtaaaaaaaaaaatgcatatagtgcaaagagacacttgagattcggcaactaaattgctacttgtgatacactaatttaagattattgagtaaaaaaaataaccaccatctttagtaagaatattaaatattattctaaatgtaattaaaaatttcactcgtcactaattaaattttaagattttaaagactcaaattcaaattaataattagctttaaaggagtacaaacataacaatctagataggtaataagtactttgagcactcttcttcttattagtaattaatattgatataacatcattacaaacacaaataatagatatatggttttttgtaatccataattactcacttcccgtgcccgttaccaccggatcccgacccggcataagaacctgcagacgagcccgcttctgacccggcaccaccacccgaccctgagctagacgaagaggaagaggagctcgaactcgaagaagatctggagcccgacccagatccagaacccgaacccgctccggcaccacttccactacctccaccacctaagccaatccctatccctgttccaattccaatgccaactccaccaaggtccaaccctaactcctttcttgccac

SEQ ID NO: 188608 - DNA, 2367 bp, Cannabis indica
tctttttcaaaggttgaaatatccccagaacaagaattaaaacaacttctttaatcaaacaaacctattttatcattatccgaaatcttttactttgtctatgtacacatcaaaaacccactcctttcgaaagcaaaacgtccaacgttacatccatggtcctaattggggctcatgaagccgccgaggactggtggtgagtatatgtttgggcttgggactgggcctgagcttgggtctgaggaaatgggtagaacttgggcctgttgattggaaaaccagctgcttttgacgatggtgattcactgttgttgttgttgttactggtaggattggtgttggggttagtaactgtgttggtagtggtggtcgtggtggccacgcgctcacaagaggggcacatggtgagtgtagtggctgggagttgcatgtagaaagggtttgaagtcttcaaagctctgagctcttgaagctctttgtgaagccttctgttctcttcggtcaaagtctcacaacacctctttaagtactcgcaatcaacctctgtttgcttcaacttcgtcctataattattccaaataagaaaaaaatggcatctttttaaaaataagtcttataattacataagaagagacatatatacctcgctctacgattctgaaaccaaacttcgacttggcgaggtcgaaggttgagttgcttagcaagtgcttgtttttgcttctgaaataaaataataataaaaaaaatcagtaaaatgatttgaccaaagggtatttgggtcttttgacttggaacttactgggttgagggtattgtgttctttgaaactttcttcaagaaaagcagactggtctttggagagcctgagtttcttcctgttgttaccgttgacgtcatcatcgtcactggctctaggagaagatctctctgcttcaccctccgagtactggtccctcttattatttcctccactacccctgtagttgtacaaccctatatccatgtgaaacgacgacgttccaccactgtttgagttcggtgacgacgaaagcactgtcgtttcgtccgcttcctccgctgcagaggtgcggaccactactttcgaaaccctattcagttccaatattccacaaccagaactaccgccctcttgaaaaatgaacagataaacgttaatattaaaaaaaaataatagtaataacaataagaataagggttttcatattcttaccctgattttcaatggaagcggaccaggggaagccgcttccgccatgggtgcgaggaaccggagtgtggggaagaaggtcgagctgaaccggcggttctgatgatgacacggtaccagtaccctcaatatgtgaaacatcgtctcttcttctctcctgttctttgttatttagttcttcttctcttccatttcgatcttcagctctagagcgtagtgggccgattgataagtccatgcaaaagggagaagcgttgtcgttatttgagtggtctcgttctcggtcacggtcacggccacggtcacggtggtgcttttctatgaacccaaagggtttgggagggtctcctaaactcaaacccagctccatactgggaaagaaagcaaaaggaacgaaagagagagaaaaaggaaaaggagcaaaagaagacgagtacaataatcacaaatgggtttgaactgaaggaagcagaaagagtctttatagagataataaattcgatctgtcaaacattacgaacgcagacccaacagtgccattccttttcatgacttttttttttcatatatgtaaaatataagtaaataatttattttgattttttgtaattattattattattattattattattattattattactccattccatccatcctataataattttgccttgtgggaaaccagtttgaccgacaaccatctcttaggttgacaaacacacgtgaaaggctatttttattagagagagaagaaaaagtgaaagaaaaataaaaaatgataatttttataaacaaaaaaatgaataaaaaagtggtcccacattctcatcacacttatccatagcgcgtgattatcagatcaatcagaaaggggaccgcaaggtaggggctgattttaagtgccaattattgggtttttctttcttggctgcccagttgagccacttttaagcattgcgctttttcttttttctttttctgttttcaaatgtcgagtgtgttgtcgttccttttctaggttaaataaataaaagggagtttacattttacgaatccaaaacagaaaatatttctgtttctattctattattaaattttggattagctctttctattctttatttattgga

SEQ ID NO: 188609 - DNA, 3316 bp, Cannabis indica
attttttatgaggatatatatatattagtattatatatttaaaataaataaaatatattaaaatttttaaaaagtagaattttagtgatgtattttaaaaaatttatacatagtgtcatgtaaaaatatattagtttttgtgatgtattttaaaggatagaggaaaaagttgttgggagtgcttttatgcatttttgcaaagtgtagattcttgtatgcatttcctttattatttacagaaaatatggtattttactgtattttatattatacttttgttaatttattgttgattttttaatatttgtatgttattatttgttgttattttgatattgtttgtatattatttttctattagttttatgcaattttttttgttatttttgtgttatttttatagaatatcataaaaataaaaatatataaaaatataaaatttttataaactatagtattttatgtaattatgcatgtgaaagttcatatacaaaaatcttaatgttggagtgataaattatttaccaaaattatgacaaattgaccataaactttcataaaaaccacaatattcttgcaaacaacaccacttttaaacaaaacgttattgaaaaaaacgacatctacttgtaaaaaaaaagtaaactttcttaaaaacgacaatattcttgaaaacgacacaacttcagaaaaacgacatctctaactcgtgagggaaaaaaaaaaatctgacacaatgaggtgaagttaacatttctctctatcaacacaaaacaacactgtgaaatcagaagaccaaactccgattcttcttcctcgattcgatctccgatctcatcgatacggcgtagtttaagagattaattgcttcattagccagaattctgatcggccatggctccgccggcacagtctcaacgatctgcttcgccgtctcaaccttcagggtcagtacaacttttactctcttaaaaccctaacacattgaactgttcttgtggttttagtatttttcttcttcggtttttctcggatgccaaacagtagggtaactacatgcttagattttctaattgcgaatatatacagattcagttgaaatgaagtgatgatcaagaattatttgaatttaatttgatgtattttgtatttcttttctactttcggcatccgagctcaacttaattcatactcattgatgatactttgtatggaagaattcggttttgattgtaagaacacgaagattaactcaaaatttacttctcaattaggaaaagcgaagtttccgaccttaaatcacagcttcggcagctagctggtagtcgagctcctggagttgatgattcgaagcgtgagcttttcaagaaggttatatcttatatgacaattggcattgatgtctcttctctttttggagagatggtgatgtgctcggctgcatcagatattgtgctaaagaaaatgtgttatctatatgttggtaattatgccaaggttaatcctgatcttgcacttttgacgatcaattttcttcaaagagattgtaaggatgaagatcctatgattcgcgggctcgctttgaggagtttgtgttcactgcgagtggcgaatttagtggagtatttggtcgggccattgggatctggtttgaaggatggtaatagttatgtcaggatgattgctgtcacgggggttctgaaattgtattatatctcggcctcaacctgtattgatgcagattttccatcggttcttaagcatttgttgcttaatgatccggatactcaggtggggatatcttgcttaagtggttatttctgtaccttgctaaccaatctttcgagaagaatggatgctctatttagtaggattaattggtgaaaaagaatcatgtatattttcattgatttctttgtcctttgtttggtaaaaattggcaatcttaattgatgatagtatgcattgctaagttgatttttctttttcatttttaagggcttcccagttacaaaatttaaggtatttagtacctatatatttgacttagataattgattttgatacactgatactgttattcgtgcaagatggcataccattgagaaatgaactcttatgctttttcttgacctttatggttataaagaaacatataagtataacaaagtctatggaggtcaaaaaaaagttcaacgttttgggtgttctttgtctatcatttgctattatcaatctttttttcccctctttttcttttcttagccatatttcatattctgcttttgctatggaatggctttctattcattcatattattgttttatatagttcaatattatttatcttttgttctctagatgattcaagaaaaggttgcctttttcaatctaatgactttcaaatttgctacgtcaggtagttgcaaattgtatttcttccttgcaagagatttggaccttagaagcgaccacttctgaggaagcatctagggagagggaaactttacttagcaagccaattgtttactatcttctgaatcggtatgaagcagcaaatgctctctttttttattacacgttaagttgtagtgcatttagctattcttttgttcctacggcagtcttttcaggtcataataatattgtgttacgttgaactgtggaaatttggcttaatttctatgtgcttattaggctgtcacatgtggataatcatgcaatatatgctttacttcgcttgtgtcattatggtttacatttgcctgctgaaaaagattttagcagttgttgacggcaaaactcatcatcatgaaaatgttgatggcagaaatgtgttattgataaagatatatgcttgagagcaattgtaaataagactataaagaaagaagaaaatgtatagtgattcgaacctagataggtaatatcccacccacttagtcattctcttttattatgcagtttcaataaaggcactcttctcttttactagagtgagtgtattgactctgtattatagggaatatttttaagctttcacgcatcattcctgactttagtgggatatgtacatctgtaaacaatatttccaaataatatctggagtagttgaggattttcctcttgataaaatttacatgttgatttgatcatattagtttcacatgtcggttcgagctcattttcaacaacatgcatatattaaaggatcttgttttttatgtgtggaaaggggggatatatgtagctgtaatttgttgatgctttggtcaactttgaaatgttaattggtgaaatatttgcatgccactac

SEQ ID NO: 188610 - DNA, 4925 bp, Cannabis indica
tatttcgtaagtgtttggaaaaatttttcccttgtaaggtcttttttttttatttatctactttgtattttttataacattattggacaggagagctcccaaacataacatgagattagttggagtgtatctcttgtgagatggagcagtgaggtttgggcccctcccttgtgtggtgtgagatggaaaaaggcgtggcacaaggggcgactgagtgagagagtgcaatcgaggggatgtgattcgagtgaggaagtgcgagcaaaggggtgaggtgagtgtgtgaatgagtgcgagcaggggaggtccgctcacgtggggtctaggtggagtgaggtcaaggaactcttggcgtgttttgttgatctagtattcttgcatcgtaaagtcatttaatgattcacaacaaaatggtattagagcaaggttcgtatagttgcactaaatatgatgtggaaaaatttatcctcccctcaaatacaagacaatccacattagtatgattatgatactatcagttttgggactaaaccctcacaattttattcttaaacactttcccaaaaaatttcataccaataaagatattatctatccttatatatttattatctttcccatttctagcaaatgggagactttagttgcactattaataataatgttcttgggcggggaaagtttgaggcaaacctcactctcgggaagggataaggccttagaaatttcattgtgaacatatgtgtgatctatcattggggcttgtgtgtacttttaacttaagactaatatttacaaacactaagttaaaaaaataaaagtaaaataaaattagattgtgttctttgcaaattagggctacaaactttattatatatatatatatttcattcggataactctctcattgtgataagtttgcttattgcccgtggcctattaaatttcttagttctaataccaaaaggaccttaagatatgagaataaaaaggtgcttttgtttattcatgattgcttaacaacttcctctagtcaagtgtggtaccttcaaataacattagacttgaagtagatatcttgcttgaattggaagaaatcaaacactgacaaaatcctatatggtgccaaacttttaaagtatataaagtgtacaaaaaaaaaaaaaagagtttggtcagcacttggtgttgaaaaaattatcaactttttgtttgagctggtcaaacaaggcatatctttcattgaacatgagaatatgtccaatagacataataaaggtaccgttagagttcctttcacatgcaatttttaaatgaaaaattaattcacttggaattatgaattgatacaacataatgcaaaaatacaagaattttctttctataataagagagcctagaaattataatgtctgtaatcctatctcctgtccaaatgttcagatgagttttgtctgatcccactacattgtgtacactgtgaaacttgtacaagaaaataaaaggacagcagttcctaccaaatccaaaattcaaaacagctgcactaaggttgtcaacaaaatcaaattaaaaggggataaatggacactagaaacagaaaagttggttttaatccacaagtttacagtacagtttttcgaaagaagctcttacgaactattcacgcacacaaggaactacctcgtgaataagtgcttcccaaagatgacaattcttgtgaccactattgatccctccatcttggacttgagatgggaaaaaaccctgatggtgacaagggaaagacaaggccaggagagggtggaggttgaggacctggacccaaaatccctgtttgaccacccatagggctaaatgaaaaattaggggtcaagggtggaaattgcatccctggagagagcaatgggtagggagaacgcggcgacaacaaattgaagtaaccggttggggacgggagtaggaactgtgaagttggagagggtaagagaggaggaccaccaaattgcggtgaagggaaattatacgcaggtggtggtggtagagggccactcattcttggggaagggaaagcatgaggcatggaggggttgggaagtagccctggttgctgtgtctgaggttgaccaggtggcggtggttgttgatgaggaggtggctgttgatgtggatgaggttgttgatgtggatggggtggaacaaagtttcccctaggagatgggtctaggaatgaattttgaagatatttcatgtatgctgtgatgggagattcagctgtattagcccaaactgcatccccaggtgtcaatggcatgtgaggtggttgctgtccaaattgagaaggcctattgttgtatgaaacagggggaggagcagccgacataggtacaggaggagggacaagagggggccgattgattggtgttaaagggggtggtcgaatcttttgcaaccgcatactttgtggttttggtggattatgaggaggtctaggcaaaggatcttgtgatggggaaccagtgagctgctggacaatgttgcgaaaatcattcttacttatgttgtaaacctgaggctgaggctgttgtctagtagcattgttattaaagttgggttggtgcagcggactcttccttatattcttccctaatttattcacacccaaatggtcattctgtctatttttggagttatccattttgagaaactcaactgaatctcacaacacaagtaaacaacttttatccattccagataaaatgcagcttttcattgggcaagacccctgacaaataatgaaaacaacataaataataaagaaaatcaaagaacaataactcataaatcaaacaacaatagattgattaacattaattttatgacactatatgcagtacaaacttcaataaaacgattttgcaccctgactttacacggtccaattcattatctggtttaccaataaccatccactgagtactggtaggttgagttcaagagcaaaagcgaaaaccttgtcttactaaacttttgcctaggcacaaatgctcaggcttctcattaaagccaccataacattatcataatgtgaaccctattttgatgcactgtaattatcctattttgaaacttcgaatttacacattcctctaacaataacatccaacctccacaaccatgatttagttgcttcctccaacaatctcctctaccccaaactaaaagctcacctcaacccccttgatctttcatactatatgttcttttttcaattgaataagacagtgaaaaataataaatgctaagtacaccagaagacccttacatcgaatatatgagatcgtttatgagatactcttggtaaagagcatatacatacatgtacactcactcaatttgataagttataacagaatcatcgctacaaatggtttctctctaaggtatgccaggaaaaacaaatgtattctttcgcataagggaaaaaaaaagacaaaggcgatcggaacctgtcgagattcgcagtatcagcagattaataaatttgtattgtcacttcgcaatcatcttctcctacaaatttctttcaaaaatagaaattgggaagtcgagaaatattgggggaaatcaatattttgaaaaacagacagttcagaacttcttaggcagttaataattcttgctcacgatcattactagggttttaagaagttaattcttctcaacctaatgatgcaaattgcaaaccctaattcctagtgtttgaacaaagtcaaccataaccatacaaaaatttaaacataaaacttcactgaaaaatgataaaagtccataaactcataaacactatcctaaaaccaaagaagcagagcacgaaatcacaagaacataaacaattaaggcacagaaatgggaacaataaaatcaaatatgagttgttgagaattgataccggtgcccaaatatcctagggtgccggactggcgtcggaaacgatcagatgagtccgttaagggatcgcgatcagagtggcgcttgagggatcgtcacagacagagctcttgaaaaagggtgaaaaggtgagataaacacttctcagttctcagttctcagttctggagaagaagaagaagaaaaagagttcgaatctgtgagatgagagcttgaagatgaagatgatgatgatgactgtaaaaagattaggccgagagagagagagagaaagtggtgcaccgaatgatggagagagtaaaattagggttctttcatttttgtaaatataacaatttaagttgtatgatttacaataataccaattttgatctgttgttatcagaaataccacaaatgtgttgtttttttggtcaaatattgaatattttttcttctttatagaaaggtcaaaacattgaattcaacactcaaattacattcatatttttgttttttattttaaaaaagtgagtggtggggtagtaattatatagatgaagaagaattggccaaacaaaatgctcatcatagagtagtctatacactataggtcctatataattagatccttctttcttgtttatcataatttttggaagattttttatttattttttttttaaaaaaaaaagaaaaaaaaaggaattaattgagttctaaaaataaaaatcactttctttgctttgacggaaaatgaataggaagaagaagtaagatgtaatctaatggaataataacttgacttctcatatatatattctaatgttttataatgtgaactcatctcatgattgaatagtagctttgttttaggagtttagatctataatcagattttggtgatgatcaaattttaccaattgtgaaaattctgttatagattactttacttgttcattttggttgcttgatttaagaaaaaaaaaaaaaaa

SEQ ID NO: 188611 - DNA, 1217 bp, Cannabis indica
agcccacctatctaaacccaatacaaaactcttctctttggacaaattatttatacaaaaaagtcaattttaattatactatttaaatgtttttttgggtagcatatatagtacttgttaagacttgagtttactaggttgacgtcaaggtatgactgtttcttatcaacaaaaataccatcattgatttgtagaaatgaagaagaaaaaaaactagttcattattgtgaacacaaattggtaataaaaactactcaagaagatttgtagcttcattcgagtatatatccaaatgtttcaacaaatgacttatttgatttgtttgaatggaatgacactatcgtgaggaagaggaaaacaatgactttggaagctttctaattatatttcataatttccaactaattgtgtacgtcggatgaggtgacatttttgaattaaatatattgcatataattattaatttaatttgcagttcattttgtgcttatatctattgttgagaatcatggggttccatctcaaaactaattggcaatgagtagagtagcccatgttcttatatatcactcacttctctaccatttattccatgtgggacaatgtccacaatatctatgatgttgttatgtaatttttagtcaaactttatacttaaccaaaggggaattgtacaataaattttgtcctctctaactagggctcgaaatggtctaggcgtgtctctgatcgggtcttgttaggggcattttggcctatacgaagtggctttactttttggttgtgtgttgtcattcttttttgaaaagttctttgtttgggcgcaggccaaattcgggattgaagggtcctgatctgtgtgttttgggtggctgcccaggtgtcagggttcttgtcttgccaggtaggagttggttgtggaataatggggtctgggtttggggttttgggtggctgcgcatccatgtgtctgagttcttgtcctgccacgttgggggggggggggagagagtggggtgggggtctgattctagtaggagttagttgtcgaataatgggggtgtagggtttcgggtctggttcaaatggcaaaagggttgggttgtgtttttagatttgtggtgatgtagcatcgtaggcggcttctagggtgtttattctagtcaagatggagatgtttaagagatgatctaggagagaatagaatgtagatggtt

SEQ ID NO: 188612 - DNA, 2038 bp, Cannabis indica
ttttttttttttttgaactttggataccctgcaggccccaccgccaggtcccaggagacagcagagcatttttttgtagtagctgaggttcaaaccttggaagtctgccctaactaaagaacccttgccagtacatcaactccctggggacaactaaaagagcctattcgaaaactagaataatgtaacatagacgctgtttcttgtaacacattctgaaataaaacacttcgtgagaaaaggcttcaactttcagtcaatttcaaaacaataataaatagaaagataacatggacatatttaaatcattttttttttaaaaaaaaggctggccatagttcttatgaagaatgaaatggaaatgacaatataaagaacctacaatcctaacttaaagtaaacaaaagaaagtttgacgccaccatgcatgtgtgaaaaacaggtaatctgcaacgagcattaatgagggtacatatgcattttacaaacaaattgtaccttcggaaacacaagattaggtccactagttgagttgatcattagtacctccacaaccttgttaccattttcaacacagtttctatacctgaaaggaatacacctgccaaattgccaatgaacacaattgagactaacaagatttaaagtatatggatttgacgcaagatattcaatcaacgattgaaaatgccaatctaccttctgggttatataatacattaacaaataactaaacgataaaactgatatatgttaacacagtaactgttagacccaaatcacatgaatatctgcacatgttcgagttaatatatacgcatatcaatatatttgttgggttactcaactcagtgtacagctccaatgaagttgaattgaaaatttaaaaattggggaaaaggttaagaagtcaacacaaccaagtcaataggtttgaattttaggtacaaaatataatgatttccaaagttgacaaataacattaacctgaaaactgtacacgaatgctatcattcttcctaaacgggaaagctaagatcactaatacccttgcccaaacctatcacggtatggaccattattaaatcttccgaaacaaataattaattacccaaaaacaagactccctcatcaaaagtcatatcattccataatatgaacacggcttatcactttcgtatccatataacttcaaatcatataatcctcatctacctctacaatcatgcacatttaccctccatccattgaacaatataatcacgcttaaacaacacaaagtagaaaaaagcaataacccatttgatgaaaacgactccaacacattccacgccaatgaacccctcatttccctatcccgtcctaatattaaattatagaaataataaatttaccaatttgcagtttcgaacaatcaattccaacaaaggagaaaaacaagaacacatttatacacacatacccggcgatgagacggcaaccgtctttgtatcgctgcaattgacgaccagtacgagcgaccaactccgccatttggccctaaacgaaacaataacctctctcactctctcgtcaaatccgtacgtgttgatattatgatatttcaacaaacttgtaaatgaggggtaaaaggaagaagataaacagccatctgaaacatattccctctctctctcgctcgctcgtttatctctctctctctcgttctctctctctctctcaatatattattatataacagaaaggtcttattaatagaagtttctctctctaaatctaaaaatctgaaagagggaaaaaagaagagaaaagacgaatgggagtgagccctgaggaagggacctgccgcatttaagtagtttcaccgcaatttctcaattttcgcgcccatcaaccatgaaccaccgtacaccaacctagccggtacccggttttccacactttttttttgcttaattttatatttgtaaaaggaaagaaaatgaggcctggaatgggaatcagtttgtttgggaaccccaagttttttttttttttt

SEQ ID NO: 188613 - DNA, 2822 bp, Cannabis indica
tagcagttttttgtagtgtattttttttttcagatactataaagtcttattgtttagtttttctaggcatctccttctcatgtaagtcataactttaatatatgttgtgattcatggattaactaagcatgtcttatgaatatacaatattttttttttttattgaaaaagatccttactcctatctatagtggtgacacttaattgattatctgtttcattccaataaaatgatattgacaaaatatatatggagctaattgcatgatccacaacaattatagatagtcttctcaaagattgctctttttctctcattttgctcttgcagcttctagctggagccatggctaaaacaagatccaagatgaatggaaaacctaaatctacaatcaagaaatcaaagaaaaaaggtcagaattctgcagatgttatttgaaccaaatttatggatgctgtacttggaattgttccattggagcattcaaaggatgaggaagatggcattggtgaaatataggggagaaggagtatggacttgaatcatgaccaacatgatttgtttcagcctccactgtctcctcgtgcttcattacaggagctccaaaggattgaagatgcacgaaaagacttcaagatcatttatgctaatgagaaaatgtaacagtgcacttgctcaaggtatgaaatcgattcccccaattcttcattgtacttctgtagttcgtaacctggtgaactctttcaagtgttctagtaatggtagcaaagttaaaattgagctggaggatatagaggaagaagtgaacttttggaagccttctattgtgcgttatgttttgggttcaacccaccattaatgcatatattagagggttttgcaaagagaatctggaaagagggagtggataaggtttgaatgcttgcctatggtatctttattaggtttaactctctcggcgatagggactctatcttgaatggaggctacatcttcttcaacagacgacctgttattatgaaaccctgggaccctaatacgaattttaagaaggaagatgtcaagaacattccaatatggatacaacttgaagaccttgatctcaaattagcccatcatggttgatgatgttactaaaggaagagacagacttaactatcctcgaattctggttgaagttacgatgaatcaggagcttccaagtatgttggattttaaagatgaattcggatcgaacactcatgtgggaattaagtatgaatggaagccaataatatgctctaacggttctggtatgggacatttggctgctgagtgtaagaagaattcaaaacccatgcaagaatgggctgttaaagaagataaaaggaaggttactgatgtggttctaattgatgatgagggtttccagaaggtcacaaaaggaaagaaagtaatggaacaggagaaacctgctgaagcaaaaatagataatgcatttagtatgcttgcagttgctagtacttctaaagccagtataacaggtgaacagactaagaaacaggaagagcctttgggcatcaataggtccaaaacaagagagggggagtttcctctcttgccaatggacaagtttctttgttagaacgtccgaggtgccaacaaccaacaaaaacaaagactaataaaacaatttattaggtcacaaggtgttgggtttgttggtctccttgagacaagggtcaaggctcctaaacttggagctttgtacctaaatgttttttatggctagtgtttttcttctaacattgcttggtataaaggtggaagaatagtaatagcttggaaccctctaagatacaatgttgacattactaaatgcacaagtcaatttatgcatttaaaagtgtctattgctgattctcattacagtagctacctcatagtagtatgcatataatgatcgaattgggagattggaattatggaaagacttatttaagattgcaacaacagatattggttattgatgggtgattttaataatatattggccaaagaagaaagaattggacataaagtaaagttccatgctgatacaaatttcattgaatgtgtttcatattgtcaactagaggatgttaaagcaactgaaaatttctacacatgttcaaataagcagcaaggggatgatcatatcttctccaagattgacagggtaatggccattcagtcttaatgtgatggtttttccactactgaagctgcttttctgaatgaaggcctttttgatcactctcctgcagtcttaactttatatcctcaatggaaagggggggaagcccttcaagtattttaggatgttagaaaaatcatcctgagtatgaaacaaaactcagggagatttggtcacaatgaaacaaaaatgtatcaactagtcaacaagcttaaagctcttaagctggtgctcaaggaaatcaataagaaaagtttttctgacctccattctgctgcttttgaaaaccaaaattgaattcgaagatttacaggagaaattgcagcaggaccctttgagccacgattgctgctgaacatgtggcaagatttagacatgtcatagtgcagaaagattattcatcatttttgcagcaaaaagctaaggcaaccaggattcaaaatggtgattccagcatactgctttattccatgcaagtattaagcaaagaataaggcaaaaccaaattttctcgatagaacagcaagatgggagtagagtacatgaaccacatcagattactgaagcttttgttacttactataagtccttattgcggtctcagat

SEQ ID NO: 188614 - DNA, 534 bp, Cannabis indica
agaagtcaaaacaaaattctttccatctctaatgctaatggggtaagagctgaagatccccatctcattacttccttatttttatattactacaaaaacctatttggcaacagtatgcagaataggaaatctgtgctgaactctattattaagcaagggcctgtattatctaaggaacaagctaaccttctggctaaagaatttttcctttgatgaagtgaaaaagtaatttttgacatacctggtaacaaagctcctggcccatatggatattgtagcttctttttccaagacaattgggagttggttggtaatgacatctatgaagccattacttccttcttgcaccttggacagctcttaagggagattaactccactattttgacacttattcccaaaactaagtgtccatacacaattggagattatagacatattacttgctgcaatgttctatacaaagctgctacaaaactaatttgcttgatacttaaaacaattctacctagtttagtttctcagaatcagagt

SEQ ID NO: 188615 - DNA, 6020 bp, Cannabis indica
ttattggggtcaaaattaagctatacgacctattaagcttagtatagaaaccccaagttttaaaattcaaatttaagacttatacctaacaaataagattattatttaattattctatttaaagttaaattaacatcagattataatgattattttattattttcccttacaccattattagatttgattagattataaaacctaaatctctcttactcttgctacgtaatatgcagagagcctagaaccgtaagaaaaaaaaatcaatctctatctctttctttcagcctaaagcacaagtttttttaaagaagacacttataaaaattttataccctacaagctattcatctcgttatctatcaaatatttattgttttcttcttatttcattctctttgccaaacaccactcatgcttctcatcaacataggattgagatcatcatcatcattctaataattgagattcaagatctagaattttattaagaagagtcaccaagatgtaagaggatttcttgcacttattggtgtacaatttttggttaaattattgaaatctcattttcattttttctaaaaattattgttttagtaaatagtcacatctctctcaatatttattcaattcatgcaaccttagtgtctatattcttcataatttttatgaagaaatattttactaattcaaaatttttatgtatcaaaactagaatatctattttgttagtcgtaaatcgctttctcatatttcctataaaagttgtctccactaaattagaatctctctctaaatactgatctgtttccaaagatcttagtatctttagaaagcttattagatttttcataagttttatgaagaaaccttttattaatttggagtcatactatgtcaaatagttaattgttttctgtatcatgttattcgtatcttgaatattgtgctttaaaaactgttttagtaaaacttcaatatctctctgaatataataataatttaaaagattttttgtgtcattggaaagggagtgaaattttctaaaactttcatgaaaatattattctctagttctgagtatttttgtttactccatattccttctcagattttgtttgaataaaactatgataactccctcagttttaatccaattttcaatgacctacatatcattagaaagttaattaaattgtctataatttttatgaagaaaactttcactgaatttgtattgttgttggtcaaaaataatattctttttgctatactgtaagagtatgaattttaatcttagggccttgacttatgtcttattatagggagtagtgacaagataataagtcttaagtagtaggattcgaggtaaggaaattaggtaattttatatgtttcaaactgcataatttaaactatttgtgtggaatatgatttgtgatgtattattatgaatgtgtgtatggtactgagaatgtgtggtaatggacacaatatgagtttgtgaatcaatgtattgtatgatttgtatatgttgtatattgtatgttgtatgttgtatgctaacgtctcaagtacaaatgaggggccatggtggagtatcatatagggtaaggtcgttgaatgtagagatatcctaccgtgaatttgtctgattcatgtatgacattgttatggtaaggtatgatacgatgatagtgttgttgaatgtaaagataccttattctatagcaatggtagggctaaatgtacccaggttattgtagggctagtatagacctaggttatgtatgtaatggccatgatatgataaatagtatgaaataattgtgatatggttatttcatagtattatagttattctatgagtatgatagaagagttatgatctctacgtataatgttatagttttagattagcatggatgcatgtaatataattttccatatatacaattaattacttattgttatcaattaaagtatgacattgaaatacgtaatacattaagaatatgatggtattgtatatagttgtattgttgtgaatttaagacatgtatgatgtattgaatgttaatgtgtgttaaaatattttcttattggatttttagctcactccccttaatttctcctacaggcaatagacatggaatattggttataagcgtgatgagttaggtcagttctagtatgcatattgcgaggggctatggatgaacaaatagtctagaatgccggtggacccttagttttgttttcagataataaagtaatccgagctcagtgaaatattgtaaatttattttaaaactacactcaactttttattttatttttaaatatgaataatcattaactttttgcatacttattgtaaaacctgctgtgtatttctaaatagttttgagtgttttcagttaatgcttcaaaaatagtattttgtaaaataaaataaaatattagggcgttacaatttttttcttatatcagaatttgaaggacaatgcatttgatcttagttatcatgtcaaccttgtgtttgtcttgcactactcttatgaataagtaatatttatgtactttatgattataactataggttgagaagtttatgtaagagtaaaagccaacaatgagggtttaaaattctcatattttagttatgtggctactttataccgctaacactattttgtgcatttctattttcttttaatagtattttatttaggtaataatggtttcaaaactttgttcttatttgacttccattctcaagcaaatttcttggtgaaattggctgaatatgaatatgaatttgaatatgctaagatgggctgttttaagagaaacatacttgaagacaaaattgagctattttaagttgggttgcttctcaatcacacgagtaatgattttcaaactaataaactacaatttattattatcattgattcttttactcttagtaaatgacaccttaataggtcccatcttttaactttttcattgtaatttgagtaaagttctttttctttttggtggaatttgtaatatttaaatatatattatttatgtacatgtacagttttcacaaggcaatggatagagcttattaacaagactaagactattttctcttcatttttctcctttgatcagttagattagttgactattattacagataatattgttggttattagactgttattacagttggtttattcctgattttgtggtggttagttactatctttgtactctgctacttgcctatatagattttcattcaatcaataaaatacttttcttgtttttcatttcttccacaatatggtatcagagtaaggaagatatgtttcctttcgatcttgattctctctgttcttccacgccgtgttctacttcttcttctccggcgacgatcagtgtcagcatttgaagaattcatctcttcatcgacactcttctttcttctaccttcttctctctaaggattcttagacgcaggactcttatcttccaattcccataatgtcaaataatcaagaaacagagcacgtcaacgatgttccagctcaaatcaacaatggaaacaataaaaatcaagcgcctgaaatcggagcaaatacacacatagtaagatcaagaaattcgatcgaggatcactcagacccctactatctgcaccacaatgataatcctggaaatgttctagtatcttaattgcccactggacaggataattacattgcttggtgtcgagcaacggagttggccatttgagtcaagaagaaattgggcttcttgaacggttccatacctaaacctcccattactgatcatgttatctataattcttggattcgtaataacaacatagtgatttcttggattattaattctgtttccaaagagatttcgtctagcattttgtacgatgaatcaactgctccaatttggaatgatctcatggtcagatttcagtaaaggaatggtgcacatatctacaatctcagaaagattttgatgaatcttaaacaagaaacccagacggtaagcatgtattttaccaagctcaaaactgtgtgggaacaattgtccaacttcagaccaaattgcacatgtaatggcttcacatgtggaggagtcaagaagttgcaaaaaaatcacaacatggagtacatcatgtctttcctcatgggattgtccgatctttatgcacaagtgagaggtaacattcttgtcatggaccatttacctgagattaatagagtttttcatttagtcacacaggaagaaaatcagtgaggaggacaaagtgtgtcgacagaccccaactccaacataacattttcctttcaaggagaaagaagctcggggaaaccagaacctcccaagaattaaacccagaaacgaggcagacccttttgcatacactgcaacatgcacgaacacacaattgagaagtgatacaaaatacatgggtatccaccaggatacaacaaggctaggatatctaaagaggctgcagcaaatccgtttcagacttctaatgaaacttgtccaaatcctaatgaaaacaacactttcatgcctctattgacaccaaaccagtaccagtagcttctcaatctccttaaaacacaaaccacaaacctgcctcctactgatctaggaccctcgataggtaatccaggtattatcttgacccattgctattttttgcctaaaaaaaggccttggatagttgattcaagtgccactaggcatatttgttcaaaccttaatcttttccaaagtatccatcccattggttcaactaaattaattctaccaaataacaatcacataatggttcacaaaagtggtaatgttcacattaatagtaagcttattttacatgatctttatgttcctacattccaatataatttagtttctgtcagttgtttgacaaaagagaataaccacatcttgaaatactttgctcatgagtttcagatacaggaaacacataccaagaagacgattggaagaggtgacccggctaatggtctctacattttggacaccacaaccgtttccatcaatgccttcatatctcctgaaattcggcatagaagattaggtcatttgtcaaataaatgcttagatttacttcaagattctttacattgtaaaactaaaaatttgcacaatattgaaccatgctacatatgtcctttagctaagcaaagaaagtttcctttcccaaataataaaagctttaatactcattgctttaatcttatacattgtgatatatgggggccttatcatgttacttcctattctaatcacaaatactttcttaccttagttgatgatcagtcacgatttacttagatttatcttcttaaacaaaaatctgacgttcacttgattataccagaatttatttcttatatacaaactcaatacaacaatgttttcaaatgatttaggtccgacaatgcacctgaacttactttcaaagaattgttttctaaacatggtattgtgcatgacttttcttccatcaaaacacttgagcaaaatgttgttgctgaaagaaagcatcagcaccttctaaacgttgctagggccttgctttttcaatccaaaattcctatacaatactggacaaaatgccttctcacttctgtgtttttaatcaatcgcacacctacaccaaatctcaagaacaaaacaccttatgaaatcctatttgaaaaacaacctgataatgacaatttaagatgttttgggtgcgatggaaaggatagtgtttgcatggaatcctaatagcttcacggttaatattcttaaatgtggaactcaatttattcatagcttggtgacaacggtagatgggaagaacatgttctttgttacttatatatatgctgtgaatgataaagatggaaggaattaatggagctggcaatacaaggcccctaggtagttttgggggatttcaatgagattctc

SEQ ID NO: 188616 - DNA, 3591 bp, Cannabis indica
ttttcttcaagtttcaaagttcttattagagaagaaaatatcatttgcatactaatatagtttatgtatacacatataacaatactgatttttttgttatccaagctatcactgtaagcacccatttcctttgaattaattatttaaaattagaaaatgatagttgcatagtagtattgtgatgtatagacatacaactgtactggcatattttggtatccaatctaccactgtatgtggactttttctttagcttattttttttaattagtaggagaaaatgatagtttgcatactcgtacagtcataatatatacacatacacaccacattggctgttacagaaaaaaagtttggataaagagtttattctgaagctcatgatgaaccaattgcttctgtccctctgtatacaggactctggttttgctgcaaaagcagttgatatagtagctaatgagcttattgcacttgctaaacctggcgaaggtatttatattattgtttcttgactaatcaacttcactttggatcctacttcttatacattttcccgtcatgtacgcagttgaccaagtacagctagatcgtgctaaaaagtcgacgaaatctgccattctaatgaatttggaatctagagtatgcatgccatttgtcatgaaatttttccagctacatggtagctcatgtgcattttgagtttataaatttcttaattgctcattgacaatttgtttttttatagatgattgcatcagaagatatagggagacaagtcctgacttatgggaagcggtatgacctgattcataaaataactggacctgtttgactttagcaccacgtttgcacattagtgcataaaaaattgttgtctttacctggctaagctttattttgaaaaagacattgtgtactgtgataggatgcaagtggagcatttcttgaaggttgtagatgaagtcactccaaaagatattgcttcaattgcccaaaagcttctatcgtctcctctcacgatggcatcgcacggagatggtacttatccaatcttttaattatcttgctgtttatgattttatggttatctgcttttcttaataggtctctttgcaattttatttgatttttctcattttatttttggcagtcatctatttcccaagctacgattcagttagcagcaagtttagtgcaaagtgattctattgtacaactaaaccggacactgggcaggcaccaatcttctgtgactaaagtgtttgagaattgcttatcgtgtcaagttccttttacagaaaaaatctgttttaaataaggagaaatttctaattgtcaattactcaataaattggtggttctggcaagcagcccactaggcccgagttattggtggtaggctttgtcagacaatgggtttgaattccagcttttggcttagtgtaatttttttgccattagaaaaaaaggctttcctatttttttgttcagggttaaatatttcctcaagccgaattgcaggcataactatatcagttatatacaccattggattgttacattaaattccaagaatgccaggaattttggatgaaagatctccattgttggtaagagcatcgatattgatgtattgcctttatttttttgctgctagttgcaattatcttatctttatctttcttcttcgaaaattgatggtgagtaagtaggttaagacatttttgatctgagttgaaagttggatacatatacgcacacacatatatctttatatatttatataaatgggtttagttaagatttacctaaaatgtctgatctggtggtgccttgatttgtatgaagttgtgggaattgtatcaccgtgcaatatattattcttatttgataggttgaatgcattcatttcggaaaggttggaactttctagggccactgattttggataatgtatctgagatcttttccatgtattagttaaatacgttaggctggaataatggcagcaaaaagagaaaacaaaacatagtagagattttttcttttcctactttgttcaagtaataaatacaagttctaatcatatctagtgattagatatctttggtaaagaagaatttattttattttattttatttttaaaaaacatattatcttattattattattatatatgataaatgaaaagtgattagatgcatgcaataaagtatatgcccaaactttacttcacaagcatttatttcacttgtattagagtagagtaggataaacaaaatgattaggaggacagtgctgcatcggaacatgctttgttttgtgctatgattagtaacttgaggaattaattagtagtcatacataccccattagaaaagatagaatgttttacttcataccatgcagaaactgcagatacctaaataaataaacaaatagagaatatattaaggcagagccgtagtacccgtatacctattcaaatctcataaagaaaaaatattatgcttccaaggctttatttttttatttgttgattgatacccttctctttaacggctatggaagagaagatactctttttctttaaaatttaaaactaaaaaaaaagggtgcaagaatatattctttgtggtttgtttagtggtgagtttggctaaactgttttcaaaaattaaaaaaaaagaatagaaattcgatagtgaaaattcagtcttagaagcattggttgtgtaccataattggatatctctcttgtttttgttaggacttaattagaagaggttgataggtaagtcaaagacaaaaaatattggtgaagtaaaagggaagcgatagcaattggcagatattagataaacctaacaggctaacatcacttcttcttctttcttttaatctttccctagttagccttacaagtcatacccaactcacatgacaaacttgaaaatccgtacacatatcaacactattactcttttatcactagtgtgatcatcactcttcaatttccaacactacaaaatatagaaacataattttttttttttctagaggtcattattataatcatattactattagttttgtcatgtaaaattatatggatatacatatattaattattatctatgagtacaaagttgacacgttaatatgtgattaattaaaatacaaacattcattactacaaattattaatattattattcttattattatgaagttgatatttgtcaccctaggttgatgagaggccataacttttaattttcttccaatttattcttgtctcagcatagccaagcccccctaaaagaaaaaagaaaaaaagaaaaaaagaaaaaaggggacaatctcttcagttcttctctctcactctacttcactttgagttatgattataaacaagtattgccgaccactcatatgtgtggttataaaataacctattgacagtgagaaaattagtaaaacatgcacaaacactataatgacaaactcattgatgaatgtttttttggactataccatatgacttctctcattcttcttcttcttcaacttctaattaatagtatatt

SEQ ID NO: 188617 - DNA, 6178 bp, Cannabis indica
taaggattacaacttataaaataaatattgacatgtctagaattgaattcaaagcaagaagtttcttgacataatcttttatgcatgagagactgatcattcatttcatcatattctacaggtgctcttgttggcgttacctgccatataaatggacaaaagggtaaatcaagttggataaaaggtgtgacagatgaatatggagatttcaccattgaccttccttctcacttgcatgctattccccacttggacagaaaatgttcagttaaaattcttaggataccaaagaactccttatgcaaaccggcttatgtgaagaggcacaagagcctgagtttgtcgtctgtcggtaatggaattcgaacctatgatgccggaacagttaggttccaacatttgacatctacaacaaaacaaggatgcgttggaaaacagaacagctgaaagatgatattgtagggagatcatctgttagcttacttgggatgcagtagcagcaccacagctcagaagatggcgcttcagtcacaacattgagttacagaggttcaatcccatcaatttagctgcagatgtgtaagaaaagagaaatagaaacacgagagaaaatattacatatgacgcaacgcaaatgtagttatgaatgcgtgtatacaatcttctttttataatatatatgctttgtgtgatatattcctaataaggtatctaaacagtactaaaagttcttcagcgcaagctattacgcaacaaaccattattattagatgatgagttctctcttaatcagagggttctgcatattgaaaaaaccttacaagttaaatatgaaaggatacaagtcaaacaaagaggacagccaataaataaattttagaaagcttagattagtgacagaaaaccaggcaaacaaaatcctaaaagggttgcattgctagtgaaaaacattccatttaaaatgctaatcaagatttctgctcagcccctttaactaagaatttagcaacatcagcacagcaagtcaacttgtctgccctctcatcaggaatttcaatggaaaattcttgttcaaaagccatgacaagctcaacccgatctaagctgtctaggttcaagtccttttgaaaatcagctgtttcggtaacctgatttagtcaagtgagtgagtgatcaacattccatgttagtttaaatttaaaggaagcaactgaaggactgttatttcacgatagtataacatggacagcaaaagtagatgtaaattgaaatcataccttagaggcatcaattttatcaaatttcttaacaagtacaatcactcgaccccattacttgatcagtgttggttgcggttgatgtggacatctgataggttagccgtttcagcatattcctatttgcagagagcagtgtatcagctgatctccctgctctgacatgccacaagatggcatttttaatgctttgcatattcagaagagctgaaaattagtgaaaccaaactgaagtcaaggcataaaccacaggagccattttcattaatagccaataaacaaaaaaaaaaggaattagttaaagatgagttcctatctccatgatacaacaaggaagttgggaagagctataatagcaatataatcaaaattttcaaaagatgaaaaaacaacaaaaactcaggaaatgccacaaataacccccattttactttaagctaaaaaaataacatgggatttaaaaatcccagtcctagggacctaggcaaccacagattaaatccaattatttttaaactaagtacatttatggcatcatattgcttaaatcccacagtgctaggatgataactgcaagggtaattaaggtacaatgcatgcagccaaatttaacttagccacacccaattttccttaattgaaaaaaagaaaaaatggcggtgggtaacagagatacagtgccatgaaaatgttaaaagagaaaagagaaagagtaagaaacctatgtcctcttataaaacaggtgagagtctaaacaagaattatctatcagataccaataccatctgaattctctcacactatacgccaccgtttcactcaactcaatctctcttcttcaaactcttcaataaattagcgactaatctataacatagtaagaaattgtagtttgtggccgttccactgttcacgctctggaatataatcgtatagcgacaaacttttcaaacaaaggggggagtgaattaacaatattgaaaacctaaaacccattttaagaaatccataagaaataacatagaattggtgttagactgttaatgataactcaccgttgtatgagctttcggtttgagagtagatgaaagcaatagtcaatcgccccacgcaatgtgttcgctaaaatgcctcactcagattctgcaccacctgaataggaaatgcaagtttaacagtgctggaagtgaaaagtccaatttgatttttgaaaacaaataaaaacaaaagttcaaataatgtctgaaagctcccagcgaggatcgaactcgcgacctttcccttacgaagggaacgcactaccactatgctatggaagccacgctgataagttttttctcttatattaatataacattatctaacgatagacaagactcaaaacataaaaaccaaagggtgcttttttttaggtatatttttggcatagttttgccgttgtacgttgcaatagggccaatatttcaaaatggaatgaaagtataggacaggtgaacaaagtttgtgctcgtgcactttctctcaacagttccattcaatgaaaaaactgtagaagtaattcaagaaagataaatttgagcactcacatatgaaagggttgtcatctaaaatctaaaatctaaaatcaagacaaaatccttgaattgaagatccctctgataaacaaaacaatattaaggaactttctcaatacattgccttttggaatcaacttgatcatggttttctaagtttactagttcatgatgttgttcctcttctttttcaacacactgccttttggcatcaacttgatcaaggctttctaagtttactagttcatgatgttgttcctcttctttttcaatacactgatcgctttctaagtttactagttcatgatgttgttcctcttctttgtcagcttcacatattttcctctgaggaatcacttggaagaaagaatccttccaatccttggtctccaagaacttgatgagtatctctatcacttgattcactgtgaggacctgcattcaaaaccacaatgtcatattacatcgtcccagatagtaatcttcactgaccattatttttaagcctctatgcattcctcacatgtatgtctattaatcgtttttaaaaggaaaattataaactgaatatattacttgttatcaaatcatatttattattaatagttttaaaaaattcaattgtctgaaagttgaagtattaaataatctacttgcatgcatcacaatacttggccagagatcttaacaagaatactcttcagatttcaagaccaattgccatcatatcacgatggcttccgcttaggcatttaaaagtttgttggcactagtagtactagtaagaccaaacagctgttaaaggcaacaatggtgccatttgaggtagctgctaatgcatattgcatggtatcaaatgagttcatataccgtattcaatatgtggagcgtgtaaaaatgaaaaacaaacttaatggatatataaaggaatgcagttcttatgataataaaagagtgcctcttactaacttcatacctgggaactagccatcttcaagtaattccctattgggagctttgcagtttggatgccctgctcttgtgctttcttcattgttatccctttccaccgatttcgatccactaatccaccaactatatacattttctttggatcaagttcatcaagcacagtttctgaatcagctgtgagatacaccaaatgttccttttggtcttgcaaagcttcaatatatggtcggttgtccttttcgattatccacttatcaaatcctgggagcctttgcaattgagtaccaacctctccagcgcatccagtcaaccaaagatggccggggttggtacatcttccattgactgcatagcaatacataatctgcagatttgttcaatatgaagggacatcacatgaagttagaacacagagcacaaatgactttgaattggccacctagatgaactacttatcaaaattttctccaaacaccccgtagttgagaatgggcctcaaacaataaagatacacttttataagaataatttgaaacaaaaaagggaaatgctgacacaaatatgtgaaccaaaaaatatttcaaagaacaagtatcacaaacaaacatcataacaaaaaaggtggttagagggaaaccaagaagataaaacctgctgaactaagctgttgatctcagaaggcgtcatgaggtgagagaactccatgtctatgataatgttctggccacatagtttagctttagtgagtctctcgattttactctccctctcttctgacctcttatccattctttcttttctcatgcttttacgagactcaataagctttgagcgctcttcctcagggaggctggccagcatttcttcccactcctttcgcttcctttctccatccttcttcttttgctcctttgcttgtgctttcttctctgctttctttgcctcatacttctgctgctttagcagcttcttttgggcgttcttggacaaaggttgctggggtatctctgaagtagctacttctgaatttgggactttctcgagtgcatctttctcattttgagtggcctccattgaaggcttccttaccttgattttaagggggctgtgctaaaaacacaaaggcaattgacagataagtttatgcacacgtaagaactaaagcatagcacatgtacaaagaaaaactatctagataacaatcaaataacttattcttgtgttggtcattgctaaacacgtaaaagatctaacataaaatcaattcactgaagtaacatataaaagtacattgcatgaagttgcggcaggcaataccttccggacacaacagcaaacaagattaaacgagtaataatacgtgcacacgcaaatcaaacacaaatttaacaaacacctatgatacttaaaccgatcattttcatttaagatggatcctacttgttcaaaatgtcttgccaagtaagtgtgtgtacatatactcttaatccaaaacccaaatatgcatacagcctaaatcaatgcatttggtaccatcttaattctcaaacactacactcatttcaacattcccttacaattctcaataaattggttaaaatttgtggctggtgccactgtttatacagttaatgcagtatcagttggacaaaaaaataaagccaccccgaaaccccattaaaactacaaagtaatagtataaaatagaaataaacagtaaattaattcgtaccccaggagtcaaaaactgaaacccataacaaagaatttcaattttcgcaatgtgtgaatagaaaaaagcaggatttgaagtagacttaacggacagattaactggaccgagacgcttagcgacgaagttcattgacaggaatatgaaaagtaaaaagtgtaaaggaagactcacgagaccagatactgctatttttcacttctctgtctgatactatagtcgtgggcgcttgaggacaatgtgttcgatgaaatgctacaacgacggattctctatgctcttgttgttgtgattgtgaacgaatagggtcggcgggcgccgtatgctggattgggctgctactccaccatcaaatatcaaacaaaagcccatcaacatatggggatggtgcatttttgtgtttttttagtttgggtgacatttttaatttttgaaggcaccaaactaccatttatcctatcaccaaaattttatttcaaatttggtagctactaggtgaacacacttaagtttatttttttttttttaattttaattcacaccaaagtagattatttgtatttttgatgtctaattatattatttttatgtatatataataatgtgtatacattatattttaa

SEQ ID NO: 188618 - DNA, 680 bp, Cannabis indica
taaaaaaataaaaacaaaaaattggagggttattaagatggctagggagtgagattttgactagggacaaaattagattaattatagtcatagataagagagatttgacttgagaaccaattagattagtaactagattattgatttgagacacccttttcacaaaatcaacatatcatatagaaatgattagggtcaccaataaattaatttttttttaaaaaaaaaaccaaacaaattaaatgctctaactattaattaagcaaactagtttaatttcttaactttgtcacccaaaacatggtcaagaaaagatcccaatttatgttgttgccttgctttcttgcctctttgttttgcccccacaaaacaaaatacccttcttaacaaaacaaaataaataaaataataattgctaattttttttttaaaaaaaacccttaacaaaaaatttcacaaacattctttttcagtcaaccttatttgattccttgtttaatttgtgtctctctcaaagctagctttgtattctctttggacattaataattttgttttgggcttatttttaattttagagcaaaaagtgagattactaatgattagctataaacgaatttgtctttttttttttttttttttttttttaattagaaaaaaatcttaattgataatcatcat

SEQ ID NO: 188619 - DNA, 2953 bp, Cannabis indica
tgaattctcagtatctgttacatgtcaagtaagttaatcccagttgttaccagcgcaaattaagacaattatccttgcttggaaagggccttaaatctattctacaattgtggtaaaatagtgaagtagtggtgttaagatgactagctaatggtttagtacattagaatggtttggcttagaagatgattgtatgagaaagtgtagaaagctttattgttagtttggatattagttacacaatttgaaatccttgatggagtatttataattgctcacctcttgcattttgtggttaaaataatttcttctagatatttctttcactagaagaaattatatccatacacatctaaatgtttttagacttcacttagttagtatattctacattaatctattctggaaattacttaattaagttcttaaagaattttttttttctataaatgtgtagaaatttttagactaaagttttgtagaaatgtgtagcacattctaataccttttcttggtacacattttggtaatttcgatcaggtcttgtagtagctcaaacttgctccttggtagtgctaatttcgtgaaaatatttaccaacttttcttgtgtcttgcaatgcttgagctcaatttctttgattgtttcaacttctgatgaaatgatatttgatatgcttatatgcttggtcctcctatggaatacaagattcttcgctattgctatagttgatttgttatcgcaatatatctttgtagcttttttttgatgaatctcccatatcttcaagtattcttgtaagccatatagtttggcatgtagtcattgttgctgcaacatattctgcttctgttgatgcttgtgcaacaattgcttgtttctttgatgcttaagaaaatatttttgatccaagtgtgaaggcacatcatgacgtgcttttcatgtcgtccatggatcctgcttaatcagaatatgtgcggccaaccagttttgactcattcgtgatttcgtaccatattccatagaattttgttctttatttcaagtatctaagaattcgcttggctgccctgtaatgaacttgacttggatcatgtatgcatcttgataggagattaactacgtacattatgtctagtcttgtagtagttagatagtgttatttgtgtttctggttaggggacacgtggacacaagacaagtaattaaagcccatcagtgggccctaaacgacaagaattgggccaagcccaatgccaagttggccttctgggaaggcaatcacattgcacgtccaagcaaaccttcgccaagcatacttcgtattcgcagaatttcaagctttgcatagccagaaagacccatcaccatgcatctggaagccagtagtagttttccatttgccaatccgcatagaataaggaagttaccttctacggatctcggaaaaagaataatatgaagttaaaaaaattacataattaaagatcaaataatcaatgcacaattaattatctataatcaaaggacacgacataaacaactatcactgtgatcaacctgccaagtcatcatacagtcaatgcctcatgggctggactttatacaataagtctaaaagtactgtattatttgtaaagactccattagagagaaaatggtaactaagtataaactctattactttatatatacacaacgaatccttcatgcaaagggttaaaaaactcttaactcacaagcttgagaaattggacatagtgtaatccctttggtttttttagcctaagagataataaaattgactcgtggactaaagttctttaacactcaaactacgtaaatactctaagtattctctcttgatttatttcttttgattgtttttctttagttctcatattaaatagtttattttttaaaaatctcggtaaatatcttgatgctttcattgagagctagtaatcataccatctcgaattacgttcagtaattatgatactcacctaaaacaggtttggtcttcactatactgatcctaatgttaagacaagagatacaaaagatctaactgaggtgaccaattgccacaagaaagatcaaatctctaaggatcctatggtcgaagacgatgaatcatgagagaatagttctgatgattttgaagatgttcatccagacatgcctaaagatgatcaggacatgcccgccgatggtgctgctagaaagaaagataatcttgatgagtcagatcctgtggtcacaatggccaagaaattacaaatagctaaaaataaaggtgtcccctaccattttgtaccaagttaaaaattacataaattgagttagaaaacatagccttttccattaaattattctctcggatactattcttatactttccagaaagtcgttaacaaaaatggctaatgctgaccaaatattttcggtaatcttcacccgcgataaataaattaatgtttttccaagtgtgcaccaaacttagaaactcaaaattcccaattaattgtaatggattacatggcatatatttacagtttgtaatatatcgtacggattaccaatattggaagtcagagacatggcttttgttcttttactctaaacggaaaatattgtgtgtatgtgtgtgtgagcttgatgcatgtgatgttacccttttcaacagtgtaaaactctttccttcttcttcttcttcaaactcaacaaattaataaaatgaaaagttaaagtactaactcacgtgtagcaaagttttaacacatattgctcagcatattcaaaataatatatatatatatagaaagccgaaaaattatttaatgtgatgaatatatgttgcaacgaaaacgtgaactattttaatatgtactcaatattcactgtacgtacgtgagccatgcatgtgtgattgctctcattaattttgatg

SEQ ID NO: 188620 - DNA, 2342 bp, Cannabis indica
ttacaactgaagttcctacatttaaaatttgatcacttcatacatttcatttgtgttgtgtacatacattacatacaacccccattgccaattgttaattgccattgctctttctttttataagctcattaaaattaattgtggggtaattatatttaagttgtaagacaatgatgcctatagactatcccaaattgtttaagaggttcagaaaaggttctatattcacctcagtcagtttgggacaccttaattttctttcataattaaagctcagtttaacctttaaatgtttagaaattcttaagggcctcatatttattcttaagaagataactcccagtaaacctgctataggcatcaacaaaactcatgtaaacctgtagttaaaaattttggaaatagcaatttatgaatttttcctaagaaacatgcttgaaaattattaaagatcttttattacaataaatattacattaatttagaatagtttgaacttccttttgagatggatgacctagcctattatgccacaattcaaagtctgaaataagagatttattacaatgagtacaaaaatgagaacttgactctaaattactcgagttattggtgatagtgaaggctatttttagatttgaggagttcaaagctaaactgaatgaggattgagagaatggcaacaccttaaactgacctgaatcaaaagtatgcatgccattgtgatatgtcccagttaagaagatggctttggtcacctattccttgacataacaaacatcaacatgaaactcaaaaaagacattattgtgaaaagcaaatttggacacacttaacagattcttagtgatttttagtacatgaaaaagattattaaaaatcaaaattttattagagctattagaagtagtgaaagtatggccagtatgttggatagacagccctaatcaattaccaacatagatgtgatcttgacaattgtattcaacattgttcatgagattatgcatattaggtgtataatgatttgtagcaccagaatcaagatatcaattctcatcatctccttaagtgttttaggctagattagcctacattttaaatggatttaaagctagaaaaatacttgtgaaactcttatcaaatcgatagaaaaattcaatcacagtatgcccaatcttgtggcaaagttgacactgagctctattctgagtgagagaaaatactccacttctggttccagtggaaatgcctcttccaaagttataaaatgatgatccaccttgtgatgaattgccaaggtatgagcctcgattagcatggaaaccagaggagttagaaggatgaaaatttttgtaattagaaaagaactaacctctttgtgctcttgaatttttgaaatttctattaaattgaacaagatttgcttcaagttgtaacggagttttagaacttggttctaagtcagctacaacaagattgatgctaggatcaatctctttatcaatcttttcgatcttgacccaaaggactaacctctttgtgctcctaaatttttgaaatttctgttaaattgagcaagatttgcttcaagttgcaacagagttttagagcttggttctgagtcacttataacaagattgatgctaggatcaagtttatcagtctttttgatctcgaccctgaagcaagaagaaaagcctcaatttctgctacaaagtatgcctctattcgagtattggatgatataatgaaggtatcatattcactcgacaatcctttaaaaattacagtaatatgatcgcgagttgagagaacctcaccaatcgagcctagagatcaacatgttgttttaccttgagcagatattcatttagaaacaaagagtctttcttgagattctaaagtttggttcaaaattcaagaatcttagaagagacttgaagagtgaaatgcttcttcaaagcgttccaaatttgtcgagcagtgttgtatccaaccatgcgtgtaagaagactctcattcatagatgagaggagccatgacactagaaattgatcctgaacctcttagttcaaaaactctggattgatgatctgagcagctttatcaacattagtgagaaactgaggtggcagagcaacatcttggatgaatttttgcagtcgatttcctctaattgtagccaaaattttttgtttccaaagaaaaaagttgtgatcattgaactttattgagagtgtataattgaagtatactggagaatgaagttgatctgtctcgcaagtgcaattccattagttgagttgcagggaaggtagatgatgaattaccaacaccag

SEQ ID NO: 188621 - DNA, 1449 bp, Cannabis indica
tatgacgaacatcctaaccattgaccaccaagaataaacaaagggaatcagaaacagttgcaacatttttgaaacccaaccaaagacaaagggaaagaccatgaaacaattccattgcctccgcaacatgaggctcaaaagtaccaatcaaaggaaaagcaccaaaaaacaacactacctcattggattccaaagcaatcactcccattcccatcttcgcaccctcaacaatagcccaggatcatcaaaaagattaatctcacccaaagtcaactccctaaaagtgttagaattagctctcggcaccaaacctgtacgtggcttaccagtgcacgaagaaccaccactttgaccgacttaatacatccaaagataattaatggcctaaggactaaccatattatacgctaagaacttgtgatcatgaataaatgtattgcgcctatgcccaatgagccaacatagagcaataaactcttccagttcttgtttactcaaaataagcatacaacccaacaggagctcataaaagtaagaagcatcttttaaagaatcaagacctttaacaagcaaatgacataaccaaagcgcatgaatggtagtatcattattctaaaagcatataggtcaaacattagaagcatggaggccatgacgagtcaagttggcataggttggcaagaaatttaaacttgctttccaagcaaaatattttatttgtgggggaaagattgaggcccaaaaggatcttccaccaacgagaaaagccaaaagaagtcgattcctggtcccaccccaaactcaaaacagagctccaataactactcttattagagtacatcccatcatcaaaaaagtgtcaaataagcatatcatgtctttcaaacaaagagtaaggaatagacaaaatagcgttggtctccagtgtgtcaaacatatcctcaataagagaagaattccatttgccagattcaagtttgagatcactaaccagttgaggagtaggacccttttaaaataataagctcgacccacatggtgctttagaatccatgcatcctcccgaatcctaatagtatcacctttcctaaccaaccatcgacaactttgcctccaaagatccccatcctaaagaatgctttccaaagaaaagaagcatgttttgtctctttgacatcaagaaaggaaccattagcataataaaaacccttcatcacttttacagctaaagaatcaagatagttaaataaccgggcagtctgtttagaaagtaaggattaattaaaaagaaacatatcttgaaaacccatacctccatcatttttatgccaacacaagcaggaccatgtacaccagtgcatcttcttcttatcatcatccccaccccaccagaatctagcacacaagcgatgcatctcattaacaatacccaccgacaaatgaaataga

SEQ ID NO: 188622 - DNA, 2660 bp, Cannabis indica
aaattactgtcaattgtattttctggatttgtttttctaatcactctgcatttgtgccttgtgttaatcagattgggaactggtctagatggctgacagacctatttggcatggatgatgatgacccacttgacaagaaagagaacagccatgacaatgatgatgaaagacaagatacatccttcaagtctttccgtcttcttaatgcattgagtgatctgctgatgcttccaaaagacatgctcttgagtagatctgtcagaaaagaggtacaatacttgagccatactcgtctattggattctgaattctctgccttaaatactaattattcaatgtattattactttgaaggtatgtcctacatttgctgcaccattgataaagaggattctcgacaactttgtcccagatgaattttgctctgatctgatcccagttgctgtgattgaagctctagaatctgaggtcagttagttaactatatcatctgcaactattcttgtgttttttctgagctatcagttctgttcagaattatttcacaagactaaaatagatatgctccatattttcgagtaaataatttaatgattttaagttttaaccatctttttttctgccttgtacaggatcctagcgaggtagaggaagaggtcgccactaatttcccatgcactgctgctgcaattttctactccgcaccttccacagcttccattacaagcattattggagaggttggagctcatccacatctaaaaaggagtggatcctcagtgcttagaaaatcatacaccagcgatgatgagcttgatgaattgaactcgccactgaagttgatcttcaacgaaggtccccgctcttcaccagtgcctacgaagtcaagttggatttcaaaagaaaagaacaatcaaaatactctcagatacgagctacttcgagaggtatggatggaaagcgagtaactactaaatatataccatgttaatatagatatttttgcctattctttttctttgggagagttgtacatctaatagttgtagatcctgtattttcttaccaaaatcaaaagaagatatgcattcaagaaagactcaaatgcttgttaagagtttgtgtgtgcaataatatgagaaaaataaaattttcatggcaacgaatgtcattgatctctagaataaataaagattgttacaagcgtgtcacgttggtttgcttttggcttttatcatgtgttttcacaccaaaaacaagtcgataccatggaaaaatataaggcaaaatagtataatattgatacaagagcaattgtttaataggtcaaaatagtatttcttttcatctggtcactctcgtggtgactacaattacaaactcagacgctcatgacggcacgtctcattacactacaacatataacacgcgtaaaagaataataataaagaaaaaaaggtcaaaatttgaaaaaataggttggaatcttcaaacatagaaaaccccaacaaactctcgattctcacatcttacagcatatttactataaagccggacgcaaaaatttatgaagacccatgtgaaccaccaattcaggcagtgagcttctgtgaagaactgacagcatttatatgctggagatgtaaggcagccaataaaccttgccaagtttctccaggtgcatcacttacttgaatatcaacaagtttcctctgtgttttgtagtattcttccaatgacttgctctacagaaaagaaaacagcaaataagacaatcaattctatagtggtcccaaaattcatataaaagcaatttgtttgtatatatatgtatatttatatacctgttttgcatagttaatgaacttctctttccagagtatttcagaatcagtagaagtggagacttgttgtccattctgagggtacaaatttagatttttataactagcattgttgctctttcccatgtatttttgacattttcctatattattctctaagtgctcttcagtgctcttgaaattcaccactaaatcaatatccgcaatttgatcaagaatctcctgtgggaaatgaaaaggaattcaatttgcaaatcagtgtttgcagcaaaaattaacagaggcaaacaattaaacattatatacaaacaaaataattttaaagccccatttttcttggaacttacagcttggattcttgttcgaggaatgccatcaagaatgaacccagattcacctctgcagtagccttcttcaagtctcttagacaatagagcaaatattatttcttcaggcacaagctttccctcgttcactgcattagcaatctaaatttcccaaaagaattaattaataataaaattagtcaagaataatcattcaaataatagaaagcaaaacactgtttaatctttccaaaccttcttaattcaacacggggattgtataaaagcttgaaatttaactataccatgttaaatgtctgcacttttgggctacaaatactaaattatcaaactttgagaatacatttattcactttcaaaaatctcaaatgatcaaaatggtaatcaattattgaatgtttaaccctgtttttatggacaaaataaattctcccaataacaatggagaagaaaaacaaacaaaaattca

SEQ ID NO: 188623 - DNA, 803 bp, Cannabis indica
ttttttttatattttattcctccatatataagacttccaataagaactcaattgcctaaattgatggttcgtactaaacaagatacacaataagtcaataaaatctcctacaatataatatgcaagtgttttaacttttttattattttaaataaaaaaaaaaacaaagtttctttttttcttctatttatatatagtcgagttgggtagggttaaataaaggagggtggttgggttagtgtaaaatgaaaatgatcaattcaatatagtaggagtctaggagagatggtgactgggtgaggtggtgtttgtgcatgcgtggcgtcaaagttgcgtgagatgaaagccaaagcatccccattagtttgatttccttttgttaatttattaaaaaagattgttgtttgtttttggtaaggaataataatttcatattagtatcttcaacgtaattactccaatatttacaaattaatctaaaaattgcccactatattctcacctatcaccttttaaatgatacccagtctacaccgcagctttgtgtggggcctattcttataatcccacgtcgtttcctacgtggacttcactttcaagccacgcaaggaacctcactgtctacctctcacctctcactcagatgatgattgatcatcttcgattcattctaaactacgcatatatggacagctatagctaaataatatcagtagttctttcaaaataataataataacaataatagtatcagtagtttctaaatatcacaataaatggaaagcattgctattgtggttaga

SEQ ID NO: 188624 - DNA, 1270 bp, Cannabis indica
atgggagttgtttcctttgaatgtttttgaattatacgatattatagaatctagggcctctagccgaccccctttagttgttgtaactcctcaaaccaatccttcaccattacaagccacttctacctttatcaattctgaaagtagtttaggttgaactttaattttctagacaaaatgagatgattcttattgctatttgcctgtcgttttttttttttttctaattgtaattacttcccttgtttttctttctgcaagaatggatcttaatttagatagcctcatctgtagcccttctgtcctcctcaagtgaggtaaaaaataaagcatttcagatgtggaaatcccataaaaacaacccaaagcttcgagaaagaaaaaggagaacccaaaaagtaaggcttcaactgccccctcaatcgttatcttttaaccagaccaaaactttgctctcgggatccccttgtctgcttctcctgatctcgaggatggatgtaaagagagacatgtaattagagggatgcatagggtaactttttcagaagagaatcccaaggtgatcctagtggatcttgtctgtcctccacctcaggaagctggtatcttagagtccaaagcttgttcccaacatatcacccaaacatgttgccattttaggagcttccagccgggcagctggaatttgatcaaaaatggctcttcaattaacctcctaacaagaagtgcggagctcctgtactcagttagtactctctgatcttactattttaacttctttttccttctccttatttctttttactaactatttcatatttatgtaggcttctcttatgaccactatggttcttcaagcccatcaacagaatactactcaactctcatttgagctgagtaaagccaaagagcactgggagctcctggtttcttaataggaaaaaattgagaaagagagtttgcatctgcataaaagagtttatgagttagaggaacagaagctccagtatgagaagagccaaaagagagtcaataaagtggctcaacgctccatttacaaggtatggatgagcaaaaataagggcatggagctcagcttttagttgatcgtgccaagaaaatggtgacccttttcaagcagatggagcgagatgaactaggcgagagtggggacgaagagggaccaaaaacaatcgttgaggaaagacaaaatgaggaaagcgagatcctttctaagtctccaactgaggaggcttagtttaaattcctt

SEQ ID NO: 188625 - DNA, 2280 bp, Cannabis indica
actaaaagcattattttttaggctcaattgtacactattttggaactttgtcgtgcatttgaccggatattcaaggagcatttggatggagggtaatgcatttatcaagttttcccatcttatgttatcactagtctttgagagtgattttttggaagtcaaaattctctgagaatgtgatttcaatttgtctaacaaattttccttacctttgtattcaatctttaggcggcctggtggtgaccggatttatggcgtctttgataaccagcttcctgctgctttgagaaagcttccctttgatcggcatctttctctgcagaatgtaaggaaagtggtttctgaggcagatggttatcagccccatttgattgcccccgagcaaggttataggcgcttaattgagtcttcactcaactattttaggggtccagctgaagcttcggttgatgctgtaagtagtcacgtcttcatttcgttttaattttcaaagaacaactataaattattgtttctcttggtttactttgaaattattgtgtaggttcactttgtgttgaaagaacttgtgaggaaatcagtgggagaaactcaggtaaattcagggaaagtgattgattgctattttgctcaaggaatggttattttcagttttattcctttagctaaaaatgaaaagtgaaagagaagcctttttttgttttagttgagaatattcacactttcatgtttgtcactaacaggagttaaggcgctttcctactctccaagcagaattagctgctgctgctaatgaggccctagaaaagttccgtgaaaacagtagaaaaacagtagtacggttggttgacatggaagcttcatacttgactgttgagttcttccggaaacttccacaagaaatggataaagtacaaaacccatcaggaggaggaggagcagcggcggctgcagctgccgctgctgcagcctcagaccgttactcagaaaaccacttcagaagaattgggtcaaacgtgtcctcttatgtgggaatggtgtctgagacactaaggaggacaattcccaaggctgtggtgtattgtcaagttagggaagccaaacagtcgttgctaaatttcttctacacacaaatagggaagaaagaggtacttgctcccccttctgtctctctcaagattttctatctatactaactttgcccaaattgtgtatcaggctaagcagctttcacaactgttggatgaagatccatcattgatggagaggaggctgcagtgtgtaaaaaggcttgagttgtacaaggcagctagagatgagatcgactctgtagcgtgggctcgctagtgtcgcttttgtctactactgaggagatccttggtttcattggggttgatggatgatattctttagaatattagtaaatttttttccttctatatataaatataatatttgttatttcagtgttgagcattgtctcgtgctttgggatgggatgctgtatttttcttcttgtgtttgatggaatttttcattgtacatctttacactttcttgaccttgtggtgtgtggtggtctccttgtatcatattaatggatattagtatattttcccttttcttcttagctattgtagacaaatttagtaaagagattgaggaaaactgtaaaaacatatcatcatgccaggggagttgaatggtggaagagcggaatatgtgaatatagatatgataattgggattaatagtaaaagaataaaaagagcattgctataatttttgtttgtatcaacacggttatgatacgattaatgattatttaacatgtcaaaaactttaatgtgatacgatacgattaattaaaaagttacactacttgaaagcgagacaataacacgattatcaagataaatttgaatttttgaaaaattatgaaacttttggttttatgacacgacgatatgatacgattcaatacaacacgatataataatataattatgatatgaatatgatacaattattaaatgtgacaaaaacttaaacatgaacacgatacaattattaatgtgtcacaaaactaatttattttgtgttatttccaaatcgtgttatcgcgtgttgacgcatattgattagtacaattgagtagtaggagattttgaagtaaaattacaatgataataatgtgatgttaggatggtttctacttaaagttcataaacatcaactttgttaggcatcactgttgcctccagttcttaagaaaagatt

SEQ ID NO: 188626 - DNA, 1414 bp, Cannabis indica
ggaataattctccttgagttgatccttgtaattagaatccaaatgaccaaagatagaaagaatgccaacatcaaaagaatactgcaaaccaaattaaccataacatccacatattaatataatatttgtactaacaaacaaaaaataagtggaggaccccaatatatatgtggattatttcacaaatacattaaaacaaaaaagaaaaattataaaaaatacgattttacaaaattttaaatatttttatgattttaattattttatttataaaaaatactgtctttttatgttgtacgttaatttattgttaattttttattatttgtatattattttttactgttgttttgatattatttaaatgttattttactattacttttatatattttcgtattttcgtattgtttatataaaaaaattgtaaaaatataaaaaaaaattatttaaacataaaaatataaaaattttacaagaaataatactttattttttgattttatatatttaactcctttaattttcctttaatagcaaaattctttttatatttatttatgttgtaaatatatagtcttagttacaaattggattagataaaacaaaattttaaataagtaaaagatattgagttttagagaaaaagacaaaagaaaattttgacctttttcaagtggtggaaggtgttaacgagttgatcttgtgctgtgagccaggagtggagagtggaaatggcgagggcttctacgtcggcaactcttttctgcagattgtacggagaagccagagaactctgcaccagtttccttaacgaagagtggtactccccgtggtgaaaaaacagagctgacggaccaatcagcttctccttacttttcgggtaagttggtttgaacaagtgactgtgagtcaccaacacgaatttagcagcctctggactccccaacataacgcaaggacatcccaatatatgggttttgaatatctcaccgtacctgatcaaaacccaaaaaataaaccctgttaaaccccaaacactctgtttatggattggaatgagttaaaattaagtacatgaaaaaataatgaaccttttctgtttggtggaaaagaaagtgttggggtcatgggaatagagttggagagtttgtcctataaatggccatcccattgatcctggtgggagcttgtatttggattttgtgtagttttgagatttgattaccaaataatagatgagaatagagagaaatatgaggaataatattgttgttgtgtatgcaaaattacaagtaacaacaatataaatctccatttttaaaaaatgtagtgttaaattaatataatataatattggtggtgatgtggcaactatagaggtactatatatggatatataatagggaagaag

SEQ ID NO: 188627 - DNA, 1056 bp, Cannabis indica
attgaatttcacttgtttatttgctagtaaaaactggtttaaccacaatgtaacttccagatgaaaagtccaattaaaagaaaactgataaatgtagctatcgagtttgttcttccgctatcttgtaataaattgtcttagcttttgatttagtttgcagccactgaaaattatgaaagaatcatttctttttctttctttctttcttttttgagcagtgtttattcctaatgataactaatggtagagaattgttggagcgtaccaaaccaaatggacatgtttataatatttttagcttctttaaaatttaatatatatctttttttttttttaaattgttgtttttaaaaacaatatcaaatactaaaaaaataatttttagttttaaaattgaaaaacaaaagttttaggccaaactctctctccaaattttttcattgaaagaaatggtcggagtcgtatcacgttatgacattaccatcacactattgattattagtgatttttttattatataattaataatttatttaagggaattaaattaaatatagaaggttgttgcttctagctaagcacgttcctcaagattattaattaacgtaagaaaccttctttctgttgattccgaatatcatacgctgaaatagtgtgtaaactattttagtttaatattggattttgtatattaaagtataaaattaaatgtagagattttttttttaagaaaaaatatattgaacttagttatacgcatttagaggttggatcaataatacatgtgagtgaaggtccgggaggaaatagggacaaacaatttctatccatagcgtatagcttatagttttggtactaaatattccatgtcttcatcaaatttcaaatgtgtaacatcattactgatatataaaagaacttatcatataagggttgttctactataaatataattgtatatctggtttttagaagcattttttagtcgaatttttcttataaatatggtaaataattttatagttataggtgttcttaaaataattacagtattat

SEQ ID NO: 188628 - DNA, 1146 bp, Cannabis indica
aaataagagcaaatcacacaataagagaagaaaactaatgatcacattaactaaattaaagaaacatcatctaacaatcatcatatccctaaattgggagtttagttcatgtcatatccataataacactaaaacagaatttaacataaaataaataaaaggagaagaaagaaactgatggtggaacaattataggctaccactttgctcttcctaccgtctttgaatgcttctaggcttaaaattatccctttttgcttcctaactcgaagtatatttaaatagaatcagtccataacttcaaagaatcgagaaaagaagaatttggcctagagtcatacgaaacctcgccacggtgagatcacgaagcagattttgatgctccctgctaggatctcgccctggccacgaataaatccactgcgacgagggttgatttggctgcggccacggttaagctcgctgcggtgactggcccaaccaagtctcctccattctgcctaattttggccgtggccacgaataaatccactgcaacgagggctgctttggctgtggccacggttaagctcgccacggtgactgggccaaccaagtctcctccattctgcctagttttggccgtggccacgaataaatccattgtggccaagaatgaaccaaatgttatttcttcaattatcttggctcgccttggtcctttgtcacacttttgaagccccggacttttacagctatacaaaacctgaaaacacagaaaacaagtgtaattttatcctaaaacatcataaatgactcaaaataactttaattaataaccccaaagctaggctaaaaatagcctaacatatctagagttccatctctaggtgagcaaattatttcatgagtattgtggatgattactcaagaaaggtatgtgtaatactcttgaaatctaagaatcaagctcttaacaatttcattacttggaaaactcttacaaagaatcaaattggagtgaaagtaaaagaactaagaactgacaatggacttgaattttgctcaagggaattcgataaattctacaacagtataagcattgctaggcataacactgttagttaactcctcagcaaaataaggtggctgagagaatgaatagaa

SEQ ID NO: 188629 - DNA, 2803 bp, Cannabis indica
tatatatatatatattcatatgtttagacacgtgtcagttgttgcctgggccaggtggagagacaactccgtttaacacggtgctgaacaaccgcgccgaccatccacactcgtctcctcattacaacaaaacgacactaactaaccaacctctctccataaatgctcttgtcgtattcctttgttttattaaaacgacaccgtctaacaaaacccatttaaagtggtcgtatcgcatatttattgagcaagaaaggggtattatgggaaattaacctggttacattacggttcagctctgaacggaaccttctttctctgttcccttctatctctgcaccagtttttttttgttctactttgccttgtggaatgtaataaatttattatttatatttttgggtaattttgactttgattaaaaaagaacatactttttctctcaaatttgaagtgtatgatctttctatttgatcgctgaggccgtgatttaaaaaaaagtctgctttttagagttgagattctgagtggtgtaaaaaatttgctggccattgactatcttgggtatgtttcatttctctatccctttcttcttcaatggcgttatttcatatgcaattgtacgtgatttcgcttctgttttgttctttaatgtaattactgatgtgggtttgctttggttttgtatgatgagttgaagtttctcaattttcgatacgattcctgggttcgtttatgcattttctctggagataaaaataatacacgtttctgctttctttcctttttgctatgttcggatgtaaatcaagacgcgaactcttcgtcgttttttttctttctggattttgtttaaagcttatcgctaggcaaagctgatgaatttgtagtttatgcctgtcctggctgaatgcactagaatgttgcttttcttgaaaatgtgttccctcacactgtataataatttatttttatgagcaagtttgaaggaattattaattttgtttttttttgctgaataaacacctcaaaggtagcaagtttatttaattttttgctgtttttaattttattttttgaaggaattagattgattttattttattcttatcttttgaagctttatttctgagatgattcattagtttaacaatcggacccactaaacttgttcatgtttgtcgtccagatttcatttcactttatttggtgattacatgtttacaagcaagtccttgcacattgttaggtagtcagtcttttctttttttatcctctcacacaaataatgttcattgacatcctaatttggtaagcactgtttgcatttctatacaaaaatgtcgattttgaatttgatttgcattcattttcaatatgtgctatcaatattatgcatccttattcctacaaaagtgctatacctttgttaacacttatggatttttcattttggtgctagaatcttcatgaaatgtatcagcatttgaattcatcgtcaatgtattgtgtgattgctttaaggacttgcttaatttttgttattacaggttttatttccttgaattgttttctagagacttgatacaatgcgtacaccatcattacttgcgcaatgcttgcctggcttggctcccaatgacaaaggaagtcagagcttgacatccttttcggagagagatttgtatctcccttcaccagccgttgagattctcccatcaaaggtattgcttctgtcgacaattactagtcaaatcttagtgtgatacagttaagagatttctattagctgtatttgagctataatgccattttcttttgtttctttttttggaaatgtacagatggctcacccatacaagtacgctggggagaatgtagacctgcagggccttaatgtgttcaaggtaatttcaagcgacattgatatatttttgtggttggattcagactataatctgtgacagatgaaattcaatacttatcaatgatatatgctgacatgttggtcccccagactataatcttgagaagaaaattctactatatggaaaaatttgtttatggtggttgttttgatcaatcacataatgtcaacgtatttttctgtctcgagcttgctggccatattatttgcactttctacgatagttagcttccttcatgtaatacaaaatgatctagttggagtgtactagatgtgtgcaagtggtctgggtttaagtagctaacttaatatatatatatataaacacacttatataaagtagaaacagaataaattaagacacacttgatctcattcatttctatttgtgtagtggacatgattacttctttgcattgcaaccttaacgtggattttgatgttacgaatatttgttattttggaatgaaccatctcaattgacagacaactgcttctcttcttacgttgaattctgatagtcttgttcataaaattctgctccatttgtgcagggaagagttagtgttgctgatatcattggattcaacagttccgaaatgatatcctcaaaacctgatggtaagtatatgatttacggtattcatgctgaaatttggtgtaatgcttagctatgtaagcagtgatgtttgcatgtgtaggtttctttttgattattttataaggaatatcaaaataatttgttgcaaaaattcattatctggtttgcagggtacctaaaatcctgggacagctctattgatcttgtaaatgtgcttaagcatgagattcgagatggacaactgagttttagagggaaaagagtacttgaggtaa

SEQ ID NO: 188630 - DNA, 3891 bp, Cannabis indica
attattattattattattagttcacattcataatattattatttaattctgtttggttttattttgttttcaaacttaatctaggaataaaaatatattcatatcccaatatggattccctatgtcccttggccgaaataacgattagtgaaactttgcttttgtagttttgatgataattcacaacattttgcaccaattcacttcaaaaacttttatgggaaagagaaatggttgaaacaacaacaagatgaagcagaaggcctcgaccaaaatcgaacagcaccaacagacctgaaaagtagctgctgccttcgaaagaatcagatcatgacatattgaaaagttgcactggccagctacgttttcgaccatcagcgccaactccgacagtttccatggaaatgtcgatgctgcgatgctgtgatgcacgggcaatgcttatacgtagactgatctttacagcaggacagccatcactaccaatctctgccgatttgtccaagttagatttacctgatgaaatgacaattggttcgcgaaatgttaggattgtctgtgaccaatgtgtttttggggtgtaaggagaagtggacagattggctggcatttctttgcagaatctgcttgtaaaaccagtctcaaaccacaaaagagcaccgtaacaccacgttgttttggatccaaaatcaactgaatcggtttctgcactgcacaaatttggttctaactcaacactggctgtaaaatccacttcatctggtttcatcgtcaccaagtcgaatgtctgaatgggaaaaatataaaccaaatcaagaaaggagtacaagatgtttaataccgaatcctaacaaaaaccctaccacataacgtggaaaagaactaatatcttaaatatcaaataagcactaaccttaagaactgcagcatttgttactaaatcatctccttcaataacatcaacgatcggcatttgagcagcaccttcaacaagttctttgcctacacaagacatgttgaaaccatatacattttcccaaaaaggtatactagtgccaccttttccaaatccagcaacaatctaaaggaacaatagaaaggcgacaattagcaacagtcgttgggataaaatttaatccgaacaaacaaggaaacatatagaagaaactcacaatggttgctgtgtcaggaagtattgcacctccaggttttaaccacttatcccgtgcataaagcacagaactaagcatggactcatagagtagacaatatcccatccattcacttaataatacatcaacactatggggttcaattgatgtttttttgtcaagttcctcaaccatacattgaacaatttctactactccagtggattggctagtaccatcagttggtttcttaatccgcaaatgaccattttcttttgctatctgcaattaaaaaaaatctgagaagcattcgacacacaactcttaaaatcaagaggtttaacaacaatagtattgaaaaactttacttgagtagcaacagcagccatcttctcacttgcttcaactgcgataaccctagatgccttggcttgagctgaaaataaactaaaggcggaaaaagattagatccaaacacacagacacatagagagagacataatacaaataaaacaaaaatgatcttcatggtaagaagtggaatattaaatataaatgctgatttaaatgagtactagatgaaactccaaaaagcacccagtacaaaattccacattagaaagctaaacgaacgacaaactatgatagtgttaatgatgatacagtgaccaagggggaaatgtctcaacttgatttgctcaaataaacatatggggtaaccaaatacagctctaaaacttaaaagaaggggtaactttggcttatctctttaaattgatctgaaacagatacctacacgacaatcagcttcagaaaagaaaactcgaggaccaatgagagtagtataatacaaaaccatatcagagttgagaactttagtgttttctgaatcaagacataagctccttagagcaaatacgtaattacaagaaaaattaaaccagtgtttaggacatcatcattggacaaagtaaaggtcaaatttttccaataggaagaacccatatctacacataaacacgtataacgatatatacagaggcagagggagccaagccagccatctcaccttagtatgccagttccgcaaccaacatccatcacaactgcaccattcaggagagaaggattgtccacaatagctttcctataagcatccgttcttacctgaacaacaaccaaaaaaatcttggtaaatctacatacatacacacaacttgcatttagaaggttaaaaatcaaatcttagtcatccaaaaacccatgccttatcactaagcatctctctgtggattccaaatgagctatacgacccaaaataatccgcattgacaatcttcacatccttcagatcacgatttggaaaataagctcttaaagctttatcattagtatgtctttcgggttcccttgaagtagacccattcacagcactctttccagaagaactgcccacattcaaatggctacccgaaatagagtcaacatcttctttcccacattggtgatatgtatcctgaatctcactatcaatgcaaatatctttaaacttcctcagattggtcataagttcctctttctcggcgatatcaacaacaacaacatcatcaccatcatctacagcttcctcatcttcattaaaactgtacaagagtgaatcatcttgcaaaaaaggttttaggtattgatcattctccaaaagaggtttaatgtcttcaagactgactgcttcatgtaaatgattccaaagatcttccttagactgaaaattcagtccacaactccaacatctcttttgggaaacctggtaattcaaaataataaataaatacaagtacttcacaatcctagctcaattcactgaaaattgtaagtttgttcaaaaagccaccattttggtcaaccattcaatctcaagttcaatatcaaagaaacccaattgaaggaaaatgggagtgagagtgtattgtacctgggaacggacatagttaatgagcttgaaagaagcatagaaatccaaagtaagagttttcctaatgctctgaaaatcaaaatggtgagtggaaatgcagtgatggaacaaggcttgggtatcagtgtaagtggaatcgcagaagagacagagaaaggcagagtcttctgtttcgtcttggtcttggtcgtcttctctccagtcatcccagccatggaggtcatcatcttcttcttcttcttggtcttcgtattcatcatcgtggtcgtcttcttcaatccgtttgggtcggagtgtttcttcatcgttcgccattactaaccgaaaatggtgttctgttaaaccctaagcaaaaccctaacaaccaacaacatgtaataataattctcaaatcaaatctcaatacatatatttacttagacacacttaactaagttttttcttagccaaaaaaatatatatctaaactaccttaagtttattttattattattattatttttttttgtaaatttgaagcatgagttgaatatttccgttaaatgactattgtgtacacccaggggcggacgccgcagttgcctctagaaaaaaaatcaaaaaaaaaaatatatataatttaattaggtacgacacatatttgtaataaaatcattatatttataggcataatattaactttagaataatagttaaactagattacatatagggtagaggttaatggtttaatttctatgaagagcattgtttttttttctttttatg

SEQ ID NO: 188631 - DNA, 2841 bp, Cannabis indica
ttttcagttaaaaaaatcctacaatcttttaggaagtatgaggtgaaaatttaaacttgtagaaatcatttattggtaaaaactgaattcacaaatatttccccgatgaggaggttttgaggaattggaaacgaggacatgttgtgtggtaggaaaatacacaatttcagtcctaggaagaaaccattaaagcattatggttcgttaggttaaaaaaaaaaaccaggcttcagaactcattcaattttccttgtatacactccacatcttagagaattaaactattttgttgatttttcggagagaataatttgcttggtattgttcctttgtaatgtttaatgtttataattgaaaacaataaatcatatccaaaattaagattaacaaccttaactatgaattccaaattccatttgacatcttgaagacttatatcaggaaataaaacactgggcttttatttatatgatttttttcatgccaaagcttggttttgcccggaacaattttttattttaagctatgtgaatttagtgttgtatgctctacatgtgacagacttgattttgtagaatttgtagatcattctgttatttactattttaacagtaattcatattgctgcaggtggggacaatcactctacttgccttgactggattgctcctctttatggttttctttctggttgcaactttcaatgccattgttatctctcttctcatatcattggcagctgcaggaggatttctggctctttttctcactggtgtgactgctatatacatcggggcattgtctatagctgtttttgtgatttctgcaacagctatttctactactatagcaattctgatagctacaggtagagttatgatttacgagtcctttcacttaaagcacatttttttggcaagaatcttacagcttatttggtgtgtttctttccttaaatatgcttacaaatcagggttaccgtttacctatatggtaagatacacagcgaaagtaatgaaaatctctgtaattggttgtaacttagatatcttttatcatcttttaacatcttttgttccttattaaaataaataagtaattaaaacataatggactggtcatagaccagaatctagatagtccattcagttaattagataggggcctctgccaaagactaccaactgttatctaaccaatcccttcaactattatttataacaattctctttcatcttacaatagccctaacaaattccagcaaaattaaccaaccagattccaactgagtagtgttctccattttttttagagatactatcctaaatgttcttttattcaaacctacttcttattagaggtttatcactaagaatggctgatagagccatcttttgttacaaatttgaagggatataactttcaaagaaggattaccaatctaagtggagtaaccgaacggtcatctgagtcttttgattaaagaacaacatttctaactttacatacacataaaaacacttgaagctgctagttcaaacatttaattaaagttatttattttttacagttttgccttaatttttatgattgatcatcctttttttttcctgaggggttttagtttttattagtgtttagaagtttactatttaaaatatactttcaatatcagataagatttgtggttaatgtcttgaggctactgtacacagtgatcccagaaattttattttgttggagccattttctcgttatatgttgacatatattatttgtattaaccaatattaaaattcattattgcctatttttaggagaaaaatcatattttgtgaggatttaattgctatagaaattatttgtgggggcaatttactaatatttagttagaggttaacaaaatgtaacagtacacgttacatatttttaaagatttttcttttttcatgtgggggctttacccccataggacctttacttggtccgtcattgactgtggccttaggaagacattttgccttgagatgtaaagtagcctttctaaacattgtgagcggaaggtcctaaccctgcatttcgttaaagacatggcattttcagtaggcttcaagcaactgctattttcttccaaatatattcaatatcaaccattggttcttaatgcatttcatatttgatattataggttggcttggatttttttgtactgtgtggttggcaacaaagaaaagccttggactggccaaacactctctgaatgtgactggctctgcactttcggcttactcttcttctaggcaagctcgccagcatcctgtggaagacaagggttcagaataaagggttagaacaactgaaagtccatgtttgtttcttgattgtacatgtttattgcttggtttgtacatgtttgtcgcttgattttttcatgttggatttcatggaagctgctagatatatatattatatgtgtgggtggaaacttgaaacctatgaattcgtctagtgctagttcccaagatcacctacattctaccatcatattttcccgcttacattgtactgttttgcttgcttaaccgttcatatgaagcaatgtaaaagatggaaaatactttttctaatttatcttttgtatataattatacatatatatatattccaataattatgaactttagtatatgtgtatgttctttgcatgtttggttccttatgacattgcacatatgaaatacaccaaagtgatttttttaaatgagattgtaggtggtccgcttacactagctcttataatatagcaacttctacttgtgggatcggtgttgcaaagtgtcc

SEQ ID NO: 188632 - DNA, 1157 bp, Cannabis indica
aaaagaaaaaaaaaattggtcaaaacagtatacaagtaatttcttctgctgtatgacaatatttttgtagagattgagccaacagtcaatatttttgtaaatttctctatattttactgttatgtattcaagatgatcagtttggtaacatgggccaacccaacatagcccatgggcaaaatttcaaggacctgaattactattagcccatttcattgtggtaatttacattgtacagtaacatcataaatttaaatttagtttttataaatatatagaccaaaatatatgataccaccaaaatacagttttggaaaaccctatctattttgggatctggaatacaaaagtcaattttttttttctcatagttacagttatttaagatattttataaaattttgaaatttttttaaaaaaattaacacgttgaaaatagggttcaaattgtgtattgtacacgtgactattttattttatacacgtgtaaaataagatatttgaatactactttttatattgaatattctaaatttctcaaaattttataggatatcttaaataactataacatacaaaaatattaaaaaaattaaattaaaaaattttgtatgccgaaataagtagaaattgcatcggtacattcttcactataaatttgtttacttttagtcacaacaaaacttgggactaaaaataaaaaaaattgtgactaattataaatcaccattcctatgttgtgactaaaaagtccgtgactaaaggtattagttacaaaaattataatttgttgtgactaaatgtatttttagtcacaatatttgttgtgactaaaattaaattagtgataacttgtaactaaatactatgttttagtcacaagtatcattttattataactaaaagtcacatttagtcacaaaaaaattatgttgtaactaaaaaattgttactaaaatagtagtaattttttgtagtgcttttaaaggatgcattatagaagcaccttataatttttactgttcttcttatatttttatgtgtgtgcgtgttttattttacaattattgattaatagtatcaaaataactatttataaactgatggtttggtaattgattactactagtagaaaaaaaaaaacggttttttttttt

SEQ ID NO: 188633 - DNA, 5227 bp, Cannabis indica
atataggaaaatacatcaaagccctaaattgaaagaggaggacatggttgtaaaatgaacaagaggcgaataaccctctttattgtatatgagaaagatatagtatgaataacaatataatatataataaatacacatacatatatacgtgaagtatacgtatatgtatgtgtatacgtatattttttttttttttttttttggtaggaaaagtaataaaagacacaattctagtaccttctttcccaaataagaaaagtaaaaaaaatcttactctttgaaagtagcttgatatagataacattttatcaaaattatttctaaattaagagcattgtagaagtatattatgggattaaattatttgaaaaatattctttcaaaaaaataaaatctttggaaaaaagcttaaaagttgaatgtgtatgctacatttgattaaaaaaaattagtgtaaatttggttatggagtgaattgtctttatgaagatctttcaccattttctaggattgtaaaagagatacattgttccattttattttatttttttggtaaaactcctcttttaaagaattttataaccacaataggctttatgatattaaagagtttatgttgaaggcttttgaaactttaaagaaagaatatatgatgttaattttgggaatgatgtggtttgtttggaataaaaagaatgaaaggtttttcaaaaaaattggttttgctaataacaataatgatgttgaaatcaaagatagaagatataattgtcagaggttagaagtttcctccttcaagtttctatagttagtgttgatgctataactgatatgaagaatagaaaagttggtattaaaactattgttgagaatagtagaggtgaagaagttgttggactatcttctccaattcctagtttaatagtttcttttaaaagttgtgttaaaatggtgttctgttgttaaattttttattattgaggttgaatctgattgtcaagttattgtaaataaaataaagcataagtggaagaataactctttattatctgatttgttgcaagatgttaatatctctttgtttaatttttctaatgtttatcttagttatgtacatagaaatttgtatattgcagctcatattttgtctaagagaattttaggattagatgaagagattgtttggaatggttgtagtccgagcatttgatgactataatttgtactctttgtttttatctttatgaagttacattataaaaaaaaaaggacaagtcaatgcaatggcaccagagcttgaagaataaatgatggactagtttattgaaatggtgaatcttgtcattttgtgttacaaatttcaaaaaaagtaatatatatactcaatttggactttctaatgaactttccaatttctctatgttcacaatgcaagtaactaaggctttctctattttttccaacctaaatgactttcccattatggaacctggtcttcgtcccagctcctccaggcttggtggctgctccgctcatcctctccaacctagcctccgatcctgcccaagaatagatcaacatggcaaaggagttatgagctatcctccaaatttcacaccaagtatttatgaggaaatcagatgtatgatctctcttacctcaaatttctaccctaatgtcatttctcgtctattccttacaaatctcctcatgattacttctgatctcggctctgttttaagcaaaatcactattagaccatgtgatttcccttgaaagataccctggattgatagcgtgaatatgtttaaacccattttcttttgtaatgattcacttagtataggtttaagaatgggggatccgtcatttttgtgcatagggtttctgctttggttaattaatggtgatggaagaaggtttcaacaaaccccttcccaaattaatacatgttcaaaaaatctgcttatgtataactcattttattttgttggaaataccttaaacggaacctctgttcttgtttgcgtttgtttacattttctataattaatctagctttcccccttttcttaccacaaatgggtgacttagctagctccatctctattgctttcaatctcatagatatagagaatactgctcactccctccgagattcctcgccacaaactaatcccaatttacatgcacctaacatcttcttaatcgccaagctgcatattgttaagtctttcaacaagaaacacttacgagaaaccgtgactagagattggagcaaactctctcagttcccaattaatatcactgagcatccttcaaatttattcctggttgaatttggatgtgaaggacataggagaagagttatggtccaacagccttgggtttgtctcaacaatgttatgcttattgacattctaagcttcctgtaagctcttaattgggatagtcttcattctgttcccctttgagttaaggtccataatacacccttactcaaacaaagtgagcaattggcctcattgatagccacaaaccttttctgttggaggttgataaactctctcttaaggaaacttggggaccctattttagggtacgagttatgtttaatgtgtccaaacatgttgcaaaaagcatctctatcgaattccaaagcatcaaaaagatagtttggctcaccttaaaatatgaattactccctaatatttatttcttttgtggtcgaatgggacatagctataacaaggcttgttttgattacatgaaagcatgtgatgaatcaccaacccctccatatctcttatatgacgagaatattaagggaaaggtttgggctttcactgaccccctccttgggagcacaaattagctagaaaattgggctcttaatgtccgctaatctcaccactgaacttggccaataacagtggagccaaagtaaccctttttctcgagtctacaactcattttcctcaaagtccatcctccctcccatctttcatagctctactcaatgctaccatgagtaaccactcgggcaaaaaattccttacagctttggtatctggtctctcctctcattcaagtgctttgggacactcagccacagttgtctcaagccattgcactgtcccactttcggaaatcatccatttccttgatacaagttagacgttgaaaggcttgcctactactttctcaatgggaatctcagccatgcccccaaacaaaaccataaaaagaaggtgagtggtggcacataagacacattcaaaaggaaatccatcatagttgatggggttactcacaccatggtcaagcatgctcgctcaggttccactttaggaaacactaattcttttccagaggagggtcctaattaggagcaggcctgcctagcaccatgaagattgtcaactagaatgcacgaggtcttaggagcgaccatgaatttcgcaacctcttcggccttataattatttgtaaatgtgatattttatttgtaatagaatctagacttgctcatggttctttagatggggttagtataggcttaggttttttgatggtcttgaaattggtagaataggtagtggagggggtcttatgttattatggaagtcagatgtaacatttactcttatcaatcaatctattaatcattttaactaccatgtttgctcttcccttttacatatctcctcttttcatttgacttgtttttatagtgcaccaaatgctaccaataggcctcacacctggcattttcttaaatatattagacaaaaaaccccctggacccctgaattataattggggattttgatgcttttattagtaataacaacaaatctgggagaaatatttgctcttttcatgataaaccgggttcttgcaaagatggatgaatgactggctatctaaatacacagtcactcctcctctcagttgttttaattcaaaaaaaattcccctaagccataacgctttcttaaaagcttttgtggtagccataaattctgcttccgtggtggaaagggcaaccagggactgtaactgggctttccaacatatgcagttctgatttgtcataaaaacgtaggaagtggggactgtaactgggcttttcagcatatgtagttctggattgtcatgaaaacgttggaagtagttgattttctcgtatctctgttcgaggcatagtcagcatccacaaacccttttaactccagttctccttttgcttctgcataggtcagaccataatatcaagtgctctttaagtaccttaatgaccatttgaaggccttccaatgttcaatgctcggattggacatcagccggcttaggatgcttagagcatgagctatgtctggtctggtgctcaccatcacatacattaagcatcctaaaaccactacatagggcacatccttcatttcctctttctctttcgtattgtttggacattgttccttcgacaaaaaaaattgtctgtctatcgaaatggatgtactctttgcatctcccatgttgaacttttgaataactttcttgatatatccagaatgctttaagctaattgtcccttcatcttgttcctttaaacttcaataccaatgatcttttgaattggtccaagctctttcatctcaaattctctcttgagcttggctttgattcttttcatcactgattgatctatgctcattataagcatgtcatccacataaagcaatgagaacacgactgtagattgctccaaattcttgaaatataagcattgatcatatgcagattgtttgaacgtgatttattgcatataagtatcaaattttttgttccattatcttggagattatttcagaccatataaggacctgttgagcttgcaaactaactcgactccttcttttccacctgaaactcaggtgattgcttcatgtagctctcttcatccaagaatccattcagataggaagtcttgacatcaagttgttcaacttcaaactccatttaagctgccaaagacaacatcaatcttattgacttgtactttaccacaggtgaaaatatttcagtgtagtctattccttccacctgagtaaagcccttagccattaacctagttttgaattgcattggttcattcttattgattccctctttcaccttgagaatattttcactccacaatatttttgttctctggctttggtac

SEQ ID NO: 188634 - DNA, 2150 bp, Cannabis indica
attggcagccaccatttatcatatttagagaaataggaacaattgtcatttttcgaattactcaaatactgtcaattgtatagtaagcaaaattaaaaaagatgtcaaatatagattgcttcttatcaaggataagaatggctccaaagtgggattagatttacttaagcggttgattgtaattaagtgagggtgtggtttccttctgagagccttgagggtgtattcctttgtgttggtatgattaatgaagctttcttcttcttgataaaaaaaaaaatattcctcgcacaatgaatgagcctatgggatttgaattcttcaaataaaaatggattccaaacaaaagcatcactacactacattatactcatgagtcatgtccatgacatggtgaacactcaattacttattaaaataaaatacagtaaactaaacattaaattgtactactagctagtaataccatagcaatactattgtcaaatacttttttttttttttttgttaaagtcactattgtcaaatactttaatatatatgattccaattgtttcttgacctcgtctcaactcacattcacacctatttatattcttactaaaaaatttactaattaagttatggaacacaagtgttgcttgtaaaaaaacccgaaagaaagtaaaatctacacttgtcaaacaaagagcgtgaacccatacatacttcttctctctatataggtatgcctacttatacaaacccactttcatcaatatcaccaaaaacaccaccatcgattacccatgtcagaatccggggatacaatgtggtcctcgccaccggcgacggccatgaacgacacaggaaacacccatttcgggagaagaatccctatgcacatgacattcttctggggccacgtcaccgagatactctttcggggttggcccggatccaactcggccatgtacgggttatcgttggtcttcgtatttactatggccctcgtcgttgagtggctcgctcaatctgatttcgtcgtacctggtagctccgccgatctaacggcgtcagtgcttcggactctgctccatacggtgcgttcagggatgtcttatttggttatgctcgccgttatgtcttttaacggcggcatttttatcgccgcaatttgtggacataccatcgggttcttcgtttttcggactcgggctttgttgaggacagcccattcgggttcgggttcggaaagaccgtacggtcatgcgatatgaaagttggaagagtttagtttcaaatttacaattggttattttaatttgttgcatgttgttgagctatgaccagattttttttttttggagggaattaatgagtccgttttattatcatagccattactttcaattttaatttgaagaaataatttttagtttaggcacttttttttctttctttcttcttcttgtgaatagaatgatttttatcgaatataagactgcaaatacagacaagtattataaattggaagaatgaattgttttttttttttatgtgaaaacactattattattaatgaatgaattgttagtcaagcaaagagttataatataaaactcttaactaaaatgagaaaaaaaaaaccacctaaaatttgtcccacttatagaaatgtactacaaacttacaaattttagtaataaattaaaataaaaccgcttttttttttttgaaatcagtaaacagcctttgaatttaatgatatgaatgaagccacctaaattttgtgtaaggatacacattaaatttcgttagccaactaaaattaaaatgccgaaaacaaatctaaacagcacaaaataagcctaagtagtttcaaacctgatggtttatttattgggatagagaaattgatattatttttgcattggcttaattttttaaaaagtgagatatttaagtatgaagtacttacatataaggttctatgggacaagtcacaataattttttttaaaagaatgaaaattatgttgcacaatttaccgggactaatataatattttgatataaacttgataaaatacaaataatatacttctattaatatgtttaaataaacactatataatttatagggatacaacagcgtctgtctcccaggat

SEQ ID NO: 188635 - DNA, 2601 bp, Cannabis indica
tcttttgcattgcttacgtgtccaatagaataacggaccacgggaataaagcctgggaaggatgtacaggggattccattccaataggaagctatagcatatgagagtgagtcactacgagtagtagtactcggaaacaaaatgttctacatttatggaagcgctatagtactgtgatgactctttctaagggatatactaccttatatatatcaaatcaaacagaaatactaataatttcatcacattattcctatatatccactcctctcttcgatcgctctcatctcaccatatatatataaaccctactcaacctgccaaaacgaaaagaccgaaagaaaattttagaaagactttgttgttaattatttggagtgagtggccatgggtgaattcaaatgcaccagcttgattttactctaccctactattttacttatcatcctcttctctgccataaatcacaattattccaattcgatcttggattttccatatgttttacagtacgatcggccgccgaagtccggtactggaaccgccgacattacattcgatctttttccagatgtgagcaccagtaacatcactgtaagtactctcatacatatatatatatatcgatcttgtttcgatcttgagaaaattcaagaaaataatttacgcgggaataattatagagaatagctatcaaaatgaaagaaaatcttcgtctaatatttataggtataacatctatatttaataggaaaagaattctcaaatgatatgaaaataataaaatctttcggtattcatttttttttctatcctaaaatccaagatttaaaaattatgtgcttttcacaaatatatctatttaagaaaaaacaaaaagtatattatgaatgtttattaagtagataattatgattttgttattttaaattaggttactgatgagttaacaaggaaaagtagtagtgatcatacatttgggaaaatggaagagggtttggcaagagctagagctgcaataagaaaagcgtcccgaacaagaacctatacatcgtacaaggaagagagttttgttccaagaggatccgtttaccttaatccttacgccttccatcagttaagatttttttttctcacatatattactaaaacattttactttttttttgtgcaataattatctcatatatatcaactatatgctacatagttagttattatggattaaataaatttgaaataggcttatatatgaaattaattaattgaagcattctctagtccaatcacgatcgactattaataagttctatatatatgtgcgccttaattttcttgtattaatatgtgatattattctagatttggaattttgtgaattaattttgataattgtttttaaattaacatttggtgttgcctcgatgatgtcaggagctacattgaaatggaaaagagattccgagtgtggtcatacaaggaaggagatcagccactctttcacacggggccaatgaatttgatatactcgagtgaagggattgtcatcaatgaattggagggcggcccaaaaagcccatttttagctcagaatccagatgaggcccttgcatttttcatccctatcagtgtcgttttcgttgtagaatatgtgtacaaaccatataaggactattcacgaataaggcttcaaaacatttttgaggaatacatcaacacaatctcccacaaatacccttactggaatagaagcaagggagctgaccacttcatggttggttgtcatgattgggtaagtacctaaaattacattctatacaaaattaattgcttatattaattattcttatatcattaaaatatgttgtacgtacaaacaaaatgaatacaggcaccagatgtttccaaaggatacagggctgatcttttcaagaatttcattagagtactttgcaatgccaattcttcagagggttttgaaccaatccgagatgtctgcttaccccaaacgagccttctcaaaggcgtagcgggattacctgaccctggttttattcgacctccaaataaccgttccatactagcattcttcgccgggggtgttgatcatggttttgtgagaaaagaactttacaaacagtggaaaggaaaacacgatgaggagattcaagtctacaattacctcaccaatacagaaaactacaatgaactaatgggtaaaagcaagtattgcttgtgcccaagtgggtatgaagttgctagtcctagagtagtggagtccatatactcagggtgtgtgccagtgttaatatctccgggctatgttctaccattcagtgatgttcttgattggagtaagttctcagttaatgtaccgtttgaaaacctttctgagataaagacgattctgaaagggattcctaaggatgagtatttggctatgcaacgaagagttatgcaagtacaaccacattttgtttacaatcgtccagctaagccatttgattttatgcatatggttatgcactctgtttggcttaggagacttaacgttaggctccaagcttgacttttttttttgtgagctacataaatttaggg

SEQ ID NO: 188636 - DNA, 7164 bp, Cannabis indica
attatttaattttattttttatattaattttaagcatgtgatttttagtttttttttaaagaaaaactaaataatgtaaattatttatgagtagtaatatgtgcacataacacacaaatgtgacaagcaaacatgtgagaactgagaagtcattatcgattatttatatttaaatttttatctattcttttgtcaaatatttaaaatatattttatttatatgtattttttagaataaaaagaagaaaaaaaaagtacgtataagtcctaaaaaatatataatttttttataaggtgtttgttattgggatttaaatccttaaataagaatgtaaaactaaggtgtttgtgtttgaaattcttttaagttttaatctcaacccccctcaactaaaatttaccaagtgaaatttttacaccaaacacgtagttactacactttttcttttatttgaaatggaagatacttcacttaatatggcaaaagtcatactaagatatatatattgccattataagccgtacaagattggtaatagttccaccaagtgctgatactttgaacagatcataatctacaatgatacaagccattcaatcagttaacaacagaattaaaaattagtacagtaatgagcacaactagcattgttggctcatctaaaataaaaagagcaaccgattgttaattacaagtgaaagaatgctaaactgtggaaatacagttagtggaatgaatcacaatataccaaggaactaactgctgctttcttcaactccaagcattagcttggcttccacaatagattttctaacactttgtagctcttcttccatcctttcagatatgaaacctgaatgagaacctgtgtctagtaactgagatatcttttcggtagccatagcccttgctttttgtaactcttgtactcttttagactctaccaacaattcttcctccaagattttcatctctgcttccttcaaatctgctatgaaaagatgctgctggtaatcgagaatcatactttcgatttctgcctttccattctctctcatttccaacagcgtcttcttctcctgcattataccttgaagggcaatctccatgtcttcagcggacctagaagctttctcaaactccaattcaacagtatgcattgcctcattcactttcacagacttaatgttcaaatcctcaagttcctttcttatgacaccaagtctatctcgagaaagcttcacctcggtttgtagcttggttttttcttcttctgtcttcagtaactcagttgctttgcctcccaaccagcttttctgtgaggggtctactttctcaatgttatctatagcaaaaaggaccttttcattctcatgtttccgattttcttcctccagtttcgatttcaaacatgcatgtttgttactcaattcaacttcagattgtttagtcctactcaaagaagcttgaatttcgtctttctttgcacttagacgggccaactcctttttcttttggtctagataaactgttgaagcttttacccttaatgtcgcccgagcttctcgctgctcaaagtaagccactgatgaagaaaagtttgacaaagagtacttgagagctgttaactttttctgaattagagtctttccttcttgcatttcgacggagtcatctttgagggtgtcagaggtttttcgcttggcctgaatggcatcttccatgacttcaatttccattgagagtttgcctacttcaatgactaatttctcaagtgaattaaaaagagacatagattgggtggaatctaaaagttgcttgtcagcactttccagcttcattctaaccaatctctgatcttctaaaaccttagctgtattgcaatctaacaactctgtttcagaggtggaggataattccatatcaatgctatttcctgaatcttgttgagtaccagcctctttggtactacacaattccatttcagaagtggaaggtatttccatatcgatgccatttcctgaatcttgttgaggaccagctgaaccagcaatatcatgtacatttaataagtcatcagtctctttggagcacataaccacatcatccacaatggcatcatgtgtgttcagtttaagatgttgaatttggttaattccttctccatcaacttcaacaaccttctctgcacaatcaaattctttcttggtgttgacactctgctctccacaagaagaaagctttcttttgagctcatccctctcctgcatggctctctcgtacagacccaacagtttatcattttcttcatgcatttccataagctgatgttctaagttctcaactactttgttcatctcaacctccctctctttgctgagttcaataccatcattgttgtgcatttcaataccctcttgagcactctgaggatcagcagtaattttgttattgctttctgctgcagccttttcgtagagttcaataagtttgttattatcttcaagcaaaaccttgagcttcatccgtagctcctcattctctttagacataacaattgctgtctcgtgtgcttctgcttctttttgactagccgcagcgatagcatcaaccattgttttcagctccatttgatcactgaaattgataagaggcatatcacttgacaaagggttaagctcaagttgcggcatttcttctttaaaagcttttgcagatctttcctcttcaagttttgtcgccagatctttaacaatcctggaaaattaagcaggagtctgtaagaacttccatgataacaagggaaaataaaaaaaaatgctgtttaaatcaaaagtaaaatcctagccaacattgaaatgttaatgtgaaaaattgacatgttaatgggaataattaatctacaaaaaaattgaaaaataaaaaacctacttttccaactcttctttctcttcaaggaagagttgcatcttctttgtaagtgagtccatttcagcttggttttgaatggcctgcaaaatatagaatgcaatatataaaacctaagcaaagttgaggaaaaacaaattcattaaaaaggaagttattttatgtactttacctgcattcgaagaaattcattctcctcgctaattgaggattgccaaggcaatcctggttcctgttgcagaattttaaattaatgaataccctaaattaaatttatcagagtaaacatattcacataaagccataaaaaaaataaaaaaaaaaaacagaatggcagcatagacacactgctcaaaatttcaccaatgcaaattgcttactcaaacaatcactattgcaaagttcttgcttttactagaaattttctatgaccaaaatgcccatgtttctcttaacaaaaaataatgggaaaattagcactccctcccggtgacagaatactagcaatggactaatttgatcatatataccattgtaaaacatataatggcatatgacatagtgcataggtaatggaaagtattcacatatacatgactataagttaaacaactcagattctcagcaaaagaccaaaaaagaaaaacagcttagtaattgttttcgagtcacaccttattggaaaccagattatcatccccatgaagttcttctatcatcacatttgaatttgttttctaaaaaataaaattgacatgaaaaagaagtgagttgaagaacaaaaaagttatagaataatgttataacaatatcattaaaaagtcatgggaaaaagtccaaaccattgaggattctgattcattcatcagcttccagtctagagcttctagcaactgcattttacccaaaatcaactgaattagcaattactcttgtaaggctgcagagtaaggacaagtaagaaaaaatgaaaaatgtataccttgttttgtaatgccatgatttgttcattcatcatttcccgttcgccttcctcatagaatgactttaatctgatgatgttttgcaagtaagcaatataaatatcaattgtttggagcttttacttaaatttgaaaaagaaattgaaagagttcaattaaattgatgcctaaatataagttttgtttatcttttcatttgatttcagaatatatgtccagcctaagaacctcttactttgtggacaaaactacttccatttatgatggtgagactgtgaccagctaaaaggaattaacaacctgtgtgtaagtgttattgtaatcggaaaattgatctaaattaaagccttaactaaaagtttcttcatgtgtccaactttctacagcaaaacctttcccaatttaatttcaagtcattggaagatttaaaggttgtgcactcatgcaaaagatcaagattaaacaagttgtatattgtttctaaagaggatttaatctggatcaaaatcccttaccttctaatttcttcttttagtctcagattttccattgcaaatcttgtcacttcttgattacggttaacctgtgtccggaggacctcaatttcttttaaacattcttccttttctttcaacaaatgtgtctcagctgaaatctttccagaggcaacagcctccagcctttttattccagcttcacgaaaccgtaacctcattttcaggccttgtatctcatcctccctttgctttgcctaatgaaccatgcgaaaagataaatcgattaatcactatttcaaatgaaatttaagtggatgagatcctagcatggagagaataaaattttactaaaaatagttttccaatgctataagaaatatatttatacgattagaaattgatgtaaggatgataacaaccaaaatgcgagcagcaaccgaactattactattaacataagaaagtcaatttttgacacataccagttgcataactgcctgattctcagcagttaatgcctgcaatgcaatgtctttatctttttccctcctgaaagccccaacaagggcaacatcatagtcttttttctgaaaatagagcaaagtcagttacaaactagaaataccaaggctacattttttcaagctcaaggaaaattagtgtacctgagacatccttctgccagaattaagtggactaaatgacccattgagtccttcccacttaaaacatccaggggaccctggaaaactcactgccaatgtattattatcttgaccttcaatgcctccacaagctaatccttgtagccgggatacttctttctgtaaacgaatagaagtgtaagcaaacataacatcataaaaatcaacatttcacaactcagaattgagtaacaaagaaagcaattattgtatgtgacatacaaagtgaattttgactttacaatataaaaaaatgcagggtatataagtatagttattagttactagaagatgcaaaacagccagttagtaaactctattagaaagcatgaaatcttgccttaacaaattgacttttctgttgtctctttacattgcatcgcaaggttagtaatagtgcaatcccctttttgtcttgtctttaaactaaaaaggcttttttaaaaagataaaggtgcgtatatatatagtgtcaaatgtggtaagatttcatgttcagtgtgagctgaaaataaaacaaaaattaactcaaatatgtttagattattagtacaaaatacaaatgctgaattcatctttttcaacattatgcagtttagagtagcaatggttaacctaacaattcatctttcaacattatgtggtatacagtagcaattattaacctagtaattttcattagaaatatactgcctagttcaatgcccaaactttggtaaaagatatttcaaagatatgtttgcatgtatatgaaatattagagacaatgagaattttaaaataaaggaaaaaaaatcatattaaaattatataatttaaactaaaaaccttcagttgttgaatttgtatcctcatggcaatcacatccccagaagcatcttcatttataattgcctgcataaggaattaagagtagctgataagctatatttcacataactagcaatattgattattctcagtaatattgaatgacaaaatatgtcctaaaacaattcagtcgtactgaaagttcaaacttagataatccgccgttgcaaactatgatacatacattgttttttataaattttgcacgctgagcaaacttcaaagtgcttagagtctccagtgagcagctgaaaggatcccaaaacaaaatgttaaaaaaactagaaatgtgatcgaaagccaaattctagttttaatcaagtaaataacccaaaggtcaagaaccaatgtctcattcatactctgaacacaattagctaagagcattaatgtccagtgcattaagggaatacaaatattcaaaagtacataaaccagtatggttaagaaccaatgtctcatgcattcattcagtgaatacatgtatccagaaagcaattaaatcaaattacagacaaagatgattaaaaaatgcttaatacaaaagaaataagtattaatacataaaaactaaacatgatagttaatccactcaccaactagatggactaatatttgcaattatagtagtttttgcattccctcccaatgaatcctgcagaggaaatcagattgatcagaagctctttaaaagcttttaatctttcactatatcccagaaatccctgaaaccgatttggtagacttgatttttatttattctatttttctaaaaatgtgctaataatgtcatcaccaccaacctgaagcagaaatgtaagctttgagtcccgatacggaacatggagtgatttcccatgtgacatgtttaccaagttcataataacaagtctgcaaatagagatttaaaaatcaattgaaagttttcattgccgaatcataaaattttaaaaataaaatgagaagtcataccccaatgttgacagggatttgttgatattagtagcttccctaagacgttcaccttcagcaccagaactcttctgtctgtgatcaacaggtcaacaaatcagagaaaaaaaaaatcaaattattttggggagctgagtttaggaggaaagtataatataataaggaaataaaacactaatgtgagtattatcatctctcaaaaatcttcc

SEQ ID NO: 188637 - DNA, 2793 bp, Cannabis indica
tttttaattggatggttttcagtattgtgacttagaaaaattaatgaaagcttgaatactgtatttggattcaggggaagtgatcgaaagagatcaaaaaataatgtagtatttaaatgaagaaaaatatttcattttaatttaaaattaaatcaaataactttaaaaattaaaataaatacgaactatcagaatgtgtccagtcagaagattaattttgagaaatctattatcacctttagtacgaatgttggtcagaccgatcgtgatggggtactgaatattttgggtttgacttctgttgatactcatgataagtattttgggctcctaactattgtaagtaggaataaaacacgtacttttgaggggatttgtgagaaggttaagaagcgagtctagggttggaagcatagtttttttttggctggtggtagggaggttctatttatatctatttttcaggctattccaacttaccttatgagtgtcttttagcttcttgtaaatacatgtaataaattgaaatctattattatgcaatttcggtggggctctaatggtgacaagagaaagatttcttgggtcaaatgagaaactatttaccaatcgaaggatttggggggtcttggcttccgtgacttctgcttatttaatcaagctttatactgcaagctccagagtcacttccgacaagaattttgaagcataagtacctcccacaatgttcccttcttaaagtttctgacaaagatgaatcatctcatctctggactagtctagtttgggggttagagctactaagaagggtccaagaaggtccattggtgatggcttgcatgtcaaggcattccatgattcgtgattgccccgaccaatatcctttaaacttgttacttagagaatcaacgatgaaagttaggtgagtgagttcattttgcaaaatgatgtataagatgttggtaagcttcaaaacatgtttcttcctatggatgttgagattattctttctatttcgttagctatataggggttgtgggtgatggttggtgttggtattttgatcgtgatggcgttgtaaaaagtcgctattcacaggcatggtcactgcggtttaaggagggagtggttgattcaattaaaattgttcgatggtggaatggggtttggaagcttaaagtgtcgccaaatgttaaggtcctcgtttgtcgtatgtttcataatcaggcgctaacagtggctactgaacttgtgtctcgaaaagttcaggtgccgacagtgtgtttgagatgtggtgaggattcggaaactccagaacatgtgttggtgttctgttctgtcttagttccaatgagggttaattgagaggtttggccattgctttgtcgttgcggcacaggcccgttattggagattataattttcctctttgatcagctagcatgtgagtattttgagatggtaatggtggtgtttttgtggctctggtacgatcgtaactctatgttatttggtggtgctcagtcgagacttgatgttatcctggagcttgcctaaaaccatttgtttgagtttcgagaacaccaggctcttccccagctctggttgtttgtcggcctgtggagtggatgcatgccactagctattgggtgtttttcattggccattaacgctcctgtgattgccggtagggggtttgtggggttgcatgggtgatctgaggggacgatggtgttctttggttggcttggacagtcgagatgctaggtgagtttagtgttcatcatgtagcgaaactacttgccatcaggatggggttattgtttacacaccacattttgttcaatctctcgagtattctttgtgacttaacgatgtctgttggatgggcgaataactctcatttaaatgttgcttttaattttatacttttggatgtaaattctttaatatagttgttgttggtggtattgtaatgttattttacggtctacgaatggtgttgcccacgtactatcaacctctgttactagtgtaggagaacgtgtttagacggacacttgtctatgatttttaagttctcctataatagttgatttatcttaatgaaatatatcgtttttcttttttttttaaaaaaaaaattactgactattggttggacttttaagtattatgaatctaataatactatttcatataaagttacggtttttcaaattttagttacaatggtgtctatatctaattgaaattggacactttgatatcgaaaattataaataaaatattaagatagttttatgaaattttgtaataaatcaaatttgtaatttaaaattaattttaactcttaaataacgtgaacataaaataacattattattttatacaaaattataaattttccaataatataaatagaactcatacttatgaattgaaagtttaaatgaaatatgagaagtaatttacatgtttaaacattgatttatttaaaatttactgagatgttcgttaattaagatgacgtttagtattttttaaatcaattttctgtttttaaaattagaaaagtgaaaatatttttcaaaaccatgttctataaaattgtttttatttttcaattttttaattgagaatcaaaattttaaaaacaaaaataaaatcacttttaatattttttaaacatttttttaattaatattttggattccgactagacccggaccgaaccaaaatgcagcctcggccctagcaccgaaccagcccctgactcggacccgaactcga

SEQ ID NO: 188638 - DNA, 1694 bp, Cannabis indica
taaaaaaaaaagaagaaaagaaataattgcaagtttctacataactacagtactccgtacgtagtcccacctaccagaaaaagagggagtcatataaaatgggagacatgaaaaagaggtgaaaagttaaactagcttcctttttaattagatattaattcctggttaataaggccaatattatatattttttggaattagaatttcattatttccttgactttttagtttttaattaatacatttgtaattctaagtatatactgattaatttattcattatattgtgcttaaaatactattttattataattggtaggaaaactggtagctttactttgttctttagtcccatcgaagatatgtacatatatacaacgtccatacagctatatatgttggtcacaactttgactcataataattattggttgactatgatattaaaagattctttttataacatacgaaagtctttaaggtgtttaaaagctttttggaactttgcttggttatttcttcattcatgatttaatttgttagaataccactctctctttcttttttggttgtgttaggcaaattcatatgattttttctcatcttccaatcatgttacacacccattttccgctaattggttcggcaaaatttggtttgttcaatgtgtacatatacaactccaaatattatgaaattacatatttaacgaccttgtcatgcaacgcatactacatatatatagccaattaagttattacattcacggcatgcttgccacgtttaattaattgaaaaaaaaaaacaaatatttactatatagataagataagctatagtatagtatattccatatttccatcctcaaagaaagaaaaaagattaatgacctaattaatatttggtcgtatgaaaaataatgttttctaaactgatctcgatcgaattaatgtttggtataaattaaaagtacgaatggaaaaaatggtaataaaagctataacgtatgtatacgccaaccatatttgaaaatatatttgaccaaacatgaatgtatatatatgtatttatatttttacatgattttgatgtttactaacacaaaagtctcataatatgtaattaattaccattataattccattttaatatatggtacactaccgacacttgatctctaccaacaaaaatgaaaaagaaagagaaaaagctaaccagatatagctaccatgccattatataattaataagtgtcattgttaattaattaacaccaaatttctaccaagtttttattatatacaatattcatgaatattcaaaactgtcgatatgaaaggtgtaggccctggcctgaatatcacattaatgatcattcaaacgtggaaccttcaataaattcacttatcatcatcatcaaagtcattttatgtacatataaaagtgaagtgaacagtttttttatatattatcagtacgatctactagctagctagttcaaaaacaaatgaataatttttagatttatatatattcaaattcatttttaagatatatatgatatggatcatatgttcatgggaaaaaagagcaagcaagagttattgcagaagttcgacagttcaaatgtttcatataattgagactctcataatatatttatatttattttatatataattaaactatcctac

SEQ ID NO: 188639 - DNA, 6192 bp, Cannabis indica
agttcaatttatacttctaatttttttaaaaaaaattaagaatatagtgtaattttttttaatttcactaatatatagtaaaataatatattattttatatatggtatttaatataattctatatagagattttacataaattttcaaaattgtgggggccacagccctattgaggtacatgtggcttcgtccctttgtgtgatgattctgaaactgtgtaggtatgagattacatagttaaatatgacttaaatggatggattgatactgcctacattaacaatcggcattttgtttttcggtagcccatcacgaaatacctccacggttaagcgtgcttgacttgaggtaatttcaagataggtgacctcttgaaaagttttctcaggaagtgtgcgagtgaggacaaatcacgcagaaaacactcgtgttagtttgtaaggccagtcatcattccatgaagcagccaaagtaacgtactcatgtataagagtcatcattaaatgtaaatgttcaataaaaatttaaaacgggccgttacaacttatctctttcaagttaaagatgctattacaataaaaaaaaaaaaaaaaacgaaagttaaaaatatgaccttttgatacagtatctgctaataaaacgcaacaaacacaagaaaagatgccaacacaacatcaaattattcttattgaaaaaaataaaaataaaaataagccatatatgatatgtgacatgacagcgatcctttttaggcgagtaactgagcttttggaagacagaaaagtggcatttaatcgtatgctaaaatagtcacacactactcactgtgtactatccttatttaatctcactaaccacactttctttctcaactctctctctccaaacggcataaaatgataaaagtctaattgttattatatatttctgtgaaataaataaaagaagcaagcttcttgaactgggctacttgttagatcacaaagattcctctcactatcattcaacttctccttatctatctctctactcaggtatttttttattacattttatatttatttatttttaattttgtgtttcagtttcagccatatattattttttttttgcctcaagtcaaaattttttctttttgattgttggatttttgtgtgaatagaacaggaaaaataaaaaagtgttttttcccttctgtttctctttttatcagctttgaagtaatgaagattatgaagatgttacagaaataagtgaactttctgggcattatcgagaaaatggagaaccccaaaaccctagaatctgaaagcccagatgataaaaccgcgaaagagacttctgggttttctgagtcgagggagttgggtgaaaaaaacaatgggttagcttcctgttccgacatttccattgcagtggatgaaacaaaggttttcacaaataatgatttgggggttgaaaatgttgaagttgcaactcagctagtaaaagctgaaaatgttggtggtgtgaagggagatgaaaaagaggcaggtttgggtttaattgggtctacatttgacaagaaaaatgaggctgaaatgggtttgttaaagtcacaatcagatgaggggaggaatgaagataaaccacttgtatcaacagagatagcagtttcaagtggcggtatatctctctttgtggactttagtggctctgctggaaattacatgcacaaggatgttaatgtagaaaattcttcttctttggaagagagcaaaaaggatataaaatatgaaaatggagagcaaggagctagtattgataatcaagacttgaacttttccgtgggtgatattgtatgggtccaaaccaaaaatcaaacgtggtggccagcaaagatttgtaatcctgtggatgcaccaaaacatgctgcaaggactggtgagggggaccagtttctagtggggtattatgggatcaaccactttgcttggtgctgtccatctcagttaaagccatttcatgagaactttgagcaaatgaaaagggaaaccaaagctagtagaatctttgttggagctgtggagaaagctgttgatgagtttggtgggcatgtaaagttggagatgatttgctcctgtgctttgtcacgcaatcaacttacagcagctgaggagggatcatttgccaaaggagttgtgaagtccaagaagaaatctactagacttggtgaattttcagtctctaagtttgaacctgtaatgttccttgattgcctcaagtatcttgcaaaagttgtttcgttgcctcgcacctcgcttgatttcgccgtcacacataatcggctttcggccttcaatctttataatggccatactcaattgcctatgcatctacttacagaaagggccagtgttgtagaagataaagtttcagttaaagacaaaaaagttttccacgggattagaagatgcaataatgcagaagaaggttcttgtgatttaagtgaagccaagaagaaaaagatgaagaaaaagtctgctgtcaaagttgaagatggcaagggtaaaaaggaagacctggttgtttcatgcaaatctacaccaacaaagggtattgaagggagcataggagatgttagtgggaaaaagagaatgattgaaaaaggatttgattcgagagaacgaaagaagagcagatacttgtcttatccttatgtaagctgggagaagaaagactcatcaactggaacaaaagatcctccagaagaaaatgttggtgatgaccaaaatatggtgtctcctttgaatttaaaatgcagtggggagaagttctggaagaaatggtacaggggtttttctggtgagggtaacatacctggcagttcagagttaataagtgtagccccagctgagttgctatgtgaaattcgttctgctgctgtggattgcttacatccaaatggtagtaataagtttaatctcattggttggactttttctaggttcaggacttctgtgtatcatgatgaagttgctgatgaaatatgtccaaaaaatgtaatcggtcgaaatgagttaaatggtgctgaagcctgcttgtctgcaaataatgtagaggagggaaagtgtttgtccaagacaaagagaaccaagaaaaagaagcttctaagcattctgtctgttcgccagatgtgattgggagtgcagaaattaatgtagaggaggacaagcgaaattccaaaccaagagaaccaagagaaaagaagcatctaagcattctactgtctgcttgccagatgcgattgggagtgcagaaaataatgtagaggaggacaagtgtaattccaaaccgaagagaaccaagagaaaagaagcttctaagcattctactgtttgctcgccagacaagattggaagtgcagaaataatttagaggaggacaagtctaattccaagccaaagagaaccgcgaaaaaagaagctcctaaacattctgtctgctcgcttgatgtgattggaaatgcagaaatagtgtgcaggatgtaaaggagaatgagagcctcgatctgtcatcaaaggaaaatttgaaaacaactcctgtttctgggctgttagatgtgaatacaagcgttgccacagatggcgtgtcggtaaaagatgccttggagatgggctcctacaataaagtcaagcggaggagaaagaagaaagtggaagaagtgcatttggagcatcatcagacaaatcaaacaactggtatacctgatttgaatggaaacattgtatcaagtgttatggttgatggtccacaggttatgaacagtgttgtaacaagcggtgtggttgatgatccacatgttaagaacactgttgtatcaagtggtatggttgatgatccacaggttacgaacactgttgtatcaagtggtatggttgataatccacaggttaagaacactgttgtatcaagtgttatggttgattatccacaggttaagaacactgttgtatcaagtgttatggttaataatccaaaggttatgagcagtgtggctaaagaaagtaacctggagctgctgatgaaaatggagaaaggtgctcttttagggaattcaaatgctaatgtcactcttaacttgatggatatgcatagaaacaatgctcaacctggtaccctggtggttgatctgagggttcctgttgcagcacccattcaacaagattttacttcacataatggccctcctaggtttggactgttggacaaagatggaaaaattattgattcactttctgaacaaggtaaatctgcaccgaaaaagagaaagaaaagggagaaagcagctccaaaaattattccagatttaaatggaacaaacagcgaatccaattcactgggcaaggattcgcaggcggttctgattaatggcgttacagttccttcaaaacctgagcggaaaaagagaagaaaattacaagctgctttcgagccaccaaaaaatatttctttaactggaagaccagacaccaatgcaagttacaataaaaaagaaagtaatggaaagacaaaaggtgctgctgctcttctcttgactttcgccgctggagttccagtgccttcaagagaagatttgatctcaacattttgcaagtatggaccattgaaagaatcagaaactatgttgttaaaagacccgggtagtgctcaaattgtgttcaccagaagtattgatgctagaggagcattgcagagtatagagaaaaacaacccttttggttcaaccctgattaactaccggctccatgatctttctgccgctttcaaagtagcgaaacccggtcaagcttctactgcaacaactatagcaacatcttcagtaatggagggatctcaagcacaagcacctggatcagttcctcttgactttataagacagaatcttcagatgatgacatcaatgctggagaaatcagggaacaatctttctccagagatgagaaccaagttagagggtgaaataaaaggcctcctgaataaggtgagctccatttctggttagctcggatggagtttacattattaaagttgaaatgccttttcttagggtagttttgttcttgtgttttgtaataaaactatttctttgttagctatagctaccgctgttttgccccctgtttacttgggctctctccatcttaatatttagttagaattggtatgttttttttaataactgattcctccttcatttgagagagcacataagtcataagcgatggctcttaaactaaaggatgttgttgtaacaccttgcagtttggttaatgtttaacttatttatcttatcatgtgttatataatttatgtttatggtgattattattatattatttttttagtttttgaagttgactagagcacacctttggtgattccgtgacactatcattcattttcatgagtcattttccattaagatactcaattttgtttaaggacttgaatatttttaattatagtacattcaaaactcaattttttgaattttaagttgtgttgatacgagcaaagacaagcttaaagcttatatttgtaatgtaatataatgtaataataactaaatggtagtgtctcctcctgcagtggtttttgcagcagccattggagtgtggtgtttgttgttgttttgttggttttttttttttgaataaagttcatctttttcaattttttttttaaaattataataagttaaggacaaattccaaatctaaaattcaaaaatgtattctctttcacttttttttttcaaaggtttaaggtaattaaaatttgttattgattatttgttccttagattaggacatttaaattaaaaaaaactcaaaaaatagtcttttagaatctaaaaacaaatataattggctcgacactaaaaagtaaagttgtgttgaaatttaagagtgaaaaagtaatgtgccaaaatttaattgaagactatggtaggatttatatccaaaactcacataattatgtataactcaagtgggtgtgtaaagataaccatatatttatatgggtgccctattaactacttaaggaactataatgagatggttaattaaccaataagcttgagtcgcatgaatgcactctctactaatcaccattcactagtattgttgttggtttagtttggttta

SEQ ID NO: 188640 - DNA, 2790 bp, Cannabis indica
ggatgaacatagtttagagttgagagtgaaagctgccaatgaagctgcagctgcttgtcaattaaggctgtcagctgctgaagctgagctaactgacttgcgtgccaaactggattcttcagagaggtgggttcttaaagcaaaggattttgttacataaattgtcctagagaacaaaaaaaaaaaaaaaaaaactaagaaagttattcacttttactgggtgcacaagtgggtctgccatattaattttaggttttatgttacataaatgtccattagaagatagtgcaattgaaattggtgcataagacatggtgtataacacctgatgattctgagaggaaattatggtagatttgtagtgtatttatgattttcatttccctctctcacacagggatgttatttgttgtgacaagagttgacaatatcttttcattggctgctaatatgtatatatcaaagttctttttttacttttggagttgagaacttcttatcagaagctcttgttaataatgtagctcttttttttctcttatttcaaaattttgagttaatgcattgagctgtaagagttagtgtttctcttttatattgttttaatgtgagagaacttatcttgtcaataactcatgtggtttctttttattacaaaaaaagaatattatgtatgatgacatatttgtattactttgtaatgtttttcacattgcattgtagggatattctggagcttgaagaggccattaaaattaaagatgctgaagcagatgcttatatatctgaaattgaggtacttgatattcttcagtttcgtattatcctcctggtcttgaactataattatattaaagtacttcacattatgctccagaccattggccaagcatatgaagacatgcagacgcagcatcagcatctgttggagcaagtggccgagagggatgactataacattaaggttattgtcattgtttgactccatatttcgttgtcaccctcttcaatacaattggatatttggtctaattctttcgtgttatttgtgcagcttgtttctgaaagtgtgaagactagacaagcacatagtcttttacactctgagaaacaggcattgactaaacagcttcaacaaatgaatacattaatagagtccttgcggacgagaattgttcagggtgaagagcaggtatagtttcacttgtcttgcggacaaattttgcatctattagtcatttttaacaattgtttgaatgcaggtcaaggttcttctgagtgaagcgattaaagttactgaagaagagagacatattaaagtcaacctagaaactgccaagtgggaattagctgatgctgagaaggaggcgaaatgctctaaacttactctgtcatcttctgaaaaggaatatgaacaacttctgcgggaaatcgacagtgtccaaagtgaactagacaatgaaaggtggtattctgatacatttcattagaattcaatggctgtacttgggaagatattggcaactcttgccaatttgagatccttattttatggtttttcacacgtgaacattaagttttgttttctttgaatcttccattgggttgatttccttggtaacacttccgaagtaaggtttttgtgctcactaactcactagttattatcgtgcagaaactcccggaatctcctccaggaagagtttgaggaattgaaagctagtgttgaggagatgagttctgaaacaggagaggcagcagtacagaaacttcaagaggaaatcaagttttgcaagtctatcttacagtgtcttgtatgtcgtgataggccgaaggaggtgagagttgttgttgaccccatcatttttttgtctcttgtttggtcttttttagtatgctaacacagttccaatcaatcttcaggttgtgattgtgaagtgctttcatctgttttgcaatctttgtatccaaaagaatttggagattcgccatcgaaagtgtcctgcctgtggaactgcattcggtcaaaacgacattcgttttgtgaaaatttgatcatacccttgtcttgtagattaaggcggggttgactgcagtttagtttcatatttcctagccaaccgcttcggagactctgcatatctgtgttggtatttatctaaataaatttagagaattgctaagggacacccgatgacggtgtgccatgtcataggatttttgggacaccgatagggtgtcttgtagcaaatgctcaaaaatttattttgttttcttggtttgtggtaattttctaggagaaaaaggctggtgtttttcacaaccaaaacatcattttgcttccttactataatacacaatcatctaagagaattctcttataggtgaaattgcccacctaacttcaaataaatgaactcaggattttgtccaatgtcagttgattggttttttcagcttaacccttaaaagatttatagagtaattggtgcaaataatttctttatgattctattttttttttagatttgttgtataacttttgggaggtgttgaatagatgtatcgatttttcagcatgttattttgacaaagtagtttatgctcataattttatataaaataattttttttaacactcatctaaacataaatgaatatgagtatttatggtagggtaatttttctacttttggtattacgatgacgaacactaagtttaaaataacttgttgcatttacgtactaaaaaatatacttattgaaaaggttccaaagacacaacaggaa

SEQ ID NO: 188641 - DNA, 3385 bp, Cannabis indica
aacctcctttaatgacataaagcttctcacttaaggctgttcatagttcacaatcgaatattagtaacaaattcaattctagaattcctgtgactcaataattggaagactatccatctggaccttaaactgtagaagcaatacctgacaggactaaaccagtactcttaagagcttcatctgcaccagatgcaattatctgaaagaagtatacaagttcaccaaaacagagtaaacaaaaaattaagctttgtttgggtctcggaaaattttgttttcctcaccgtcaaagttcccaatgaggccttcttaacaccaccagaaacaggtgcatcaaccaatttcaaatccttgccttcatctgtattgaagattaaatattatcatgttatcacaaagtaagcacaagtatgacagataaaaagtagatatgagcacaaaaattcttagagataaaccattcaaaaagacaggctatgatatatagccataactatttcagtctttcaattctatttccacttctggaattgggggttccttggatgacgcatagtagcatattggtatatatcaatttcatatcctaagaatgccatatttgaaataaaatctcctctgttacttccaaaatataatatatatatatatatatatataaatatatatctatagaactgccccagcctttcaattctatttccacttgtgaattggggtacttggatgacacatagtagcatattggtatatattatttcgtatcctaagaatgtcatatttgaaataaaatctcctctgttctaccaaaatataatatatatataaagatatacatttatagaactgccccaatgctttcccttaagaaagcacagatggtatatcgaacccaggacctttggcccttagctagagtttccattacaatatgtgcaaggcctggagcaagtagagcatacagtataccatgtaactaaagcaggtttagcgtgatattaaaggagaaagaggatccctcaaaaaaacttgtaatcaaaagcaattaggtttaatacgttatcaaatatttctatataagcagaattcttgctttgggtattcaaatggccaactttatctttattacatactacagactattaattacatgaccagaagccagaaacacaatataacaaacagcataaaaataatcttaaatgtatgtcattgcaattatctgaagaaaaaaaaaatccacttcacataaataaaacagattgttattggacataggacatacttagcaagcggcgttctagttggctcacaaatcctggagaaactgtggatgaaagtatgattgatgccccagctggaagggctgcaaataagaaaaatatatatgaatacacatatatataattatatagggcaatttctagtagtatcaagtatataaaaaaaaggaagaatatcaagaggtgtttgcgcacctgaaatggcaccagaatcaccaaataaagcattctcggcttgactttcatttgtgaccatgattacaagcacatcgacatctagaagagaatgcataagaaaccaaaaagataaatgaaaatacttattcccaatagagagacttcagagattttctaatagacatcttgttatcttgggggaatgtatgaaactaagtgtggataaggcaagaatccatactgcagactttagattgcatctaacataaatatttcaactttctcttaatggagtcctaatatatacataaccagaaacacataaagcatacgctagaaagagaaacactccaaaaatatagccagtgggaaaaagaaaataaacaaacatcagagagtagactgttaagctttcgaccatttcttcattttcattcatattcacatgcctttatacaacttttaacctcctccaacgtacctttagaaacttctgctggagaatttccaattagaccaccaatgtcagaaaatctagtttgtgttggtttataaacctgcatccaaggaaagatgcaaagagggatgatgaatcaaacctcgacctttaatacatcatgtatggcatataaggaatatgtacatcattaagaaagaaaggaaaggtgaaacatgcatccacaccccaaaagagaccatgctttttgcatgtatatgtaaatataaacagaccatgctttatatcattaagccatgaccatagtttacaggcaaatattaaaagtcagaacaaggatgacaaagttatgattatagctacaaaaatatataatttttcaagaacactcagaggagcaaacagatgcagacaacaaataatttacctaatgaaagaagagaatatatatttattacaaatatggtatagctaagaaaaagggttccctttactaatttgaagtagtcctataaggtttcaactgataaaaatttggaaaaatgaagatgacagtgaggttgacatttttctctgttaagagttaagagtactttggtttcatttagttctaaaatcagtcccaacagcttattagtttctaatgggtgtaaactagaatgattggcagtttattcctgataagttttatcttatatttgattaagaggtatgaaaaataaccttaaaagtggtaagtctacctcaaaaagaaaagtacactagttcaatcaggtaaagtcaggaaaatttgagttatgaaggatgagaattacgtcaaaaccgataactgaaaagtttgatttcaaaaggtgagacgccatgccgaatcccattgccccaagaccaataaaaccaattcggttaacactatctgcactggaagttatttggctcgctagctgctcagggttgtaagattcaacattcattgcagctgaaatatttactcccatcattctttcgcaggcctgtatgtcatagaataacagaaaactgtaatgataaatatgaaaaacatctataggatgatttgggctgtaatatggcatgaattcaatccatccactaatgtcgttattaaattatttttgcaaatcatttgaaatgacctttattaatgaagcatcttcaccctctccaatgtgggaagatcctgaaaaggttaagtgtatacatatgagattaaccatgacacttcaaagattcattcaataatatataaaagcaaattcagggcttaaaaatatatatatatatatatatatatatccctaccaaggattaattgctggtgtgcaactgacaatagaagagcaggaaacgtaagggattttgcctgatccaagacagtaccctggagtacggacattacaataatcttgatgtaatcaaaaggtgccaacaagaaattttttaaaaaaaaaaa

SEQ ID NO: 188642 - DNA, 1438 bp, Cannabis indica
ctatggcctcatccaaagctcatcacctcagaagctcattctccttcccaaacctcctcctctcttgcctcaacttcactctcttcatcctctccgccacctcagtagctcccataatcctcattcgaacacccccaacttccttcggaatggctttcctcatggtctcctcaatctccctactctcctccttggttggcttctactctcagctagctcacttctgctacatcacccacgtttcccttctcctagcctcgctgatcggacaattgctcggtatcctagtctctttcgccaaggagaattcgacccttttgctcctccattcgaaccgggaccccaaagaggccaagctccttgtgaggctggagtgtggggtgttaactgccatgtttcttcttcaggttgcggtgtttctgctcagctgtgctgtgcatagctgttgggtgagggagtatgagggtttggaggctgagagagaagcagcagccaaaaagcgtagccgaaggattgcacaggttcaagaggagtccatggctaatgcagagaagattaaggagattaaggccatggagttggaggataggatgaagagcaagtattgtcagtgggtcaaaactgattttgaaggctgatgaattgaacaaagaaaatgaggtcttgtataaaatgtgtttgaacttcaaactcccatctttttggcttttggcttgtgtttttgttattggtttttgtcttgggttcggtcactatgggtgtggccattagtgaatgttgtattgttattaagagtgttttaatttaattcattttaacatagaatttctgatacacgacgacactagtacaagtttgctagagagaactactaagttactattattattattattattattattattattattattattattattattattggtggaatatgttaatatatatggagatcatggcactagaggagattatatagtgatgacagaggccttctcatggaaactactcagtgggataagtggaaccaaagactgtttattcaatatgagacccttttctttttatctcgagatgaaaaaaaagtcatgaaaataattcttaaatttaggaaggagcatattaaattattagaaatactctttatccttattattttcaaattggctcttggcaaatatattatcttttaaaaaaattaagtaattatagcaaacttcttaaaattaatcacaatgttaaaaaattatttttgcaactgtatgtgttactgtctgaaaaagaattatttttcttttttgaaaagaactagattggttaactttaacttttaagcgcaagatttgaactgacacatcaattatattttagtataaaaaacttagattaattgatttttttttttttttttttgttaaatagatagtactct

SEQ ID NO: 188643 - DNA, 2009 bp, Cannabis indica
  modified_base (314)..(314): a, c, t, g, unknown or other
gtagtattgccacaaattatgaaaaaaaaattattcactaacaaaaacacatacattattgtgaacccacattaacttggtgggaaagaatgaaaagagaactcaatattattaaattgcaggtatcaaagagactttcagttagatataaaaaataataaattaatggttagtgagtagtgctagagatagaattagtttaatagcgagttgagaaaatttgtagttaggttataattaactgtgtttttggtattaatagttaaggactctagacatttgtttaattgtttgtagtggtaagtttttttttntttttttttttgttgtttatttaactagagttaattacttatagttttgtttagagtttcacgttatcttcttcatcaaatctttagtaagaggtctgttcgtactaaatttatgtctattattttagacaattcatcttgttaataaaattttgtttctattaaaaaaaagtcacattcgttcaatttaattataaaacataattatcttatattctaattattaatgttataaaaattcaaaccaacattctattataaaactacacttttactattcttttctaataattactaggaaagttataaatttgatgggattttactatttatacaaaaatatgatttcttttctaaaaaaagctattttaggtgaaaccaaaaaagtaactagttactttatattattatgtttttcatattttttatttttttaactttcttataagatagcttttataataataagttatatttttacaaccttataccttaaaatcgataaatatgaaaattcccctaattacatatagtctagagattctgagagaaccaaattcataataggacgagctttacacatagcttccaaaggaacagctttaggcatagtgacacctttaccttcactcatatcaagttgttcatcactaatcctttcccaatcaaagcattggattaaacaccctaaagtcaagcccactaaacgttgggctaggcccgatccaggacaagcccttcttccaagcccaaatgacattaacttgttgactagtttaccactttcctcactctcaagctcaaaccttgtagggttaaaactctcgacatcatctccccatattttaggatctctgtgtatagcccatgcattaaccaataaaattgtatcatgtggaatgttgtatccttgaatagtacaatcttgtgatgaatagtgaggtacgagcagtggtgctgcagggtagagtcgtaaggtttctgagataatattctggagataaggaagtttcaaaagatctgattcgtccatcaagtaattttgtccaatttgatcatcaatttcagatttagcccttttgagaatatgaggattgttaagtaaatttgatattgcccattctaatgtcactgatgacgtgtcagttccagctgtcaacaacacctgaaaaattagaactaattattatgaaaattaccttaaattatcaatcataaagttaagatttacatcaacaatctataaatataaagcaagattctccttgtatagcctacaattttattttatattaaaaaaaaaatagttttatattcgtaaaaaaactacactatacttttgtttattttcattttgtcacactactgtagttacaataaattaggattattagcagaaaaataaactataaagtaaacaaatattatgcatgaattaatcataatatatataaataggtggacccaggatttcaatcaagtgtaggcaaaatgttcgtttcttatgctgtattctatcgtattgtattgtatagtattatattaaattatattttatttaatatttttatgtaaaactatatgtgatattaacttttataggcacctaaatatataatattttagtataaattaaaacttaacatagtattatataaaagtataatatataattcattcaatataatataatac

SEQ ID NO: 188644 - DNA, 2097 bp, Cannabis indica
tttttattttgattctgatttactgataaattgattcaactatacccagatggctatggacagctacaagtttgggccatataagatagacgacaaggaagtgttcttcaagtcccacctatcctatgccatggtcaacctccgtcctgttcttcctggtatggcccatgactagctgtctatttcatcttttccattgacttgtcttctgcaactatctatattgctatttcataattaagctcaagctaagttatgggatcaatcaactctctttacatttgtccacttttgagttgattgtagcataacaatttcttaatgtggaatttcccttaatttagcttcttcttcttgtcttttcttttccttttatgtgatgatatcgatgtgttattccaatagtgatgattactttttcttccttttcttttgcaggtcatatcctttttcttatgaagtgtgtgacattttgatatttgtgagctaaacactttgatttttgatttgtttgcataaagaaaaaggacaaattgtgctaactctgtattttttaggattattattttttgggttgttttaaacaattacacagcagctttttaaaagagtgatcagttttcttataatttgtatgtatgtttggtatacaacatcaagttattacaaacttgtaacatgtaaaccaattgaccaaagttgcatgctttacattaaatgccctctaaacctatgttgaacttcattggcattgatactggtgcattcgtagtaaaattagcccacaaattgcttgagtcatttcaactttgtttccttgacaatatgtacacgtgcttgtctgtccgaggcgtgaagtgaaacggtttgttgatctcactgctgatgagactacagatctatggatcacagcacaaagggttggtggccagcttgagagctaccataaagcatcatctctcacattcacaatacaagtgtgttctgttatttttctttcattttctttccttctcattttagtataaattttcattgtttctctttgtgagtttatggagtcttgcattctcaaatgatgaatgtggaatagcaagaacctacattttgtgtttgttcaatgagattcatttatttttttatctgttatgtcttgatggaagctacttcataagaacctcctcataccatccccttctacattcattgcaactcagcacagtgaatgatgaaaatggtgggaatcctttagagaaaactgactgctttgatctctgttttgaaaatcaaggatggaccccaggcaggacaaactgtacctcatgttcacattcatattataccaaggaaagttggagattttgagaataatgatgacatatatgatgcagtaagatggaaaattcgtcctgtccttgattttgggtacttatgtttagatattgtcttattttgatttaatgttgtagattgacaagaatgataaggaactaaaagaaaagctggacctggataaggaaaggaaggacagaagctttgaggagatggctcaagaagcagaagaatatagaaagctatttttgtagacaatgcatatgcagtgagatatggtaccagttgtttcctttgacttgtaagtcaaaacttttatgataagtgattctacatatatacattttccttttgtgtactgttaactaaactgaaagtaacaaaaagttgggagtcagattactaacattatgtgttaattaaacatcacttacttttttcacttgaacttgaagcttatttctgacgcgaagtaatctctctacatataagctttttgtaatctcatgcaatgtgttcataagttgggacatatcgaataataatgagtttttgtatcaccatgtcttgaacaaaatggacaccaaatctcagtactttgtccttgcatggtgataaattggagtagccgcaagtgaggctgctttaaggctgacacatcagactattttagtgctttgaacaggaatatgcatctctttaaggtggcttttggttggagggaacgaaatagaatagagtggaaaggaagcaatttttattcta

SEQ ID NO: 188645 - DNA, 1513 bp, Cannabis indica
aaaaaaataaaagaaaaaaacacagaaagcaaattgaaagacattgaaaattacaggctcgtaagattcggcggtaattgatatgggactgaatcgtgaattttgttgtcactcacatcactagcaaacagaaaatcaaaatcaaaaacctcaaaatcagtaagtatataaagtcttaagcctgaatatttaaaaactaagataatagaaatgtatcagctttctcacaaatttttcaaagacacaagattagcaagcatgtatcccatcgtaccatcgagtcccaatccagaaatgtctctgttacagttataaccaagaatcaattaacaaatcccatttctaattaaaacccaaaatgcaattcaaaaagctgcaatttttatacacatgattactttcgtacatggaaacaacagctgaaccctcacaagttatccctttccaggactctccgcatggatcaccgcctccacttgtccaaccagtgagctgagaagggctatttaatgaggtatacataacctgaagagcttgaactgcaacatatacaagcacaatacttatagagctgaaaattttagcaaaaatgaagaaactagtactatctgggttttttttctttcttttttccaatgttgttcttttttcccctaatcatttatatgcaagaccaccccagaaaaatgacagcttttagaataaatttcccaactttctcctctgaaatccctgcatttttttttttctggccaatgaacagcataaggtttttagctttaagaatgcaaacacatcaatataacaagaaccccacaaaagtcaagaccccatttttatcttccattctaagctcgaccctgttcccaaattctcatttcgacccaatcagaaccaaacccatctataaaaaagaaaaaaaaacccgatcactccaaagaaaataaaatgttatatttccataccatcggaagaatcagtgatgctcttaacaagaggcaaaatatcaaagatcgcagctacaagcactaactgaaagaacgaacgagcaaagtggctgtcggtggccattgttgtaatgcgaagctcgaaaaggagtgaggtttcaactgagtgaaggagcatgcaagactaccatggacgcgcgcacaggggatgaagaagaagaagaagaagaagaagagaatgcaaatgagtcacagaagtagtagcagttgaggttgagatcgcgaccactggaaagaggaattgccattaaagaaaaagacggaagagagagagagagagatattcgaagcttggtgtaatggagagagagaaacaaagtgtgttttgtatgcgtgtgtcggcgaaaaaggaaaaatttaaggaaactaaagaaaaatcaaaaattcaaaaatacaaattaatgtaaaatggaatggaggagtggtttggttcgaggtaggcgagagagaaagagacagaacgtatgccgttttttcattgaaaatctctctctctctctctcttt

SEQ ID NO: 188646 - DNA, 2483 bp, Cannabis indica
aaaacttgtcatgtgtacactgtttgtatactgacatgcctattcagcatttaacagaattttttagatgagatagtgaataccataacaaaattgaagtttggaggattttgtcccctaaaatttagtttgtggagttaagtgtaacaagttatatagtttaagtagtattactgtcattattttttttatctatttaatacttattttttccacataaataaacaaataaataaatatgttcaaatttgttattttgatgtgcataacttatcatagtttaatttttgagcaaaaaaaaaaaactatcatagtttaattaatgtatattgactaattttatgttgttgggtatcagcccaagtcctacactagaagattaggaaagaattattttgagtataagtgttctacttactttattagtatgaggccttttagaaatgtgcccaaaaataaaccgtgagggttaggtacaaagaaaataatatcataataatgtggaagtcaaaatggaagaacagaacccaacaagtggtataagagccaatagttcaggagcgttgggatactaggttgtatttgcgatgtgtgggagaaaatatcaatgtgatgacctcgcaattgaaaatctatatggtgccttgtatcgaaagtctaccgggtattgtgttggtcaagtagcgtgtccctttgatgattacggtggtacaagatggagatcgatgtttagggtcttgtgtcaaaagtcttcttgacaatcaggctgcaatttctatcaatgacagcagtgacacaaggtggtattattggagggtaggccacgaatacgcggttgttggtttgaggggaggattgttggagtatcaacctaagtctcacatcgggagattaggcatgagctgctttggatatataagtgttctacctactccattagtattaggtactttgggaaggtgctcaaaaataaaaccatgagagattaagcccaaaacgaacaatatcattaagagttaagataagatagtagcccaacaaagtgaaagaacggagctaaacacagtaatttaatcgtgttaaacgtatctatttcgaatttagtaaatttacatttgtttaacctattttaatccatatttgtttaatctaaaccaaaattcattaattttgtattatttcctaatcatgttattgtatgatgaagtatatatttttccaccttatgaatatgtatatgaatatgatgaaaatatattgtaacaataatgtatgttcaaagccataattgttgttaaaaagcaatacttatacacgcattaactatgtgcttttcaaagaaatgtgccccttcaaattttttatatatagacactaaagttggctaacattcatttcatattaaatttaccttttgatacaatattaataagtgtaaatattgtgttttataaaagttatagattggactttttattttgttaaatgataaaatagactttgtattttttaaaaaggtacaaataggattttaaattgatttttttgtctaaataaaacttaataataatctgacctagaggtgttatgaaaaaactggttaaattttttgcatctatttgtgttaagaattatcttcaagttgattatatttaaaaaaaaaaattgtcacaatttaaactcagggttctatttgtacaattttaaaaaataatagtctattttatcatttaacaaaacaaataatccaatttataacttttacaaaacacaatgtccaaaataatatttaccctattaacaaatgtaatgtgtgttacaattcactccccattttcgcaatgatattcacatatttttcacatgtccttatattgtttagaaatgctaaaagatattaccgattcctagaaccctcatcggtgtcatatcgctattagtacaaataagtatcgagtttcatataattaagaaaataactttcaagaatatcgctaactaataattttaggatatgtcatttataaaaggcacaagacactattaatgtccaataacattcctctatatttttctgtttacacatcatttatagaaagtgatcacttttataagttaatgcctttattacgagaatatacattttataatgtaaatttaggtatcttataggagttttcgagagctcaaacctcatatttctttgataatcattaacaaacttattttcctcttggataacacaaatgaaccttagcatataccatattctatcatagtaacatttgataaaaactaaaagcttagaaaaattgaaaactttgttcttcttttgtttcttatgattaaaatataaatactaagtgccaaacataataaaaataatgtgatcatccacatggcttagtaatctatatttcttctcaaaagaggaaattttaagttcgaatttcctctcctaaaattaaaaataaatattatta

SEQ ID NO: 188647 - DNA, 2390 bp, Cannabis indica
ctcttaatttaataagaacattagatataaaatgagcatataacacaatattagtcccaacccaactcacgcatgctcaaacccacactccctcccacataaaaactctcacccactctctctctcaaataagctcacaacaagacaaagcttcttcctttggttttgcaactcgtcggggagagagttagatctctttgttatttacaaacaaggtcaaaaagagggaaaatgccttggactaattgctcgaccaccaccaacaccgtcgtgtacggcgccaaataattcgatacggtccgattaatataaaattactgaaatacccctgctcgtagttgagttaaatgaggtgtaagaaacatatctccgacctcagcagtagcgttggggtctgctccacttgtctccgggaacgattattcgcgttaatcgccgcccaggcccaagctcaagcccatgctcaggcccaacagcaggcccagttgcctcgagctctctcccgcggcgatcaagaccccagaaaatccgactccaatactcttcctcacccgtctactaatacggctccggctttagcttttccacgctcggtatctccttacgtatctcgacgtaaatcagacggagctgccacgtggaatcatctcaacggtccgctagaagatcaccatcatcatcgccaccctcgccaccaccacctccgattctacagtactcctcaggttggaccgaccttcagttctagtaaccctttggtcggattcaataccgtacaagaagaaacggagcaagttctccctattcactaacctcttccgttccagatccgagaaattcgaatcggatcctagggttccgtatcgggattcgtacccggtctcatcatcttcgacgacggcttctccttcctggttttcggctatcttctccagccgtaaaagtagcaccaagccttcgccggctcaattcttccccgaagagaccctcggcactcgccgtccgcgaggacgtacggatcggggaatgtcaccggcagatgttcctgattttgactacgattacggtgatgaaggtgatcaatctccctctggcagcggacactcatcggaatcttcgccgagatggaaaagaactccggtagtggcgcccctatcggcaaggcgaacgaagtccggtcccggtcgaaatgtttcgggtttggctttctgtctgagccccttggtcagagctagccctaaccggcactggaaccagaaaagtttgccaccggagattgggaaatccggcgaaggtagggtggccggaaaacctcatttatcaactgcggcatcgttttgtaagaataggtcgagaaagctcgttgatttcggtcgagctaatcccaaccgttgattccgtcgaccgttgacacttgacagtgaccagtgaccaccgtggtgaccccgttgtgtttctactgaaagtacggttttgcccctctatttttcctatttttaccaccacctttttttcttttaatggtccataatttcttccctgaaaaaaaaaatgtcttttgtatattttcattacattttacagcgaaaaaagaaaacagaatttaatatttattttatttttttttaatttgtattttctagtgtaaagatttcgaatctgaatacagtgagctatttttgaaattaccatatcgtcctggtatatgccaactgtttaattttatattatttgtctttaattgtccttttattaattattattacaatttatacacgactgggtcgttggaccggatattaaagaccggatcggtccgagtctttaatcttagaacaacgtaatcgtatgtatattgttattctgagtgagacaccaaaaaacttgttcaattgactatgtgctgtaaatttgatcctaaacggtggagattgatccacgtgcacttgcgtttcgattgtgtcatcaggactgttggttgagttgacaaaataaagtttggtaatggatggttgttcttttagaaagtgtgagtgcctcgattattttgggcggttggcatttataataagcttcttttttattttgatttttctttcaaatttgaaccacatgagcttctcttctacaaaagactttatatttaattagtatttctaaaataaataaaggaaaaagaaaagtatacatacgttctttattttgaattccaaattaaagtgtagttgagtcaagtatatatcactttctcactaatattaaccattttgggaatacaaatttcaccacctttttattgtgtgtagctcccctaaataaaattaaataaaaaagtttttaaatgatttggttagttaactaagtagaaaattaaacatagtggtttaatt

SEQ ID NO: 188648 - DNA, 1985 bp, Cannabis indica
agagaatttcgccgcaaattactcgtaagaataacatatttttttgatatggtgtgcaatatgtgcatgaaactcaaatttcccacatattacacatgtccatcatacctgagtattgttccttgtacatatagtagtagtagtgcctaactcttatttctaaaatttgttctctatctaagtagtctaaaattcaatagtacaattgtgttgtaaacttgtaattgggacaatatgagtggtactccaccatttacttacaccataaccttgcatgggaaaagtatgtactgaaacctagataatttaagtcaagactcctctaagtagaatatagtacataaatgaaagtagtctcaatataccataatctgaaatataattccaaaggtaacatctcaaagggatgttaaatttcataaatttttactaaataacataatataatgctaacatttctgataggagggaggtgtctttcacttcattttaacaacaaaaaccaaaaatatcattttctgaaactgcatgagaatccatatcatatattcatatgattccttcaagataccacaaactaactctacttactcatatcatacatggcttaaaaaaaaattccccaataccttctacaaaaaataaaaacaaaccacaagggccttctttctcttgcataataaaaacccccaaaaagaaaaaaaataaaaccactagagcttaaggaatcctcattacaagatcaaaacccaagtgtgttaccaatcccaaaactcacccatgttaaagtgatgaagtaaatgtataagtatatatatgaagaagcactaagagtcttctttttcttatatgctatacagtactagacttagttttcaggaatcttcaatacaaagatcaaaaccaaagtgctttaatgcttcttctctccctaaactcactcattttatagtgatcaaataaataaaatgtaggattgatttgtgtcattatatgactttatcacaatatccagcagaaaagagccctgagcattatttcataatacaggaagagagagcagcagaagtatatattcagtaagaaaaaaattcataattaactggaaaatgccagatctggcaaaagggcttttgcttcttttttaccctcttccattttacactgtaattgcaattaacactgcttacttgggtcgtctccggtaagggtatagaatgtcatccaagctctcttttatgtggctacacaccctattcacattcctcgctacacccgatgctactaagattgcattcctcttaaacctgagtatacatttatgaacttttaagcttttggttgaaggtaaaataaaactcagaagctagaagattaaaccgaaaagtataagtaatttgttcatatattgcctattttcattttgaatgaaatatgtgacttgcctgttaaggtattcatctcctgctgtatgcattggtttgtacgttcgaggctgagggataggatgaggatgaggatgatcattttctagaaagaatacagaaagaacaatgagacagcattcaaaatggataaattacacaaaatattgaaaatgaaacacaatcacttggcaataacttataatccacagatatagaatggatgaatgagaatagatcctaagaagagaattatgacataagatcaggaaaggatgaattgaatatttaatgcacaatgtttttgataagataagaaatcacatttatggttataagaacaatcacttacataagagaataatcgccaaaatgtatatttatataagaacaatagatgattaaaaagagaagacattttccatgcacaaagacttataccttcacttttatgagcatgagtagaagcatgagccggagcatgagtttgagctgtttgaccttcaggccttttatccaataacacctaacaaaaatcaattattttcggttattaattga

SEQ ID NO: 188649 - DNA, 1677 bp, Cannabis indica
actactagataagaaaaggaaaacactaaacctctatttgggttctctgtgataacaagtactatgataagaggatgatcataacataattagcatttcaagcttttattgatctccaaatatttaagagtgtcttgctgcttcattgaatatggagaagcgaaattaccatacagtcaataaatatatagttgatactatcagataatgccattgcaagtagaacagctattgctctatgctgaatggaaaattaaaccttttttgaaagaattaaaaaattgtcaataacttaagagttcatactatccattttgactcaactactagtactaatctccttgcaataaagaaaacaaagatcaataagtaccaaagtacaaggccacaggctcaatgatattaactctaaagaaattatcacacaaagtagcctctacaaatctgtaattgcaaaaacatcttccaagctagagagacatcggagtatgaaatatgaacagtttcacaatgtgaattcataaaatttggctacaactgcctaagaaaacgaaatctttttcttcaactggacatggtagcatacccaatgattagcaaatacatattaaccccaaagacgagagaaaactacacctttaagttgcgcataagccagcttcagcgaatccatcaccatgacaccacaagtaaaagcagaaaattaatccaaccgacattctacgcatgtaagcaacaaactctaatgctaaggacaagatcccagatgggagcatagggaattgatgatgaattcttcaaatggatatgcaattcattagatatataccatgatagtaatagtaagctgggacatttccgaatacccaatttaaaatcgcgtgaaaacactcctatgcaatatccaaagtccccgaacaagacaagaaagctattgagaatataacaacagaaaaaacaaaaaaaatgcacctaatgagccaaatttagcaacctctaggtcatcaatgtcaaatgcagtcgaacaaaataaaattaatgaattttgaataatcaatccccaagaagagaagcatgcaaaacacatttaactcatgcaaactcaaaaccaacattttactatccgtttatcagccaaactacttcaaaccacacataacaagccctcaatcgataacatactattgaaagcgccaatcagaaacaaaacaaacaaacgaaaaaggataaactttctcaagcacaaaaagtcatcatccatatcaaaaaaaatgagcaggaaaacacaaatgagtcaggtgggaattacacaaattcagatacccacaaacattttaacccaaaaatgagcaagaactaaggaaataaaagttacccagatgaattcagaagcttgccaatcttagttctttataatggatcaataacccaacaagaaaagcaacttgggcaactgaacaattgattaatagggagagatacacagatgtagcgagagagattttgaaagaggggattagggcatggaagctcgaggaagaggagaaagaggagacatatgagaaagagtacgagaaagaaagggacagagacaacaagagagagaaagaaacaaatataaagagagagaaagagatagtttttctttctctccttttattgttttttttaaaaaaa

SEQ ID NO: 188650 - DNA, 1319 bp, Cannabis indica
ctgtacagagaagatggaattggttatgaacattaaggatgatccaatagtaactaagcatgtgaatcagaaagaaaattcattaaagtttctcttcactcacatgaacatataataaaatctctctttcatttttttctttctgatctctttcactttataatattttttaagtaaatttaatgcatcaaaaaagaaaagagttacaaattagaacatgtgactgtgtgactatgatgccaattgcctaagtgtaaaacacatgtaaagtataaacattgaacttttttaattaattttatggtaatttaccaaataatctgactaattagccaagtgaatccaagctgtcatcatatatacacagaaatacgaccaataattagcaatataataatattgtcttggtcaataagcatatgccatataatacccattatataacaaaccccatttctttttatcttttttaatcaaaatatgtacaccatttcttttcccttaaaaagtttatgtcaaaaagtttaattaaaaaaaaatcaagatatagacattcctctaactaaagtttgatttaatttggactgaaatagttaaccaaaggaccaatactcgtgattaacttagactctttttatgctttttaatctctttatttatctctctatttttttttagaacatagtcattagtaattggagagagaaagtactttgattataacttgctcaattcccggatcttggttggatcacccttttttgctgcgttttatacattagatcacacagtgcataaattgggtcgacccgatccgacccaaatttatatgtaccttggctttgaggttaaatgggcaaaacgacaatgttttcgggtgtggtgtggtcactattaatgattgagatggatctcttacttttataatttttgcaatataggaccaaacttatttttctattaattttatattactgttttcttttacttcaagcgttattagcctaaacatttaattgaaaaatgaaagagaaaataactaatttgttgcaaattgatgttatttttctattgggattgcttaacttattggttagcatggtagtgggacacttggtcatggagaatattggaatagatttttgaagaaacaatgtataaatactacaacatataattgaattaaaaacaaatttgaaaacaagtgattatgatgtcgattaatatagtttttttatatataggataggtcaagaaaaaataaataaatttgacgaatttcaaatttggtgggtcaataatatttaattaaaactata

SEQ ID NO: 188651 - DNA, 1164 bp, Cannabis indica
ctcctcttcagcgtcgtaccgtgaacgctgcaaagagtggttgaccaataaacaatcacataactatacaagattcagacatgagaatatatgaaaataataatcaacctcctagatcaactttctactccaaacactttatattttatgccatatttgaagagttccaacatccatttatctgtgacaaagtctaacaatttagcgttgcataaatgacaattcaagcacaataatagcacacctttgtagaatccgaaagcacagcatatgcctccccgatcattttgaaaagcctatcagcatccttgtaaacttcttctgatatctccttccagagcccatcatcaccattatcacttctcgccaagaattgacctgcctggaatgacaaggtgacttgtttagattttagattgccataacaggtaaaaataaaaaatgcatgtagctaaccttgtcaggatgatgcctaagtgcagctttacgataagccttcttaatttctgaagcggaaacagatggttcgattcccctggcatcattaaaacaacacaaaattagctcaaccaacaataaatttcaatagtcaaagctttaggggaaaaagaaactcacaggataaggtacatatccgagggcatatcttttctagcttcttcttctatttcagataatcgtaaacgagcttgtctcaaatcatttgagccgcttttcgatctatcagatgctcctaagttatgggccttgtcctctggttgcttagttaaaagagatacaagtctctgaagatcacgagctgcttgtccatagtctctgatcatctcgtataaagtggctcgtctagaaatggcctataaaatataaacccaattaagcaacgtatataacacctagtcaaccagcagcatatgaaaagatctacttttatcttataaaatctctctttcgagttttcatgtcgattctgcaccaaagaacattttataatatatctcctaaacaacagcaacaagtaatcttcaggtgcaaacttaactcttctttttccatttcctctgacaaaataacttcgtttttagtcattttgtacagtagtctagttttgataattctttgcaaaatgctcttttagaatcaacaccctggctggaggccatttta

SEQ ID NO: 188652 - DNA, 1682 bp, Cannabis indica
ttacatgcttaaaacattctaaatacatacaatattcacttgtttctttcatttgtagttctaaatacatcgtttctttaatctttgttgttcaatatttaggatgatgttatctgataaaaattaactgtaggaaaataacttaaaaacaatctcaaaacaacatttaatgttttcaattaatcatgtttcaacttaatggcaacttgccatcaaccaaatacatgtaaccttaaaatgtatctgataggaacgcgacatcaaaacaacttttacaaaactatctttgttaacaacttttttaaaaatttaatttgcatgtaattcatattgttcaagtttttttaattctttttttaagtaatttcctttctagtgcctattttcttctctttacccatttctcaaatcagcatataatgtatatcacttaataaacaatatcaaatattaaatattagaatgttttaagcatgtaataactatattaataatcctcaatattttagtgttacaagtaatttttaatcagtaatcaaatgaaaatatgaaataactaataaattattgcccatgtaataaatgtattagtttagtagttttgtaggtgttgtagtggtgttttcaatttgtttgcgacatgtttctactcgtttttctgtcgtgccattttgttaatatttgttgtatttgttgtggttttttgtttcccatgcagcgttcattttttttttcttggccttcaagatttgattttttcgattagaggcaacactataatgtctttaaaaattctagtacgtctcattcttgttggtacccgaccgagtatactattatatgcgttaaatctttttgtacctaatgaatactcaaatcagaaaaccatttttaaagaaaaactagaattaatgtatgtttttgcttgaaagtatttcaactttgtatccggagtttttctcagtattttttttgtgtatttttggcaagtttttttgttgtgccctttgtgcctacatttgttgtaatcattttgttttttagtggtgggtaacctttattcacttcatattgtagttgtatatatgctgttccatagttatattgtagttgttgcaaccatttgtgtacaacttctttatacttgcaataccttccaaccaatttccaaacttgaaagccaacataatttttgttctcatcccatttctggttgatctgcaccagtatttgtataattttattctctaaaatttaatgttaatatgagatttaatttaaacaagcaattttttgtgttatcacaatttgttagttaattattgtgtaaacaactaataaataactttatagcaatgtaaaacaaattagtttattccaatttgcaaaattagacatcaacctattatcttagggaaataacgacaaaccaacttctcaacaacaaaaaacgacttttttttttaattatcgttttcagtttggttgcatattttggttctaatcaacacattgaatagataggtgtaaataactcataaaaaatttataataacatggttttatataaatgttgcaaaaacattgcaaaaaaagcttcccaacatcaacaaaataatttatttattattcttagatatgttgtagtttttatttagttattttcaactttttcaattttt

SEQ ID NO: 188653 - DNA, 1845 bp, Cannabis indica
gagagagagagagaacctgtatagctaaactttagaaaacacttgagagttattattgtaagaaatatgtatttgtattttatatattttctactcagattaataatattagcgcctccccaaaccacataattctatgtgttttattatttacggtttgatatagatatttatcgctattttcactctttgttgcttccgcgcagtacaacactcctctttatttttggcaaaagtatgtttaccatgcacaccacacaatacacacacacacatttattagaaaaaaagattagaattataaattctcttaatgcgaaaccagacgaaaagatcaccctaattattaaaacatgataaacataaaagtaagtaagaaatgtttcacgtgcttcttctttttggtggattaggcactttttgtttaaaagaccagacagatcacattcgatagtaacacgtgttatttaattaagcagtgttcatttgttagataagataagagcacaagcatatatttttaatttcttttaatttgtagcccctactactggctccatcatatacattattttagctaagttatttaatggctgaaaaacgacatagcaccctaaacttctttctgaccattctactgaaaattgagattgacataaaaggaaaatagctaagacatatttacattctttctagaacttataaagaaagatgcaacaaaattgaccttcactgcttgaagttcaattaacagaggttccatcttcaacattcagactctttgggcgatacaagaccggctgctcgcctgaatgctgatggtgttgggggagttctgggagacaggttaacaaactccagggcttgtactctcacttctacagggtagtctgcaacacaaccgattcttgggccagctccggttgaccattttagtgagagctgattccctaactgataagatttggctgccttctttgaattaattctttctaataatttggcttttggaacctcagctcttggactctgaagaccaccagataatgtcctcttgtaattgctttttgtttcaatcagggaaggtttggcagattcaggtgatgaggtactctgtggatcttctggagctttgacctcggcagtttcagaggctgttaaattatcgagcacagtcccagctgtcctcaccttgctctcgtcatatgtatctgaatcttcatttgccttgcgtatctgaagacaaggatggcaaaaatatcatcagccaaaacagaaagaatctaaaacaacatgcacgtggaaattcatttaactgaaaatttgaccaaagcattagcaccacttgtcacatacatattgggtgaaaagattcacggaaatactaaactactgttttaccaatcatcattgtccaaaattgtttctactttctactaataacatcaagcctttcgattcgagaccactaactaagcagtaaggtcagactaaagtattacctggacttcattaaggttcactccattttctttgagaattgataagaaggtgtccaaacgatcatctagttggccgatagtggccactatatgcagaaatggactgaaaagtcaaagcaattgttgattagacaccataaatcagaacaataagaactttgattcggtattgctaatatgtctagtttgtataaagagacagaaggttcaaaaaactaaataagggtaacggttcaatttaaacaggtcaaatataataatgcattactcagcacaagcgaataatttcatgcatataatatcttctaatgtatacctcagcgtcccaagctctgcttctagt

SEQ ID NO: 188654 - DNA, 1684 bp, Cannabis indica
tttcgaaaccctaaatcactctcgctgagatcagccatggcttcctctaaagaacgggagaactttgtctaccttgctaagctcgctgagcaggccgagcgctacgatggttattcttttatgctttctatttttttttaaggcacatgcatacaaccttttagcatagtctctttttcgaattttaagcttttatgtggtttgcttttgctgttgtttttcacagtcaatctctgttatgattgattggaatcgttttatttgtttatttatttatttgatatcttgctttgaatctgaagttattttagtgaactgttgatttttggtgaaggaaaggaagcaaccagaaacttatatatgaatagtgcattgaattgaaataattaatctactttatatgtagagaagtgtgactcagaatagttgtgtacaccttacacttagcacagtcatatgatttgttctggattttgcttttccacttgtataaataaaaatttcatgtgttgtgtttatagtttgattcattatatatttttattctttttccactgataaatatgatttgatgatgcttctgcttgaatccttgtattgactaattttactgaaagaaaactaatcaatcttcttatagtgttcctttacatggctttacttatttcttattctaacagatgctttttttggtgccaattcattttagaaatgtactcatatagatggttacatgtatatttatttcccataaatttgtcaatgtatagacagaaagatttaaatgggttatattgattgaaaatctgtgtcaagggtcttcgtacaccctgatattctttatatgaatgacttcaactctaaaatctgactcttacttgttctttcctagttttctttcttactctttaatttgacagagatggtggaggcaatgaagaatgttgcaaaacttgatcttgaattgactgttgaagaacggaacctgctttccgttggttacaagaatgttgttggttctaggagagcctcatggaggatcctgtcatcaatagaacagaaggaagaagctaaaggaaatgaggttcatgctaagcaaattaaggagtaccgccataaggttgaatcagagctctcgaccatttgtagtgatatcatgaccgtcattgatgaacatcttattccatcagctactgctggtgaatcaactgtgttctactataaaatgtaaggagctattgtgagtgaatacgatatattttgtacataaacttttgtttgaggtttgacatgattatctatgttgttgagttttggttgcttgtaaactattattgggtacaggaaaggagactactatcgttatcttgcagagttcaagtttggtgatgagaaaatagaggctgcagagcaatcaaagaaagcatatgaggttgttctttgtctcacttaagtaatgtttcattaaagttcattcttttctgtttgtgcctttactaaattttttcttgtttaaaagtaaaagagttaaacaaaaatggctcttaagcaagtattaaccttccgttttttctttttaataataagataaaaggttgggatagcataggcagccagagaagtatactcaggtttagtgttcaataaaacctctaaaggaatactgtattttagtctaggattt

SEQ ID NO: 188655 - DNA, 4591 bp, Cannabis indica
gtattgttttgtttgagggaaaaaaattcattatccatggccttgagccattgagaaaattttgaggcttgactgtatgaagttgcctcgagttcgagatttgcttagagtatggcatttcgaaatgatttgtggagcctttcatacttgatatagttgtcaagtggatatgcagtagaagatgtgcatatgaaatcttttaagtggataggttttgaagtaattctaccagttttagttgtctttgttgtatcattagatgcaacaggaggggggtccttaggaggattagcatgagaatttgtgttaatatgttgtgaagggatagaagtagggtgaaatgttgcagcagggataggtgcagcaggtttggcaaagaaattgttgagatcagattttaacgaactttttaaagggacgatggtttcataaaaaataacatctcgagaatgaaaaataagcattgttggctaaatcaaggagggtgtatactttcatgccattgggataaccaatgaagatgaaagcatgagtacggggagagaatttatgtctcttactaggtaaagaggatggatacgcaaggcagccaaaagccctcaagtgactgcaggtaggctgcttattgtgcaagatttgatgtggtgttagatattttaataagggggtagggctcctattgatgagagaaacaatagtgtttataaagtaaggctagtatgctaggggaagggaggattggaaagccaaagctcgagcaacagtcaagatatgttggtgttttcactcaactacagagttttgttgaggtgtttcaacacaagagttgttgatttggatacccttttgagcatagaaagatgtcatatttagttcttttacattatcacaatggatagctttgatatttgtagcatattgtgtgtatattagagtgtaaaactgagggatatagagttatgcctcagcttttgtttttaacatatatacccaacagaagcgactgtggtcatctacaatggtgagaaaataacgaaaactttcaatactttggacatggaaagggccccaaatgtccatatgtatgaggtcaaagttagatgtagcaaagttattgttcgaaagaaaaggcaatttcttttgctttgtaagatgacaaattgagcaaggagaagaaacattaggatctttagaatgtaatattttattgattagatttgtagtgtacatagatgggtgcccaaatctggcatgccatgaatgagaattattacaagaaatgttacaaacagtgttattgtggacagtatgtgaaatcatgcaccagaaaaatagaagatggccaatacgcttagcaatcccaatcctcttgttctgggaatcttgtaaaatgcagcaagatttttgtgaaaaaatatgctgttagatagagtttggaggaaagtaggaacactaaacagattaaattgaaaatcaggtacataaagaacattggataggtatagttgattagaaaattttatattgcctgatttgtgaattttaatgcttaagccatttggtaatttaatggatgcggcaatgggaatgtcatgtaattgggaaaataaagaaatgtcacaacaaatatggtgagtagcaccactttcaacaatccagagagagtttgagttgtgtttgatattaccagaaatgtgtgaagcaaaaggttgagcttctgaagtggaagtagttggctgcagcttctgagtcagaagagaaatgaggttttaaatgtcttttggtttagtcagattggctaaaaaagatataggatcagtagaagtagatgcttgattagcaactgcctgtgtttcttttttcttgtcaccataacctggtgggaagccgatgagaaagaaacatttttctttcaaatgaccaggtttgtgacagtttgtacagtaaggtctcattcgcttgttgtgattttgatttgcatcagcagcagatgcagagggattttgtgcaatagctggattagtaaaagaaccttgagtagaggcaacaaggagagggaatctggggggttttgaggttttttgcttgtctttcttcatggataacaatggagaaactttagacagggaaggaaagggatctatgcaaaatttgagctctaacagggtaaaaagattcatttaagcctgttaaaattgaagaacacgttcttgattcaagaaagcaaggttatcaatggaagcagcacatgtgcaaggaatctgaggacagagttcttggatttcatcccacatgcacttaagtttggaaaagtaggaacttacagagtcatcgccttgatgcagagtgatgagcgattctctgagtcgaaaaatgcgagaccgtttccctgatcataccgtgaattgagctcctgccacatctcagcagctgtatccaagaacataatgctgcttttagtatcaggcgagacagaatgaaggatccaggacatcaccatctgattacaacgaaaccaatggtgatgcagtggatgatcgataggaggttgaggtaaagttcctttgaggaagacggccttgtttcgcgcaccaacggagagttcgaaatcgcgacgccatgattggaagttcttgtcagataggagaggagtgactaaggtgagtcctggattatcactagaattcaagaaatatggactcgaactacctttcatgggacaggtcgtgttgtcgcatttgggcgaaggaggaacaatgtctccggtgatagcagaggctagaggaatgatcggaggatttggaggagcatctagtatggaggatgaattgttcggcaatggagcttggccggagttcctggaaccaattgctcgagttctaggcatggcagcgatcgtgagagtgtttaagcgactgataccataatagagaaaaatgaactgtattattatgagacccaaaacagggtatttatacatggtaatgttatagaaatcaagaaaaggaaaacggagtataacggtatcttaataacttgcctaataccgttagtaacagactaactaatataacggtaactaactaagcctccaatataccccaacatgttaggatgtacattatagtttgttgtaatataatgagctaatttctagaaaaaaaaaaaatcacaagagaatgtagttttatttatttattcatttatttttgaaaagaagaaaatatatatatatatatatttatatatatatagtgatgccaaacatttagaaagggaatgatgatgggtggttggtttgggaagcaaaagaaaagatagccatggaattgatatttttgttgagtgtaagtgagagtgacgcataaagtaagatgtttttgagtggcttctttcttttttatttcctttagctcctgtccattcattcatttatttattttctagtgaaagggtccattcatttgatgttgttcttatttctttctttctatacaagctacattttattgttttttaaacttttttttttcatttaaaaaagaaaatagacatatccattccatccttgtcaaatgtcaataaacgtgttgctgctataacctatgagatgtatcacgtgcatatggtaagatatcttataaaaatactatactattaatttcttttattataccacatcctatttttgactaatttattatgtatggattaaattcaaaaatatttgtagtcttttttcttttgcctaattcttaaaatacgccacctaacctaatgtaagctacattgtctagtagattcaatatttgactataaataatatcttattattctcaaggagaattatcacaataagaacaatatattatttagaactaaatgaaaaacattgtaaatcaagatctcgaattttatttcaatgggcaatacttagtaagtaagtttctttgcattccttcaccctagttttaaaaaaatcttttgaaaaaactaaacttgtttaatggaagtcaagaactcgtaaaaaataactttgaggtattttacattgcaattaacatttataaaattatgtataatatatttgtaattaatcattttaaatataatatttttcattttataaagagaaaaaattacaaaagatttgaagtattttaatattaaatatttttcattaattatgttttttttagaaacatattattataaaatacttagttgatatatttagtaaagatgataaaattaatatgaagtaatattttcgaaatagattttgttggtctaaagtgaaaatgtttaggtaagaatatattgtgtattaatcgcatatatattcatttatttatatatttatattatataattaatatttttgttctctgaagtctgaacttttacaccattaagttatgccccctatactataagacttattaataatacccctcgaaataaatttttacagtaacatagttcttttatcacatttaattcaattctatcatgaaatgcgtgaagtggtagataatagctgataaatgaatgcaaattaaatactattcatccttttaattattatatg

SEQ ID NO: 188656 - DNA, 7706 bp, Cannabis indica
ttgagaagaataaaccatttgcacggactaggtagattctaaaatacttgctgccaaaagttatttgtggttttgttttgtgttcataatggtcataacatcatctttatttgcagggatgatccagatattgacaaaatgatgaaagaaacattgagatggggcgatccgatgttacatttggtaaaggtaagtcgataatgaagtaactatagattgtttagtgatggaatctaccgatttttaaatgctcactcattaccattttcacacaatgcagaaaaagcaatccgaacctgctctctctaacttcggggataatgaaaagatgaaagaatcaggatttattattcctcaggagatccctaatcatagctggttgaaaagaggattagatgctgcaccaaatcgatatggtataagaccaggaagacattgggatggtgttgatcgtagtaccggttagttgaaaaaataaaataaaatcaatctagtgggcacaatatcatggacttagcagcatttctaatatttcaatttgtgtttgtaggatatgagaaagaactattcaaaaggaagaatgagaaacaagctaccgaaagagaagcttatctttggtctgtagctgatatgtgattgaatcaggcatcatccattggccttttgttagcgaacagctgaagtttgcctcgaacaatgacgatccagactagaattatcagcaaccaaattggactcatggtcacaagtgttgtttcttctagttatttgctattggttggaacttaattgagaggcaaaaattacagagaagtatttctttatcttaccttttggatgcagtttgtgctatcatatcaaagtaatatgtatactatttggtattagtttcaaaacagaattagagaaaaatgtcccttgtttcaaaattagagaaaaatagccatttttcattcttcctatttcattatattcttttggctattttttcctcctaatttactcttcgttattatatacaaatgtaattatctttcaccttagttgcctaatgtactccataaatttctttaaacaaccatactacttttgactagtgctggaaatacaggctcgactatttgacacggtacgaaattgacacgatcagacatgcaaaagtttgagcttggatacaacacaacacaaaaatgtgtatagacatgacacaacacgaaaagcttaaaaaatgcacgacacttacatacaaattcactaactcgaaaaacacaacacacattaagcttgaaaagtatgtcacgtgacattaaaaaacccctataataataataaatatgtatttgttaatgataaatgagtgaaaataataataacatttaaatataataatattgtaatttaataattaaaactattaaaaaaatacaaaagtaaaactatatattaatttatttgtagtgtgataacaatttgagttttataaataaatattcaaattttcataattgtaatatttttttatatgcattgtcaataaaatattgttaaaaaattatataaatataattaagattataaaatatacttataaaaaaattatgaaaaagtaatgaacggaataaaaaaataagttgtcttatttaagaaaaacaggtcgatacaagcaaaacagtgcacaacatgaaaatgttgagcctacattttaaaaatattatcatgacacgacacgattcttattttaaaaattatggaaaaatagaaaaatattggtcgagccaacacgacacacataaatttacagcactactcttaactactgaatggtttttttctttttatttctcttataaatatgtaattttttattaatatttacgtatgaaatagattatttgaatattattttttatattgtaaattatttaaaatttattaaaatttaacaaaatattttaaataacttgcacgagactattaaaaaaattacattaaaatatttttatgaatgctgaatcagtttgagataagtgcatcataatacatgtaaaacaaatgcaatagatagataaaaattatcttagttgattaacatattttttttatagtaaatttatcaaaaaaaaatgatttttttctcttttaatggaatttcttgaatgaaatttccttttaaagagaacagagtaagctcttgccgccaaaacacaattgtgaagaagagaaacgaagatatgtccgtacgactgaaaccatcgaaatcaacacctcgtttgtcatcgatttccctcgaaaagcttctcaaatctcacaaaaacctttctacaccctctccaaggctctggcttaaccaagaacacgaactcaatgatctaggactccccattttgaagctaacacatcctcttctccgagctttggactcttccaatggtttcagagagttcaaccagattcagacccagctcgttgtctctggtcttcttcaaaattctcttgttgcgagccgagctattaagaagctctgctctgctcccaagactctccctcgtgctgttaacgtatttgatttcattgatgaacccgacgcttttctctgtaacactattatgagaagctatgttaattcgaatgatccgaattctgcaatcgggttctactacgagaaaatggtgggaggtaagaatgttgttcccaatcattatacttttcctatattgattaaggcttgcgcaggaattgggtctttgagagaaggggagaaagctcattcaaggattgtgaaattagggtttgagttggatttgtttgttcgcaactcgttgattcatatgtactctttttatggtagagttggggatgctcgtgtgatgtttgatgaagggtctgagttggatttggtaagctggaattccatgatttatggctatgtgaagaatggggttcttagtgttgcacgtaatctgtttgatgtaatgcctgaaagagatgtttttagttggaattctatgattgggggttatgttgaaatgggagatattgaagctgctagacagttgtttgatgaaatgccgggtagagatgtcgtttcttggaactgtatgattgatgggtatgctaggatggtgaatgttcttgaagcttttgaccttttcgaacggatgcctttgcggaacatagtttcgtggaatataatcttggctctatatgtgcgtagtaaggattataatgggtgcttgagattgtttgatagtatgatagaagtaggagaggcgaaaccaaatggagctactctaatgagtgtccttaccgcctatgcaaacttgggaaggcttgataaaggaaagtgggttcattcatatattgaaagtaataagattaagccagatgtgttactttctactgcattgttgacaatgtatgcaaaatgtggggatatggacatggctaggaaagtcttcgatttgatgcatgagaggagtgttgtgtcctggaattctatgataatggggtatggtgtacatgggaatggaaaaaaagccctggaaacatttttagagatggaaaaggaaggtcctttgccaaatgatgcaactttttgttttgcattttgtgctagcatgtacacacttcgggaatggtttttggagggttggtggtattttgatcttatgcaacgagtttacaatattgaaccaaaggttgaacattatggttgcatggtcgatcttcttgcccgggctggtttggtaaaagattcagaagaacttatgagaaagatgccaatggaggcaggaccagccttatggggatccttactttcagcttgtagaactcattcaaattcaaatcttggggagattgtagccaagcgactaattgagttggaaccaacagatattggaccctatgtgatgttgtcaaatatatatgcatcagaaggaaaatgggctgaggttgaatgtgttaggaaaatgatagcagagaatgggctagaaaagaaagaagggagaagcacagtccacattgaagaagttggatctgaatcttctctggaaaatggttcatttcatagaagaagtatgatgtactcaatgttgagtgaaatgggtgctcagatgaaattttgttgtacaaatgctcatgagttagagagtctaaatacttaatctagagaaaaaaggctctgctaaaggacttttggagatggaaaatattgaatttgaatactagaccatatcatataaaggaagacaatgtcagtaggagaaaataataaatctgtatgcattcaagacagcaaatttggatgcatatccagcaggtagccctttattaagaaaaatttgtggctatgtacataaaacatatgttgttctttatactttgtagctcatagtcgatccactgtgaagaaaaataatttatcattttttggggccacctttgttgtattttaatgacagttaatataactttgaattttctctttattgcttttaaggagttctagttttcgagtggtatgcttcttctgcttccatatagttgagaaaaattgggctatgatgctactggttttcttgatgtgatcctgccattgttttataacaagatttggatgtttaaaacacatttttctttttattctattagtaatatcatgaaaagattacattcacaacttcaatgacactttttatagcagcaaaacaaagaaatttaatcaaaaaaatgaagcacaccattacaactattaacagcaaaaaccatggacttattttatggtacttgctaaagacataaaaataataaattgttgcagatgattcacttagttcacttgaactcctgtatcatatgtttctccagctttccattcttctggtatgttattcacaggtacaacccatgactcgtcctcatcatcactgaacagcatccttatttgcagagctccacttgggggtgagtttgttgtccataccgatccttgactcctatccaatactttgcagacaaaattttgagtctgcaccaaacatcatcacagttttctttagttgaagttaagttcacacaacgtgtagatgacgaaaaggtatgatatatttgtatattagttattgtgaaggaagtgaaataggtacctcacaaagctgcacagcagtgatatctttctttccttgttgatagtatatgacaaaagcaaaatagtgagggtaattgctgttctcatctattttgattgtgatatttttgttggggtagctgcaagaaacactgtttatatggacaaagagaaagaacactattagttaagtttcataaaacaaagatgattttgaagtttgaacaagctcttaccgtctgtattcaatatcaaccacaccaagggataacaaagatgattctgtgtcagtagtttgagccatccgacgaaaggctctactgctcataatgaagtctgttcgatcaccagaaccgtggtctgttacaactacggtaactcctttgtctgagcaatatgcactgttactgcatctcacctatcaaagaagatcaaaatgagtaaatacatggcttaatattttcatggttttgatgtttagatttagactcacctcgtagcaagcaccacagccaactccatctcgatagagatcagatactgcagagacaagtccatcattgatggttgctccaaacgaaccatatccgcatctaccagctgttaaatcaaatgaaacaaaggaaagaagtgttaggtaagcatgtatgtttactggttgaaaaacactaaaatatggttttctttatttgttttctcttatcgaaatgccttacaatcagttcctttctcatcagaattgggatagtaagatgcccgggattgagtgaaacagtcatcacaggtagaagcttttgccttagcatgcattattagtagaattgcaaaaacgaaagagagagaggtaagagaggttgctgccattgtatagaaaaacttaaacaaaagcaaaggaatgtatgaatgacaagttggtatgcatgaaactgtaaatatgtcacaatttatagagttgtaaagagactaatcttgttgttaaatcatgtttacaccaactttgacttttgctaatagtccttttgaatcagaataaaatgatttcaagtgtgataatcagctagaaacattgacttacttaatatgctatattaacaaaaagtattcaaactaattaaatcaagtttcatattaagttcatgaaattaactctagattttttgcagatttggttcactgtattattgtttgtacaatattggaagttgctatcttttcttatgtgacaagcatacataacattatggataagctggaataaaatggaatgaaatttccttctcaagacttggtcttgtttacaattttccagttatttgaccatgacaggcaaattattttgacttgcctaacagagagttaaatcaaatattgaaattgaattgcttgatttggaaataaaagggggaaattaggtacttatgcactaaagagaatcatattatgtaaattgcaaggcatttggtttcaacagaaagaattcaataacaagacattcttggttttctgccaaaacaaatttcaagttctaagttctaaccatgaattgcatactttcaaagaattaacagagcacaattagtctcataatcataattagttgacatataatgcaaatttctaccttaaaattgtattttaaatatgccatctacttagaatgtcaaagcaataaagtaaattttattttaaagtaaaataaagaataacagaaagaacaaaggctattttgttttgtccaagccaagcaaatgtcttgttatggtaataaaatatattagggatactatttttgtctctattaaattaatagggacatctaattaccaaaaaaaaaaaattaatagggacatctatgtttttggcattttaagaaaacatattttttcatatgacattatttattataattatactagaggcatccgactcgtttttaaaaattttaaataatttataattttgaaaatagaatttaaaaattcatttacacgaatatttgaatcataatttcaatcctataaattatcctcatacacaatcaaattttaattataatttttgtaaatactaaaaatagagaggttccaaataatgttcctacattaaaattatttattatatgaatatattccatcttaaagttaatacttgtagtatgtaagttcaagattgtgtgccataatgttgaatacaatcaattaacacgttttcgtgggtagaatttgttagcagacatttgagaatatacagaagtagttagctagccataatctatgttatgttatggtatgtttataggtgagtggagatgaaatcagtgaagcagatcaggcatgacatggaatccacttgttggagttggagggattgtgcggcaggcccatggctgctctgctctgctaatttgaatttgattggtttaacattaaaaacagatagtgacatgaatcactcaccataaccaatatatgcaagttcctttggcatacaaatacaaagatctatgttgctatttgagtgggggacctccattataacatttcatacattcctatacctcaggaaatttatgaatcac

SEQ ID NO: 188657 - DNA, 4669 bp, Cannabis indica
attgtatgtatatgtgtttgtatttctttgatttgtacggtttgtgatttggttggttgtggatttttagatatggtgatggtgagccaaccgataatgccgcaaggttttataaatggttctcagaggtatattgaatgaatttcaagttccccttttcttttttctccctttgaaagattattgaatcacgattatttttttttccttctgaattgacattgaaattgaatgtactgtggtgggttcagggtaatgaaagaggggaatggcttcagaatctgaagtacggagtatttggtctgggtaacaggcagtatgaacatttcaataaggtttgaactattttgcatgtttcattttactagtgtattcgtggcgtatcaattgcttgatgtctaatttatgtttgttatattcttgttgatcaggtggccaaggtagtggatgatatccttgtagagcagggtaagattatttccctacttggttaaaaaattatggtaaacatgaatgttgttattatcaactttccaatatatatgatgataatgtatcctacatgcaaattgtttattgcatgaaacccaaagggtactttatctttgggttgatcagtagtaatgctagagaccctttgtaatgtggcatgatttttaactaccatttatgtttggtttaaaaacatgccacatcattgtatgcattttgtgtgtatcaaagtgtttctagcattactgttgagttgataccaaatatattattatacattcaatcttagaagagctttctgtgatgtcttcttgaaacaaattttctgtaatttcttaagatggttaacaaaattattacatgcaacttgcaggtgcaaagcgccttgtccaagttggtcttggagatgatgaccaatgcattgaggatgacttcactgcctggtatttttcaattgcttctgaatgaattacacattaactactacattttagttcttgaataatgacaagtcttttggcattgaatgatgtttataggagagaattggtatggccagaattggaccagttgcttagagatgaggatgatgcagctgttaccaccccttacaccgctgctgtattagaataccgtgtcgtatttcacgaccctgttgatgcatcacttgagaagaagagctgggctaatgcaaatggacacgctgtttatgacgctcaacatccatgcaggtattttattaatgatgcttttcttgatattctggtgtaatttgtcttgcattagtgcaatttaaatctcacctgtcacttgttttctccatgaagggctaatgtggccgtcagaaaggagcttcatacccctgaatctgatcgttcttgcactcacctggagttcgagatttctggcacagggctttcgtaagttgctttttcctggctactttgtattctttggtgtttcctccaaaatcaatggtttcttagccttattgacttgtgtgtctttcttttccagatatgaaacaggggaccacgttggcgtctactgtgagaatcttccagaagttgtagatgaggctcttaacttattgggcttgtctcctgaaacatacttctccatccacaccgataaagaagatggaacatctcttggaagttctttaccacctcctttccctccctgtaacttaagaactgcactgacacagtatgctgatcttttaacttctcccaaaaaggtttgtctttacaactgatctattagtctgatttaagtgaacattaatcttccaatagctaattgttcctgtgcatttattttccagtctgccttgctagctttagcggcccatgcatctaacccagctgaagctgatagactaagacatcttgcatcccctgctggaaaggtttgtgaataacatcatctactgtggcttttactcggtcctgaacttattaccactttctgttcgatatgtaagtttttattgcattaatacgcaggatgaatatgcacaatgggtagttgctagtcagagaagtctccttgaggtcatggctgaatttccttcagctaagcccccacttggtgtattctttgcagcagtggccccacgtttgctgccccgatactattcaatctcatcatctccaaggtatagatttttgtcacttttctgcattgcttcaagttattaacctgttcaagtaaatacttctttctgtgtacaaaaacaagctacaagccttctctgctacaaaactttttttttctattaactagttttatatcaagagaaaaatatttacaagtacagcgtagttaattaagtctatttgtaagcgaggcagttcttattatgataggaaaattttggtctttgatctcgttctgtgaatattcgatttcctttctttttgaactcagtgcagtgtacttaccctaaaatattttcaacagaatggctccatctagagttcatgttacttgtgcattagtttacgagaaaacaccagctgggcgtattcacaaaggagtgtgctctacttggatgaaggtatgttctgtaattttcattggtaaaaccttattaatgcaatgtttgtatgcggtagttgctcatcgtcgccccttttcatactaccaaaattgtttaattgttttccatcatcatatactctatatgtcccattgaatttcaaatggactgaagaactgatctggattttattttcagaatgctgtgcctgctgagaaaagtgatgattgcagttgggcacctatttttattagacagtcgaacttcaagcttccttctgatcctaaagtaccaattatcatgattggtcctggcacgggattggctcctttcagaggtttcctacaggttcaatttgcacactagatcttttataaacttaagtaacacttattcacaaaatcagggaatataactaatacaaaaatttactttctcaggaaagattggctcttaaagaatctggagcagatctgggaccctcagttttgttctttggatgcagaaaccgtagaatggtaagcgattccccttatatacacgaagaactctcttctgttggcgaggtttaataattagcactgaatttttgttcattcttaatcttccaggacttcatttatgaagacgagctgaacaactttgttgaaaacggcgctctttctgaactagtacttgcattctcacgagagggacctactaaagaatacgtgcagcataaaatggcgcaaaaggtaccccacctaaccttctttaaaatgacaaaaaatgttgttggtggtaggcaatttaaattaatttgaaatataatcatatgtttgttcgctttgaattcaggctgcagacatgtggaaaatgatatccgaaggagcctacatttatgtttgtggtgacgctaagggcatggctcgtgacgttcaccgaatgcttcacactattgctcaagagcaggtatttcaatacgaattgttgtgtactaaagctagaatagaattagtgtcacaaactgatgtactaacaaagtctcgggtcctattcgttgattacagggaccaatggacagctcgaaagctgagagcttggtgaaaaatctgcaaatgaatggaaggtatctccgcgatgtgtggtaaccccataaaccttaaaaagggaatgaagaactattaaaagttttaatgaaatacataaaaaatattaaatgcataaaacaattggccaaaccaaaaaggccaagttggtgtagtagtaaagtacttaaaggggcttgttataattatgatgatgaagcctccttccattttgtggtctcttcgaaaatgggcgaaaatcgctcctgttgcggttggtatagcgctctcgcctctcggtcctctggtgattcttttaactctatgtgaaatttttttgttcttgtaatttatatattatacgaaacacaataattatgggctaggcatagtctttttttcttttattttttatttttacttttattattattattattatggactcttaaattttcccctgtattatgaaccacaaaatatggttctaatggcagaatattaatggtcttgtttttcctatttttgtaatttggttacatggatgtattatattcaagtttgttatctctctattctccttttttatatttgcttaatacaattacaaacactattagaacataaatttttcgtaatgtaggttttccaatatttttattttgagaagtgttactgtcaagtgaaaatatattctgaaatttttattttattttattttttataaattattcgtaattttgtaaaaatttataaaaataatattataactaaccataaaacaaatattttcaacacttgaatggattacattacttatttaaccaatgaaggaattgatgtcatactttggtaaacttaatttttgcgtattcaattcaaacaatcaattttatatgtatttggttttttattttcttattaatacaataatcgacaccaaattaaagttttgtgaactataaacttaggtttgattgagtaatttttgttaactaattaatcatgaaacaatagacagtctcctccttggtgcatactccatataataattagtaatattgaa

SEQ ID NO: 188658 - DNA, 3910 bp, Cannabis indica
ttactattttctttttccttaattggatagattgcacataaatttttgtaactcggtctttacattaggttgaataaaatgtagtaaaaattgaccaaattgaccgatatacacccctaatactcattacaataacaaaccaaatattataattaattactattacaattcttaatccattatattgttatcactttttcattacatcaaactaaacatcacctaaagttctcaatataggaaatgctttttttttttaaaaaaaaacaatttcttctttcgattcatagagtttgatatttcttgtgcatatgtcaaactctattctcatcttcttcttttaagaattttcgatctttgttacctgtctttctaggtatatgttttgttgtattttgtttcactatatgtacagtacagatagaaaacgatgttaggaagaattttcttcctaatgtacttttgacttctcatcaataaactttttggtcattttattcaaaaaaaaaaatttcgtatattagttttttgctagattgagttagtgttgtaaatatagacttgactttttgacacagcatgagcctcttggcacgagcatgacccggcaagaaaaaatatgtgcttagacacgatacgacccatattttttatggcccgacacgacacgactcgtattttaaaaattaaaaagctcaaaaaatataaattagactaacacaacacgcacgtatttacagttataaattaagcattacttggttactttcatttattttaatctaatatatatttttctttaaggtgtatatataaatcacatacaaatttatggcaagttatttttgataagtgaaattcagtttaaataaaaatgattagttgtatcaaagttgggtgtgacttgtagaggtgaagttatatttatgaattcccattcaaatcaaaaacttgagcacattttagttagggttgcacttgcacatatttgactttgtagtatcaatatctaataagcaacatattgtgtcttagtatagtaactgaattatttctttctaataatttctaaactgtaaatagttacgttcttgggatgaccattctcatatatctaatacgagagcatataaaccaaaactatatgatgtgatgaggtcaaagcaaagatactctcttttcttattctatcataatagtcgattgagccaaataattcttgtttgcatagcaagtaactcaaaactacaagtttctttcaaagtcaatatattatttgtactattattacaatattgagtgaggaagtaaaagatttacacttgagaaactcccccaaattcaattccaattcccattactgagcaatggcttcaccgacttcccttgccgactggaaagcagcaattttagattctgtaatggtctgtatcagaccatacaccatacatatctatacacgagatgaaaacatgcgtttgtcattgcatttcgcaaatctcatcttgactttaatggcagaagcaggtttctttcttgtccctgctgaatctccttcgtgtttgcgtgtggatcgatttgtcgggtgtaatttttgtattgggatagaaattcccatagaattgtacaatttttatccaactaccataattttggccaagttcaaaatgccaatatttatgtaaatttttgaaaaaaaataaatcaactttagagatgaacgaaccaatggaaaatgaagggaagtagcatatgatatcttttatacgaagaaatcatttcacaaacagacttgacttttaacggcgcactttgcagtttttgccgttaaaatatcttctgtattctttaatggaaagatggagaccccccctgaagtccagcagatttcctttgtgtttcaactacctacttatactgacaggacaatggctcatcctccacactgttatacacacaagtatacatatatttatataaatatatatggaattgcacagcatcgtacgggcaagtttccatatttcaggtgagaaaaactcgaagcttcacagactatgtaccaaaccaatgtaaatgaaacaaatgaatcgtgttatgtccagaatcactgataacggttagtgttcgtggcacatatgggagagagagtgattcaaaccaggttaagtgcagagtggtatgcagttaccattttccgggttctgctgttctttccatatacggcctgtaactctcaacttgagttctttcttgtctcctcccgaaaagaagagtgccatgtttcgttgtattataaggccatcgtggctatctctgaccttcttgtggctatcccggatgcttctagggttgccctcccatataagctttcggtcatttcctccaacctcaaggctgtaactgtagttttgtgcttctgtctcatcccccatgaaacgcagaaatgccatgtaaacaggtgccatcccaagctggaaagcttcaaaatggagacagaaatactgaccaaaacagtggaagacctataacacgaaaagaagtaacagacacttcagatcaatagaatcagacttgcaattctgtgtctgacatgggaatatgaacactctagaatgcagcacaaaaaaatggaggaacaaatgtgtaaatcttgcttgcattataatatcactgctaattttgtttaatatcccaaagtattatggtcattaaaccagtagcaaaatatggcataagcaaaggttctatcacatcatataacttacagttaacatccatgtagcattttccacttcccgggggttagactttacataacggtggttaaatgtacagcccgagtgcatgtcaaccttgtgataatctcgtagatgaccaacaagaaaaggtatatccccaacaacagagcagtctgatccagcatatgggcagttgtacggtctgaaattacatagagactcatgtttgagtttactgtagtaggggaaaatctcagggcaaccgtgagagcagtacttgcaaggcagttcaagcgattcagctaccttctctagtgctaaacaccttatatcaccaagctcttgtctacacgtagggcatctattgtgaactcttgttttacaagtagaacaaagggtatggccattgtgacactgcagaagcaaaattttcctagatatcagccataatattcagcaaaaccctgaacaagatataacaagccccaataaatacttgataccagttgccaatacgtcaacaattcaaagtaagtttagaactagtttcaatagcttgtgagatcatccattcaattcaagtgaagtaaaacaaattccatctagttgtaaaacgatatgatgaaagtcttctttgtttttttttttttcttttttttttgaacaatattgatgaaccaagaaaacctcataattcccttaataaaaacctcttattaatcatagtaaatactacttttcagtattctaaaacaacttccttaacaatcacccctatgggcatgtgtagtcatcctattaaaagatccccattttcttaaattcaccaatttcaaaaaaataattctacacttgaatatatgaatcacttaagggagatatcattctcatgctaatagacaatctatcaaacaaaagatcaaacaaaaaaaaaattcatctacaattgtgtttccttcaatccttaattcaatgaaaaatgttatgcaattgggaataacacaatccatggtgaacagaaaccaaatccttgaagggtcagtaaactttcccagaattgaagcccctaaaaaaagaagaagaagaacaacaaacctgatggatgggagggtacattgaattggtgcagcagggcattcaagaagctcgtggacactggtgtaacagga

SEQ ID NO: 188659 - DNA, 2062 bp, Cannabis indica
ttggacgtttgatatagttcttataacaatcttttatattataaaaattgttcttattataattagttaacattactaacattttatacctaataatatgatatgttaggtgtatgaacgagtcgatcaaacttgttgtatttgtacaatatttttttttttttttttttttataataaaagcttgacatagttcatatttttattttttatgacgacaaaacaatagcaaaattgagaaataatcaaaacaagaacccaccgcccagaggaagagcaactcaaatttaaacttactgagacaagccaggctaaggagcccaagtcctagatagattaaagccataagctagtcgagataactaggaatatatagacaaaatataactcggaccaaaaagaatcaagaggactactcttctgagcgaaaaatagaatcacacaaaattgagataggataagctcgaattcacgttgaaaaatactaaaggcagtctccgaccaaagcttaggtcacttcaaacccctaaccaagataaaatatcccgacgtaaagagattgagagataaaatatttcgacgaaaagtgaatgtggataaggcacataaaataagaacaagcataagaagggaataaataaaagtctcaacaatctagcacaactggataaggcacgtggagactaaaattaaaaatcaataaaagacatgcctcagctaatcactacaatataaatagatcattcatgcatgcataagaaattaatgcataaatagaaaaaatttatgtagaaaagagatgcattaagaactagaaaaaaaaaaaaagaaaaaccccaccaaaaataaaaatactctaagtgaatttcttgacaaaaagtacccatgcgttttggtcaacacaatacatatcgttactttatataaaaatgagtaatatgagatactatttaaattctacaattagtaaatattagtcatttatatttttagatgacaccattaattactcatagaaaaatatgcataattggagtttctcctaatcattttcctataaaagttatgcatttgttttaaaggaatgaaaagatatttttgtaaaaaatatataatgtgatttttagaaacaaaatacaaaagttgatttcagtctaaaaattaagaaatgtctagtcgtgttcacgcaaatatagatatggtcttttagtaacatttggttcttccaacttacactcagagttctgtcccgcactctcatattgtagcagcaattttggcagccatgttcatggtggctaaatcctcaccaaacttattctcagtctcaccgactcaagaccatgactgtaagacagacttgctaagatcctcaactgcttctcttccattccaattgtccccaagaagctacttgccatctctcaattcagcctcttcttttcccgtaatccgatcatctgcttcggctgctaaagtcgtcagccatgaaattatcgattacaatgcaaagatgagctatttatgtaaagtgggtaacctgaaaaaggccatggagttgctttgcgggtcccaaaaatcagagctcgagttaaagacttactgcgatgttttagagctctgtgcagagaaaaaatcattacaagatggaagaaaggtccactcttttatttgtgagagtggggtacctgttgatgggcatttgggtgcaaaacttgtctttatgtacgtaacttgtagagatttacgagaagcaagacgggttttcgatattatttgcagtgacagggttttcctttggaatcttatgataaatgagtatgcaaagattcgtaatcataaggagagtgtaaatttgtttatgatgatgcaacagttgggtgttcaagcaaactctcatacattgtcttgtattttgaagtgctttgcagccttaagaaacgtaaaagaaggcaaaaggttcatgcatatatttgtaaaatgggttttgtttctcacaacacggttatgaattctttgattgctttttactttaaaaatgggaacgttgaaagtgcacagaa

SEQ ID NO: 188660 - DNA, 2297 bp, Cannabis indica
gttacaggttttggcagcttgatgtatgtaaagggtagaaaagtgatggagttatttcctggtagcttgagggaactatggaaagactgggaactgcgtgttatggttcttgttagcctcagcttgcagatcattctcatcttctttgggaatcgcaggaaatactcaagtaagatttgggtaagaattgttttatggtgtgcttatttgatggctgactggattgccactgttgctcttggtgtcatttccaacaatcttggtgatgttgtggaaacagttggcaaaggtggctctcttgatgctgatgctgagttaactgctttctgggcaccttttcttttgcttcatttgggtggtcctgacaccattacagcttattcattggaagataatgagttatggttaaggcatttacttggattaggagtacaaacaggggtgactctatacatttttctcatggcttggactggttctccactctctcttctgtcaattctagtgttctgtgtaggaatcattaagtatggggagagaacttgggttctcaggtcagcaagtagtgagaaattcagggactctatgttaactcctgctgatcctggccccaactattccaaatttatgcaggaatatactttaaaacagtttgaggggttccatgtgactgctgatgaggtgattgaggctcaagcccccgtgagtgtctctttggttgagaattacgccattcctgatgcagcagaattgctcactgcccatgaattgttacatgttttccagcgccttttcgtcgaactcatccttggttttgatgatagggaaaagagtcaatccttgttcagaggaatttcattggaaaaggctttcaaagtggttgagattgaactgggatttgtgtatgacaagctatacaccaaagctaaagtcatatatttatttcaagggtgttgtctccggttcctcagttttttttgcacccttggtgtgttggttttcttttcctttgctgaacataaacaatcacactcacatgttgatttgctaatatcttatttactgctatatgctgctctacttttagaggtatatgcaataatcttgttgatctcttctgactggacaaatcattggttaactaagcatgccaacgcctccattcgtcgattcgtcacttgtttgcagctgcctaatgaaaatcacagatggtcaaattccatagcacagttcaatgctttgagcttttacctcaaaattaacaaaccaactatcggttatgaaatccaaaagcttctctgccttgattccctgctagaaaaatcccggtatacaaaatacaagcaagtgtccagggagatgagaacactaatttttgaccatctcaaagagaagtttgagcatctagtagcaccaagcattgtggcaacagatgctagagccgtgcttacctgccgaggagggcgtgtcttagaaaattattgctgtactgaacttgattggagcatcaaagtggattttgatcaaagcattctgatatggcacattgctacatatctttgttactacaaagatcatacagctgaaagctttgataacactaagtgtaaattgagcaaaaggctatcacagtacatggtgtatcttctagtgatgcgccctttcatgttaccagtggggattggtatgatcagatttcgagatactcaagctgagattaccaaattctttgaagaacacaagtcatcatcatcatcattgtcagacattagtagaagtagtagtagtagtactcagtttttctcttgggctagaaacaaggccaagttagataaatcccaagcctgcaacatgttgctgaaagtcaacactgcagttccagccgtgaaagtgaaaggagacagaagcaaatctgtgctgtttgatgcttgcaggcttgcctgggagctgcaaggcatctcagataaagataagaagtgggaaatgattagtgaagtttgggtggagatgcttgcttgtgctgctagccaatgcagagggaatcatcatgctcaacagctcagaagaggtggggagcttctcactcatgtttggcttttgatggctcattttggtttaactgaacaattccaaatatcacaaggtcatgctagagttaaacttgtagtcaagtgacaaatactgtgtcatcatatcatatataataatatctaacttaaacactactataacgaaatttaagatataaaacaatggtagagtataactgaattaacagaagattttgtctgtttcat

SEQ ID NO: 188661 - DNA, 2193 bp, Cannabis indica
attaaataaattttagtaaaaaagaatttattatagagtttttttaatcaaaacacttttctttaaaagttggattgtactaattttaacttttaatttttagtattttcataaattttttaataaattatttttaattgcttactaaatagttttttttgttcccaattttttttaaaaaacagcttttatgttttttaaaaattgagccaaacgggctggtaatttacgagtacacgatttcagaactacactgccactattacactattacatatgtgcatgatgttggagattaattattattattattacaatttatgtacatgccaatcatctcaatttaatttataaggcgtgtagataacacttccttagttgctttaaaaggacacgtggaactaacaaaccctttaaccaagtgaaggtacgtctttaaatcatgacatgtggcaaagttgatgttgttcaagtatggcgactctttactacatagcttaagctctttccccacgttggcatagccccactcggtgcttttcatgcgctttcgaatccaacttgccacgtggaaactatacattcttgccacgtcattatcctcttcaatgacaaagcccggcactttcgtaaccaaatcatcggagtttacaatgcgtagtatcttggtcccacttttgtccagctggcacctcaagcttttattcccgacgcgaggcccaccgaaagagaataccgttacagatggtgcgtcagcgaaagtggtagttatatcatacgcgctgagaatcgcgagtgcagctccgagactatgacctgtgatcgtcaagctaagtggctcatcaccgtacaactcaacgattctcgccacctcgtctctaatcatgtcttgcaagctcggacacgtggctgtacgcgaggtgtaaagactacaaaaccctctctcaaccctgggtcggcaacttccactgggacccacatgcgggggcaaatcagtcaatgtggtgtgcaaattctctagccactccaaacacgtggcagtgccacgtaaggcgatcacaacatctctacgaccaagacgactaatctcatccttgtcttgacaaactgccacgtaaccaatccaactagacttaatagacatccagctaggcagcctatcaatccaacctggcgtttggactccacacgtggcatgcaagtgcttggtgacccgatacccggtcgaaccaaacccggtccgagtgaggagcacatttttggaaaaccgacacgtggcataagaagaagaagtggggtcaaagtcaaaagcacggtaagccgcgtctacaaactgtccgtaccttagaatctcacaacgcatagcatggtgtagagggtcgagcaagccctcccagtcgttgcaaccttggtactctctccacttctttcccagttttggtgggcacaaatgacaattataaaaggcgtcattttcggtcaacgttgtcattttttgagtctgcattttcagtagtgaagtggtgtcgtttttgattgcgaaacacgtaaaagaagaaatatgatcagaagaataaggaggtaataataagggcgcagtagtagaagtagtttgttgcactgatgaggttatagctattctataacaagcctcatttttttttttttatgtttgataataatgccatattttttgtgatatatatacacgtatgataatgaagtactgggaccatgattagtaactaaaaaacggcggaggagggaaagagaaagagagagatgataatgatatgatatgatgtggatttggatttggatttggatttggacggtgtagattttgaggaagttttaggaggaagtggaaagtgtggagctaagcgagggaccccactttagcatgaatagaatgtttgtggatatgaatatgttattggagaaggagaaattaatgagttataatgttcactttccgaccaaatgactcgcgtgattatcacgttgactttttttttttttttctttttctttccctcttatataacatgttaattaattattatatattgaatgattttacttcgttatatattctgattgtgatattatatatatgtacgtacttaaattagttctatgaattgtgatttatttataaatcctcttttaataattatatcaaatatataa

SEQ ID NO: 188662 - DNA, 1608 bp, Cannabis indica
gaagacaaagctgacgttttttaccatacaatgcttaaagggtatgcgaaaaactcatctttggaggattctttctctttttattgtcgtatgaagtgtgatgatgttgaaccggttgtgtataactttacgtatttgttgaaagttattggagataattcggaccttagaagaggtaaggagattcatgggcagctaataacatctgggtttgcgttgaatttgtttgcaatgacttctgttgttaatttgtatgctaagtgtggacgaattgatgaagcatataaaatgtttgatagaatgcctgaaagagacttagtatcctggaatactatcatagctggttatgctcaaaatgggcatgcaaagaaggctttgagtctgattgttcgaatgcagcatgagggtcagaggcctgattcggtcacattggttacagttttgcctgctgctgcagatgtaaaatctttaaggattggaaagtctattcatggctatgttctaagagctgggtttgagtcacatgtgaatattgcaactgctcttgttgacatgtattcgaaatgtggttatgtggggattgcaaggttgattttcaataggatgagagaaaggactgttgtttcttggaactcaatgattgatgggtatgttcaaagtgatgatcccaaggaagcattggagatatttcaaaagatgttggatgagggttttgaaccatctaatgttactataatggaggcattgcatgcttgtggtgatttaggtgatattgagaggggaaggttccttcatgaattgttggatagactgggtcttgggtctaatgtttctgtaatgaattctctgatatcgatgtatacaaaatgtaagagagtggatattgctgccaagatctttgaaaatttgcagggtaaaactcctgtttcatggaatgcaatgatattagggtatgctcaaaatgggcaagtaaaggaagctttgagtcactttagtgagatgcaatctcaaaatataaagatggatacatttaccatggttagtgtcattcctgctttggcagagttatctattacacgccaggccaagtggattcatgggcttgttataagatcttgtttcgataaaaatgtttttgtgatgactgctcttgtagacatgtatgcaaaatgtggagccattaacactgcaaggaaactctttgatatgatgggtgagaggcatgtgacaacatggaatgccatgatagatggatatggaacacatggggctggaaaagctgcagttgatttgttcaagaaaatgcaaaagggtgctattaaacccaatgaggtaacatttctatgtgttatctctgcttgcagccactcaggtttggtggaagaggggcttgaatcctttgagagcatgaagaaagattatggcctagagcctgcaatggatcactatggagccatggttgatcttcttggtagagctggccagctcaatgaggcttggaagtttattcagaaatgccaattgagcctgggattacagtgtttggtgccatgttaggtgcttgtgaaattcacaaaaaatgttgagcttggagaaaaaggcagccat

SEQ ID NO: 188663 - DNA, 1876 bp, Cannabis indica
ataattgcactttcaatatattctttccaccgccttaacacgtttcaattctttgtatccgttatttatgaggttgttagtataaataggtcatcttcccacgatatttcataccacctctttagtcttctttattgttctcgtcttgttgtttttcaattatattcatcctcaaccctaagtaagtttgttttccatatctttcatcaatttcttttctctatttattttacatctagtcttcaatctgttttcattctttagttcactccactcctataattttttttcattgtctatatctctgatgatcattattataatcatattgtattggtttaattatataagattaatttatttatagataatataattgtttattgatgtttttttctatttttcatagttaataaattaaaaattggtcataagcataatctagtaatttcgcaccccttttcacaaaaaagaacgtcctatataagttcgaattttccctccttcaatttcaaaaaattacaagttaacaattggctaatacaacaggtacgaacttgaagggatcttttgtatgtttggtaagtgcactcttatctcttgtatttttttaaaaaaaaaaataaataaattataggcattcaattgaagaaatacaaatttagtcagttatacaaatgatacacttggtcaaccaaaattttctatttgacaaataatttatgagaatggtgtggttgaacactaaataagatcgtagtctgcttcatagtgttacgattacttgagtaaaaaaagtttataattttttatgtgaataatttgattaaagtaacgctttaagcgagattacttctcatattgataggaggaaaatctctaaaagagatcaataaattttttattttgtttgtaatatgtaggtgagtcggtctattgttggtttgtggatactgatttgtgtagcatttgctctgttttgattaataaaatcttctcttttaattataattaaataagctcatcaaattattggtatcaaatatctcttaaagaagactccattttattattatttatgtcttaatagttacgttactataataattaaagttatagctgacccataaagaaaagaagaaaaaaaatccaagcaaaattaaattataaagattaattaccatatatgaatagaaatattaattaaagatttatatcattattatgtttgtttaaaatatatggtatgtatataaataattacctttttatgttaattattcattaaattttattaaattattaaggaccacttagatatataggttcaaaatgaattatttaggagttatatttctagtcttataatctggttttaatgctcaaacagtgggctctaaattacaatggttattttttcctctttttctcactttattcaaacttatatttttcactatttaaagaactctacaagtactcattggagcaatacttcttcttcttctttgtttttcaatatatattatttgggtttttgtgttattacattgtttaatttagagtgaattattatatataatatattaataaaaacataaaaatgaatcatagtgtgtcaaaacatgttccaagctttgccaaaggactgcaaattttggtagttgatgatgatagagacactctttccattatcacagcaatgttagaattatgttcatataagggtaagataattattttattttgatgattattgattttatattttccagtacattattattctttctccttaatctgattattatatatgaaattcactgtattttttttttttttttttttttgtgtagtatagtattaattacaattt

SEQ ID NO: 188664 - DNA, 2413 bp, Cannabis indica
cagggagtgcttgctcaggaaagacccaatccttatagattactgctgacatctccatggaatactttcttggaaaaactgtcaattccagaggaccatcagcattaatgagagcctgcctagcaagtgaatttatattcatagtgtctcgaaaatgaggctgtaaaagtttataaattgggtggaccacgcttagctgcctatttgtaacgatcacaaatggctcaatcacggcatgtgtatgcaacctgtatagaccacaaataaaaattataaaacattaaaaattgactgtatactgaaagaagtgtatatgcaaaatttcttccaaagtcataccagtgactgatcaactgatgatagcctgagtcatttacagctacataagctttagcaagttgccaaatggtattttcaacaccattttcagctggggtatatactttactaactgagccatatatgtctccctttggatgtggtaagcttaattcgatggccaagggcttcaaagtaccatcatctttcagaaacaagagtgttctagtggcgtaagtctttgtcggtgttgtatttatccttctaagatatggcatgaatgcatcatggagatctaatataaataatctcttacttttaagtgcctaattcagttatgtcatgttgaaaatgcatcaatattagtagaaataatacattcaaataattataactgcaagtttcaatagttagaaacttttggcaaaaaaatcactacagacattacctcatgtacaacaagcccgtccaagtgattcagtatgtgttcttcagtaattttactagtttgattaccataaacttgaggatttaacttgcttgttggtggaaattcctgatattaaattagaatcaacaaacaattaataacttgcacgcatgcaataattggtgaacttattactattatgaaaattaaaattacttcgaggcggcgaatgacaagaggattgactccagccaccatttctcttccaaattcttcatcagtcctccatgcagatgtatcctctaaaccaagtaagacgaaatagaagaaacaagttagcaaatgaaagagtaatgtgcaatcttaagaattgatgaagtatcatcatcaaaacaagattggttgaaccatcaagataggcgaaacacctttaatcacatgaggcagaggatatttgatgaattgtccagcctcaatatgaaaaatttcctcaagcatttcagaagggacatctttcttgatgttgtcaactacttccttcggtagcttaagtccccctttgtacaagtcaagcacatcctgaaagctatcaaattcacctggtgtctcatcaaaataagactccagtgcaggtttaatggcctgagctattgacaacagtccataagcaagaaagtcagacatcttcacatggttaaattgttcatcccgtggaacataaatggttaaactcttcttaatatccaacctactttcacagttgggatctgtaaaaaaaatatgaattaaagtgttaagaacatgaacaaaagatacaaaattccaattctttgttgaaataaatgaaaaaatgataggggagataaagaaaaatatctaacatttgacacaactaacatgtagaaagaaatatcttacctgtttgggtaggtggtctgccagttcttcctctacgtgggtaaggaaagttactagaccctccaagggtttgacgagctaattttggactcttatcaggattacccaaatcattgtagtaagcataatcatatactctatcccacacttggagctctcctgttccatttcctctcaagttgagaagctcttgtcctctgtactgacgtagtggttcaggtgtttcacttggaagatatgactacaaaaacataattgtgcaactttagatctctataggaagcaatctcattatataagtaatattcatagaacacaatttaaatatttcattgtgtatataaatagtcttcatagaacataatttaaatatttcattacatactttaaattaacgcttgtctgacttttttttaaaaaaagcccacgaccaaccctctatttttaaagaattaataatatttaatatatttccaattggattcattaattatcaaatattagacctaaaaagttataattttcaactttagactagcatagaagtattctccttgtattgataatctttttttttttttgaataaagcatttatatattacaatgcataacttgggattcgaaaccaggacctccaacacacacacgcgctcctatgaccacttgagctatcctcaagtagttcgtattggtaatctttatacaacataatttaaatatttcatttgtgtactttgaatatacac

SEQ ID NO: 188665 - DNA, 2796 bp, Cannabis indica
aaaaattaaactatttataccacacaatactcaataaaatttgctttggccacaatttcggcatgtggtttgatgagtgagaaaaataaaaggaaagattatttaaggaagtaattttatattctcacattttccctgttccgtgttcgaagctatagtttcagaaatttgattccggggtttcatcactgcgtgtgctgctaaagccagaatccatgaacgggtaggagggagagacctcttaacgttaaagggtttggctcttgtcactttttcgaaattaaacgacacaacaagtatgccaaactatctcttactccttttgtttgattttattcatttatgaatcaagattatgaatttagggcagaactttgatctgggttttgaaaaatatcgagtattgcttcattatatctggaattcaggtctgttgggcagccccaatcgacattaatgctttgcttagtttaattgctttattattggagccgagagttgagaccttagataaagcctaatagacatagtagaacctgggctgaacttctcttttcttgtatttacccaattgtaaggtctagagataggagtggtttgaaatgggcagtacaagcaagaagaagaagaaacaagtagaggaatctagcgatgaatcctcactctctgagggaagctctgactactctaaacgatcctctaagagtagtcagcgccggcaccgtcatcgaaacgatggcagttcaagaagagagagaaagaggagggaaaaggaggagaaaaggaagagacgtagagagagaagagatagagagagaaagagaaggaaattggggaaggaggataagaagaagtatagggattatgattctgatagtgatgatgactctgagcatgggtcttcttcaagtgatggcgattcagaaccagaacaaagtcgggttcaaccccaggttgcattgcaagagttgttgaaagagtttcctaatgttgtgaacgatttaaaacaggtaatgtctgattatattttctttgcagaagtagtttattgttccatgacaagactgtcctggtcccattctatgcaataataaggtatagtaatagtagctgattaattgctaacattgtatgtgatttagctcttggaaatgatcgataatggacaagctgttgacataaatggtgtatccgaaagatctctggttaagcacttaaagaagctgtttctttctttaagtctcaaggaaaatagtgataaagtctttacacttccttcaaatgttcgtcccactttggaggtcattgcacccctacttctcagttctatggaacctaaaactgaagaagctggtcaatctgtatcattggatgacacaaatccagctctgggtgttgatagcaagctggagacaaatgataacaacatggcatgcccagcagatgattcttttggtcctaaacggaggtgaatgaaattccatttttcattttccttaaatctgtatgtttatgtgtccccttcatttacattgcctaaaatcatatgaaatttgtggcaggattattggccccgccatgccatctgccgagttacttgctgctgctgctaaattaacagaagcacaggctgaactcaggtctttattatctttaatgcactttataattttatatatatatatatatataaatatatatatgtgtataatgtatgtatatattgcaataagaatttctcaaatttcatttgatcacaattatggtggatgtcttgggtgatgactggtatttttgactactatattatattgatatatctagagatgctgagttggaggaagatgctgcatcatttataggacctgcaccacctgctatggtcgctgaagcagcttcagcaaatgaagcagaacgatttgaagaggtatcatagtagcttattattgatcaaactttacagcatggtcatatatctttttgtgcttttactgttgcttgcgtgtttatttggattcatgtgtacatatgaatgattgtcttcatgtatgtctgcacagatgaacttaactttttggttcatgtgtaaatatgaatgattctctatatgtatgtttgtatggatgaatttatatagcttttttagatctcttctctgctcatgtatgtactgaagctcacaatctgttttgttcatacttaatataatacaatctgttgtaaactatctttcttattattcttttttatgcacatttttcctttttgtttatgaagttacaattgttacttatagattgtaatgtttgcaactctgtatgcatcttatttgttgcatcatcggtaaattttaggttgaacacatttttttgctactcgcttgtgtgattgtgtcctggatttcctggtaatttattatgaatgcaataacttgtaacttcttgtattgtcttaacaggtaacaagaattatgagtgtggaggctgattgcccatacgagatcttgggaataaaccaaaataggacatctgagaacataaagaaaaggtgagccctgtaatttattatttatttttcgttatagaattttcttggtgcattcttttgttgggtatatttttgggttagtatgctgaatgttccttccccgcctctatctaattgtatatggtatacacaaattcatgaatgatacattctagagttgatttaaaatttgatcatttatttccatacaatttgtataaactagagccttatttgttgtttgatttatgttaacctcattttttcaac

SEQ ID NO: 188666 - DNA, 1667 bp, Cannabis indica
tataatgtagtgagttaacgagtttcaactccaactcactgagttcgtggaccaacacccagacacgtaaaatatcaagggtacaaaacagaaaggctgtaacaaaaataaaggactgtatcttatcactctaacattgtgtactttcatttcctcaataaggcactcaatttgatgtaattacccaatgaggggcaaaacagtacaaaacaacgaaattacataacatcgagtaattattaatttaatcattaattaatcgaatatcaagtaggagataattaaaaaaaagtgatttacaaattaaaaactgcctatagaatcgatctcttgtgactcctccaatagtgtccaagtttacagccggattcctctgctcctaataatttttttgctcttgggaattgtgctcctttcattttttcttcttaatttatgttttttctctgaattttatctttattttatttattggttttttaaacatatgattagttgtagtttctagtttctaccccctatttccctatcataacaataacctcttattataatctcaacccacgtttaagcacgatggttacagctcaacgaagagaaagtgacggtcaagatctcatccacgtggcggatagaaaattcactattaatattacctcccacgtcgatttatttatgtttccgacctattccaaaggcccaatgggttcaatgtaatgtaagataatgttatataaaaaaattataatttccattaaaaaattacgtttattaaataaaattaataagagaaatgtttttgtggagaaataaaatttagcaaaacttgtccaagtgagaaatataaatatatttctttattatataaaataatatataattatttatattggccgacagagtaaagtaatattaataagtatttatttgaaattataacttcatcctagttattgtaaggacactaatcccaaaacatggtaatttggataaggaagggttgaatttattactatccaacttcgtcaaccatatttattgtgtattttagttttgaataatattttgatggtttgtaaaacccgaagtaaattccttgtttgttaaatcagtataatgtttgtaatctctaaaataatttttgtactttatggttatttccatattaagggatggtgcgggtcctatgagcacgtgagaagatggaggtggtgtcagccaacatgtgaggggccagccaatggctatagttggctggtcaagtccacgtggctggaatctaatttaggaccttttatttccttcactttcctttggtgcttcccacacgtgcattacgcttactaacatggtagcacgtgtgtgtcgcacacctctcacgtgcctatcacctaaatgcttgtataaccattttattttctcttttcttttagaatgggttatggaagaacttgctgcatgcatgcatggtggtcttgttcaaagattggctaatttcaattattgatatatggataactactcgtatagtcgtatatatatttatatgaactacgcacacacattaccataataagatgattccactatatataaaaagcaattttcccttaaattctttttttttcaaaaaaaaaaacttgataccaatttttcaaaagcttgcc

SEQ ID NO: 188667 - DNA, 2205 bp, Cannabis indica
ataatgatgcagctcttactgaattatctaccaccggatcgtagtctttggtcgactgagttagctaaaaagaggtcacaatacaagcatttcaaagatgaccttttgatgaatcctgtaagtcatgttgatgagttttgtactatataattttcactcgatgttgggtctcaaattgaagttttggatgaatcagtagtgggatatagaatataagtacaaccaacttcgaatttagaatgtattacacagtcaattcatgtctcgaaatatcggttgcttgctggcttgtccatctaattcatgtatcagtaggtgaaagtctgatatcaagaaagagtggcgagttagttaatacttagaggctagagcaagtcatatagatatatttttttcatgcattttaactatttgtttcccaacgaatttgggttttcctaatttttctgtggctagtcagtcagacattacaaggaggctggagaaatcatctagtcatgacaatgacgagtcaagttatgagagccgctgtttgctttcaagatctcaaataactcatggggagcatccattgagtcttggaaagactagcatctggaatcagttttttcaggtaagtagtgcactttgcttgagactggatttagagatgtgactgaattttagctattgcatgtaatgtataaagagttggagcatggttggattgggattgctaatcagatatacttgttcttgtcccaattttaataaaatatgtattttgctgtgaggcatgctctttaaattttgaagtagctaaactgatatggtggtctcaaggttataattctattctcttttgaaaataaagcctcagaacatctgtaaatacaatgtctgagttttgagacctgtggcatctgtaaatacaatgtctgagtattgagatgttttacaagttacaaccattataacaattcttctttgaaaataagtaaaggatgaaatttgatccagatgttggcttactttgtgctttttgatgtgtattgaaattcataaaatgtgaactgtctagagttagctgcttcgggtcttgtctgttggtctgtggcaaatgtatgttggaaagattttctcttgtttgaaggcgtgttggtattgcttttgtgaaaatataacttaagctttggattacgtaggacacagaaatcatagagcaaattgaccgtgatgtgcatcgcactcatccagacatgcacttcttctccggggacactcagtttgccaaatctaatcaagtatgtctttgataatagatgatctcttatcttcgtgggggtaaaaccaagtttgctaactttggcgcctcttgtttcaggaggctttaaggagcatattaatggtatttgccaagttaaatccgggtataagatatgttcaagggatgaatgagcttttggcacctttatactatgtattaaaaaatgatcccgatgaggaaaatgtggtgagcatccaatccagttatctatagttttttacatcaattgctttaacccacaatttatttagcatttctttatgttcattattagatgtatccttttaaaactgtgttttcagtttccaatgttgagtaaattgtgtttcgtactgttttaattgctggtagaattatctcatagccgtctttgtagggcaactctttggttccgtatcaaataagactaagtaatggaacatggttcccaattttcatgatattcctagcacaaccaaataacccaatgttgaattgtaataataattaaatgaattaaggaaaagaaatagagttgataccagtttcaatttgctagttacgtttgattttttattttcattgtaaagttttttcggtctagaaatattctaatgtaatcgaatttccttattatctggtttagctttctttttttaatgctcattatttgctaatgctatgcaggcttgtgctgaagcagacacattcttttgttttgtcgagttattgagtggtttacgtgacaacttctgccagcaacttgataatagtgtggttggaattcgttccacaattacaaggttgtctcagcttctcaaggaacatgatgaagagctatggcgtcatcttgagatcacaaccaaagtaagacataatattttaatgatctgaaaatatagggggagaccagccatatg

SEQ ID NO: 188668 - DNA, 952 bp, Cannabis indica
tttacaaaggcaaatttcaacagtaggtttgccaacttcagatctaatctcatgattaaagatgcttcaattataaaagttaagggaggatagttaaagtaaaaaaaacagttagaagttggttaagtttttgtggtgttagttagttttacagttagcaattcagttatatgttagttgaattttgtactttgcaaacagaatcaattattttcagctcaatacctttccgatctttctcctctgttctttatctttctttcttttcacttaactaaaatgttctaagaaattcaaccatttttatgaagaaattcaacactttttatgtttcaatgttatttatttgtagtggtttcttattcatttgggtttttttttttttttatgtgagatctagattgaattttatcactgaaaaaaacaaaccaaatattattaggtactctgtcattttaaatattaaaatccaaattatttagcgcttgtgtaaattgctttacctgatcgcaccatatttttgcagtgtaatttatacgttttgagctcttgcggtgtaatggtggtttaagaaataaaaaaacaacatgtacaatttgatttgaaaaaataactgaaaatcacactacctgtacaacaaatacctatattaattatgtaaaaattaaagagataaaagtttttcgcatccaattaagaggacaattaaggctagctagtccctctgccctaagctatgaacatggaatatataatttactcttgtcttcttcttaacctagagaagtatttattaaatacctattggtctcattctcatccaaatcatccctacctagttacagctatattgatttaaaaagaatatcccatatatccacacaatacatgtatatatatatatatgtaccaaaacactgtatttgtgatgtgttgaatctctctgccattg

SEQ ID NO: 188669 - DNA, 2629 bp, Cannabis indica
agctactacacaatacctataatctatataatgaaatatagaaaaatattatacaacaaaaatatacataaaaaataatttaaaatttatttatttaatttattttaaaaagcaaacttattttaaataaatatagtaatctagttaaagttaaaaaaaaaaaaaacaaaaaccaacattttaaaaaaaatgtaatttataaccacacttaatatataatccataaaaaaatatatacacacattaccagtttgttaaaaggatttgtatgtcgagctcctactaaaatagacttttgaagtagttttctcgaaaatattcttagttcatcaagctcaaattcaccatgaaaagcaagatcagtagctctgtaaagattcaacatcgtaactgaaaagcattcatagtttgattctatgtgattttttatatcttcattcttcaaaatccaatagatgttacctacatacataaaattaatattggatatataatattaattaacaaatttataaaataataataataatataaactcatatattatgtatagatataaattcttactaggaaaaactttgtagccatgcatccttagaagcctaaaagctaatgattctttgagtaggtgtaactctaaagttgccaatgaatggtaacttttttcgtaataaaattctccatcacatttcacataattcctagaataaaaaaaaaatcaacaattttaacaacgatataaattattattattattgaattacgagtaaaatagagtaaaaattaaattggatgaatactaatgatgaccactatagtaggtcacaactactaaaaagtacaaaaaaagaaaaattaagaaaaacctacttataaacttgttgtagaagttgttcgatttcgatagtgaaatgctcagccaaccctaatctttcgacgtagttgataatgcaaagctttataagatctttgtccatgggatatgtagtgggaactgcatgcatgcataaattaattaaatatatataatcaaaataaataaagttgtctatttatttttttttaattattaattacctccaatgatattattgttattattattggaaaacttgtgaactagggtttgcaaataatgcaagcatttggaattttcagttgccatgaaagcttgtgctgttgccgatggagattggaacaaagaacctttttcacacaattttttttattattaattcttcattaaaatatgatgatggcaacacttcaagatatgataacaaatatgtctccttattatgtagctctctgtacatataaaaaaaaatatatattatttcatcataaggtagttatgatcaaaatatcgaaaaaatacaatgatgaaaaaatgatataaatatatgtacttttggaaaatgagttgcctatggtaaaatatgtccgaaacgacaacggattgatcctttaagatttggattttgagaacttcttcagccaattcaaccattcctgggaaaacgattgcaaaccattgaggaataaagtcttcttttttcatttcttttaagagcctttttgcattagatgaatgaataaattccaaccctacataatatttacagatatatgtaagaaaaataatattatcgttattataacaaaaattaatgttaataataagatgttcaatattacatgagacggtcgaaataattatatgtacctttacttatcatggaagaaccaacattccactttcttagggcaacaacacaagccagagtggcagtcagacactcgagggttggcatgccactctggtcatcacagttaccccagaagccatgttcggtttggttgttaagcacccaactcaaacaaccctcgaacataggcttcgaaggttggttaggatgtggtatcatggctagccatgcagtgtcgtaagcacaaggaaaaacgagggagtaaggattgatgtctaacgatgagaacattgtttctttgatctcgttgatcaacttagcctgagtttggggcaaagattggaattccataacgacaaatgatgaatcaatcgatgacaatataacactagatagctagtatacttaaagactttagataacactaatgaataatattgttgtttttgaatgaatattggaaagttctatatctatttataggaaaaagaagctaattggaagtggacaaattatggaaaaacacggcaaattaatatcaagtcaatatttgtgtctttgtttcaaagtctttggtcgatttggcttcaagttgtttgcgtgtctaactcttttgtttttctctatatatatatataacatagttactatgtataattgtatatataaatataatatatatatatatatatctatttgtgtgtgtcaatatagcttatatattacgcgtcatatatttatgtgtatatatataagtcatgatcaagtacattaagcataagctagcaaagtttgattacaactttaatggatgtataaaaagataatgacttatatttatagttaattactagtaaaagaaaaaaagaaaaactaatgtccgattatgtagctctagatatatatatatatatatatat

SEQ ID NO: 188670 - DNA, 7400 bp, Cannabis indica
catttcccatctagtgataaaagtgtcgtgataccccgaaactgcaacaactatggcagttcgaaccataatagagcaacatgcaaagtccgtatttgaggcgtattctactattagttgtaataatatgtactgtgaactggatttcttattcgaaactgcttattttgttatggtttttgctttaaaagcaagttttttatttatttttttttttggatttttggttttttttttttttgatttgtcaatgacttattgatgggttttcaacaatttatcgatgaaactccataattttgtagcatgaaatcctaagcaacatgatgttgcctaatttgttagactacgctcgcattagtaaaggggctttgtcgtatccacatggaggtaaattataactagagattagtatgaatagaatattgtagaaattggaatgaataaaaaataataaaatgatgagtgagatatggatgatcaaataaagagcttggcaaggtagaaatatagttaggcaaattctattctaataaataacaaaataaacttatgtttcaatttacaaaacctaatccaagaaaaatcacaaaaaaatcaaaaacttactgaataatggagtttaatatcttttggtgtattgggttttccaatcagcatcgatggtgtcgaaatgtgggtggttctaggttcaagtctcgatttcgaggcttcagacggtggttctgggtttttggggcaattattgtgagtatcaggttgtgggtttcgattcaagaaaaaagagaaagagggtgagagacggagaggctgagaacatcgttatggaagtatagtggttggtggtggtggagcgttggagacaatgagggggttagagtgagaaggagcgggagagactttgagattgagagttagagtgagagtttggcataaaataatcagccgacaaagttatcgatgtgtagtgatatgtttttgacataattttgcaatttcgatgtgggtttggcagttctctgtgtttctgtggcgacatgtggtgacacgtttgtcgacatgttgtgacatatacctaagggattttttctaacagattatgtgtatgttttggcgattatgattgatatgtggtgactttgttggcgatattttttgatttattttatgacattttgcgacacgtttttaagtgttttaatagtttctctgttttctgtcttaaattttgcagatggctctcaaacttaagttgtcagtttttgagcatttcacaggtcgtcttacctatcggggcttagatttaaatatattaatgacaagtttgaagcgataaagttgattgagagcctttcggaccattttgggaagttggagaattgactttctcaggtgcattggtccacaacctactcctgcagaagacgaaagttgaaaatgagaaggaagatgagatatggttttatgttggtaaaacgaacatgagattcagacgtcttgagtttggattgatttttggcttacttatgggtattggccctacagaggaagagatagaagctaagtctagtgaccgttagtaaggacatattttgaagggaagaatggtgtgcagttgaatacactattctccaattggagagatgtgatgtagcagatgacgtgtacaagcttggtcacttttattgagggtgaattagctttaaaagaaggcagtgtccaagttttgttggagatgttgaagtttgttgagaaccttgaatttttcttcaagtatccgtagggtgagcgtgcttttcagaagttgatgtggtctatgagtaaggacatgacgcgttacaagcagaacattgataagaagaagggtaagaaggtttctcatgggacaaagtataccgtacatggctatgtgtattgtttttttttatttttttaggggtataattggaaaaaaaaaataattttttgggttggcatagtcattgactaataataatataacactttgtaaaagtattatatatattaggagtggcaattcaggtcacgacccacaagtatgacacaaacaacactcgagattttattgatttgacacgacacgaaaattatgcagatcatgttcatgttctataaatttatcatgtcacaagtcgtacgcgttcgtgtcggcttgtaaaataaatttaagaactccacacgacacgatgacattaaaaacaagaatttagcttacaacccaccaacaagacatgagattttgcgggttcgacacgacatgatatttatttgagttgtgtttgtgtacgtttttttatacatttttcgtgtcacgtttgtgttcgggttagcaattttgtagtaaatttaagacctcaacacaacctgtttactgagatttttggaaatcgattataaaataaatatgcttaagaaagaagcaaatcaaagaagcagagacaaagatttttacgtgattcgattgttaatgagctctagtacacgagtccatattattgagctagaaaaacttctaaatatttcttacaagtatttttttgccctagttgacgaaccctaattatcagttcttctcccaagaatttaatcttcgaccctttgcattaaggggtcatgttctatttatagggaggaatcgggtatggacatactcagatccgatagggttttttagagatcaactataagccctctgatggggtaaatacaatagttattaactttgggccagcacttgagtgaggcccatttcactaggtgaagattgtccgtacaagcagcgattatttgaagatgtaggtgtcgtgtgcagctatgttcgtatcgagaatgtcagagaatatggcattggacaaaaaatgtgatcttcttttggtagcacgtgcactccatcagtcttacgtaggggacaaactctgatattgtggggcctagtgcctggctagctagtttattaagtgatgttcaggagccatattaacaactcttcgactactcgctttcgcgtcacctcttgaagatgtctggattggccttgggagacttttcacttctaggctgaacatcctcttccgaattaggaggatctggacttgtcaggttggagagttggacttacatttgaatctagaaccacaacatgatttttctaatggactagattgtcatcctgaccaggtctaggtctcagcttgctttggttgttgttgggctttaaaattatacatatcatcactccaataacaccgataacacaattcaaacacgacacgtcaacgcaaactaccactaacatttctcacatactaaagagaaaaacaataagctcttttcatagaagaaagaaatcaattaatataattattaattatgttgttgacatgacatggcattttaagactaataattgattttgaatacattttttcacttctcccaatataatgcgtttggcaataatgtacttcttatcgtcttgtcaccacaaaaggaaatgaagtgaatgactttaagacttgcccttcaatctcataatcaaagtggactatataattattatcattcactgtctgtaatccaatgtttgcatccaaacaaagccgcgcctaatggagcaatgttatttggtaagtgttacttaaacaccatatggattcattaatggtttcttattacattttgtggtatttcgcacatcaagggaccatattgttatagagcattgctattaagcactagtggtgcttagcaccctctcgacatgtcgcgttacgattggttagcgatactccctaaaagttatattatatttaattatatgagacccgatatttagttgtaccaatagcgatattgacacataagaaggtgctaggtaccactgatgccttttagcatttttttttttaatggcattgttattaggtataattatggtactttagatatattttataaaagttattatattaaatcgactcgatactttgttgtatcaataacgatattatattttaagtggatattaaacgctactaataccttttagtttttttttttctaaatatatagtgtaattaatataagatgataaaattagtttaacatattaattgatcatattagtggaagtgaatgtgataaaaattagaaagttaattaggacttttacctctaatttttgatatgcactaaatcatgcatttagaactttttaggccgttaaaaacttcttctaaactatatgattactggattaaattaggacttctttctaattttttactaacagaattctaacgtagatgaaagttcagatgacataatttgatagatgccaaagtttaggaggcacaatttagtaaattttaaagtttgggagcacgatttaattagtacatagagaattgttgtgttagtaaaattaaacagaattagatagaagtctttaaatccaacaatctcaatattttagagagaatttgtaatcctatttagtacataaatataatttaatatatgtcaaagtttagggacacaattttttagtcaaattaaaatatacattcatgatcattaattaatactgaatgtgacaatgcatgatttgccatgctaagtgaaatatgcttagtttaatgtatacacatatattcccatatgaaaaaaaaaaattaattaaaatttaaaacaattaataaaatgtagaacatgaataaattttttgtaagaaattttaaaataaaaagaaaaaaaattatagcatcgggtaaaatgtgtttttagtttgattagttaaatattttaaaacttctttaatttagaaaatataattttagagcatgtatgtttgtactcttaagaattttaacagttaataaaatatctttcatctgttttttcaggaaaaaaaaacattcagcttattaaaaatgaaaggtgtgcagtttctgacaatgacatattgtcaccccaatatctatgatttgaagtaaaacatttttagtaactttagtttccattgaataatataattttaaagaattgggtgcagcaacgttactaaaagtctaaaacttttttttattttttttagaattggtttggttcagaaaatgactgctagaattaaactctagaaatctatcatttgcatgctgagtagttctcattaattttgtgctcctgaccatttacacctattagagccagatcctgatactccgcaagagaatcattttagaaattgagagtgtttgtcgaaactttctctgaattaaaagggcaaagtaacatggctggttcagggaaaatagcttgggacaaactgtgtaaacctaagaaagtaggaggattaggtttttgaacacctcggattggaacacagcaactcttataaaacatatgtgtggttgattgctaataagaaatacaatttatgaatcaaatgaatacacaatgtgtacattaagcaagaagattagttgggttatagtatcccatcttcaagtagctagtattggaaaaaggtcgtcgaagccaaagacacagagtatgatctctaaaagaccctgttcaggatcacttgacaattataagattgtagttggttataaattgattaaccaagtggaggaacatttctattggagtaaagaagtgtggtgcatgcaggctaaatattctgaagcatagttttgtgctttggttggctatccaagatagactaaagactagagaaaggctatttactttcaagataatagatgacccaacttgtttcttaggtagttgaaaatatggtttgggtggaatgtatgctctgtttcattacaggggctgctgaggtggattgaaagaaccaagcaaagcaagatcaagaaacaagtattttcagctgttgttgcaactttagtgtatcaatttgatatgttaggaatgataaaatttggaactcaagtactgttagtttgcagatattactacaacaaactaagtggttaatcaagagtataggattacttgtgtcatgccaaagaaagttacacaaaaggatcgggactggtttgatacatcatttttattatttaataaaatagagggtccaattagtaacttttgcaaaatactgaatccaaaaatgatatttaaataatcttttatgaagtaaaaactatactttgtttatgtctattgtgtatatgcaagaagagaataataacattcactagaaaaaaaaaaaaaaaagcaacaggaaaagcaaagacagattcattttgatttgatcaaatatttaaaatatacaactgctataggctacagcatcgatcactagtacagagatctatatatagcttttattgaagaaaaaaaaaaggacacacatatattacatataaggtacaaacatgatcataaataagatgggtaagccaattattgggttttggtgagagaaataatgacattgaagaagtgagtgttttccttagacattcgatgaacaagaatttgtgtgtatgtacgaaagacttggtcaattattgcttccccaaagtgactaacaagcaagggttcagcgacagctctcatgcacttggccacacagtaaccattattctgattaatgtcgtttgggtagtcttccttatcatcatactcattgatataaaacgcagtgtcgttgttgttgttggtggtggtggcactccaaggaatttgggaaacctcaactttgttaaccttgaatgacccttctttttctacctcttctctcaattctgatggacatggtgtgtactgtggaatgttgaaactttccactttcctttcatctataactccctgaaaataattaatttaatattcaaatttagtatatatagaatatgtgtgtgcatgaactcatataaaattaattataataattatctcatatataatataaatatgtgttggactaaggcagtctaggcctaggcttaatttgtgttttagggtccattcagtctagatgctcaaaaaatacaattttttttaaatatataaatatctagtagtttttaaaaacatttcataattttttttataaagaatccaatactttttcttttatcttaaggtacatccactcttaagactcattgctataaatatgaattgagtgatttgagcatatgagcacgacccgatataaaaaaaatatgagtttggacatgacacgacacgatattgtaaattgacacaaatcacaggaaaagattggctttaacacgacacaacaagcctaaatagtctagtaatccaaaagcacagcacgttaaaaattggggaattttaaaatatacctttcttttatgttttatttataattttacagc

SEQ ID NO: 188671 - DNA, 1651 bp, Cannabis indica
aaattaaagtgcttttaattttgaaatttttagtaattcttctctttctgttgggatcttaattaggatgaaaatactatataagtgttttcttttggtatctgtaattatatatgttttaactttttttttcttctaataatttttgcagagtaccttcctcctattaataaagatagatctgggtttgctttatatttgctttaacattcaagaagcttagaaacaaagcaacaaaatccaggtgtactttaatggaaatctcatcagccaaatggatatctgaactggtaagacgatatttaatttgaatacattcccactcaacttcttatcatatagaaaactataataaaaatatcatcggaattgtttgattaattaatttatgattttattaaatggtaaatttataggaaatggaagatccctctaatatcttcgagcaatatgaagtggactactcacttgatgaccttaatttccagtcattttcttctgagagctactcatcttacccccaaaatttcgtccaacaaaatccacaaaacctaagtacttcaactctagatcatcaacatgatcaaactcctcctcaaactcaaactgagtcatctttcgaaaggccatccaaacagttcaaaacaaacaattggaatagtaataataataattactcttgcaccacaacaacaacaactactaccaatgatcaaatcagcacaagggcttcatcttcttcctcatcccagctcatttcattcgaaaagtatgcgaaatcggcctcagccacgcccgagattaataatcatgctgctgctactactcttaataataatgttaagccaaaagacgagccaggcttcattaatggatataatatggttttcagtccttatgaaacacatcatcagaattattgttcagtaccaaataataataataataaatatggtaatgttcaaggtgtgaagaggcctttgggtgtttcattaatggctactagatcccctttacatgctcaagatcatgttattgctgaaaggaagcgccgagaaaagcttagtcagcgattcatagctctttctgctgtagttcctggcttaaagaaggtatatattattattactaatattaatttttgcttcataaatattaattattaattagttaatttgtatatctacttgcaaaataatattaattatccatcttgaaatcaatattatgctagggttaagattcggttgtcttatatataaaaacaaaatgatttgttctcttattggatgcaaatggagttaatcatatatatatatatatatatatatattgaataatatttactaatttttaatgaaattaaaccacgtgactaataaattaaacatttctatattggaatgaatgaatagatataatatatagctagagtccattattgctactttcaatgagtatatatgtatagtttattttattttggaatcaagctagatatttagagtgatcttaactcatcagatcgtaaaattaattagcacgcctacattaattacaacacatttttttttttattaaatttatatattgttaattaatatatatatagatggacaaagcttctgttcttggagatgcaattaagtac

SEQ ID NO: 188672 - DNA, 1399 bp, Cannabis indica
ttttcttttttttcgatctgtagttaatgttaaccgacctaaagaaaccattaccaaggcacactacattacgaaaacacacactgggctctctctctctcataaacaattaatcattaatagagagagtattgtactaatacgatactactgtactgcaactccaagaacggatggagcaaagcaacgtcaacgaccaacgtcgatcgtacgatactaaaacatacctcgccagtcacctcggagggaactcggcagtcacgggcagacagtcggacaccaccggggggcatggggatgggcagacacgagcggagaagcgaccatgccggagaagagaagcagccgccgcctctggagaagaagaagttcatgttctaggttttttgggtcttgggtagtcttttttactttttcggcttacgggttagaacccgatcaaaaaaaatcctttttttaaaacccgaacccgaaacccgtgtggggcattttcgggttgaacccgacccgaccacacgggttttcaaattttcggtttttttggcagcgggtcggggcgggtggttggatttttcgggtttgcgggtctaaatgttcagccctagataaaattgtgaaagaaatggagaacttttggaaggtaatcaatagatgtgatctacatgatctcactactaaaattgatacatttacttggcataatggataggaggagaaactttatacttcaaaagcttgataggtgtttagctaatgcagattgggtgaacttgttccctaatcgtaaagccttttaacttgattggtggtgttcagatcacaaggccctggtcttgaatacgaatttcgataatagtatggagaagggaattataaatcagaggtctaggtttcactttgaagaagtttgggcagacgagcaggagtgtggagatattattgagaaggaatggacttcgagagagtgttgtaattcagattgggatttcaaaagtaaaacccaaaagtgtggcaacaagctccaaagttggaatacaatgaaacgaaaagaactctatgcaagggtcaaagagagtaagaagaaggtcgaggaccttacaaagaatataaacgcagaaaattgggggaccttgaaagttgaggaaagggacctaaatgcaaattatggggaagcatgagagatattggcgccaaacgtagtaagagcggtgtggatgaagagtggagataaaaaactcaaaaaaaaattcatctcaaaggcctctgctaggaagaagaaaaacaagatatcggagattctaaaattgccaacggcatatgaaagaaaaaacatgttgaaatgagtgaggtggtttgtgagtattttgagaaaattttcacctctaatagaccatatcag

SEQ ID NO: 188673 - DNA, 798 bp, Cannabis indica
tatattattatttgttttttttttgtcaagtaatggtgtgggggttttacattttagtgaataacatatttctttctttgttattttatttggtgctatatatgtgacttattattatcttaattagttacctctctctaatttctcccaactatagttcaaagattatttctttttattatttttattaaagttttaatttaatatgaatagtgtatgttgttacaaattatctcttttaggcaaagaatatggtatttataaagaatgtgacagttgagttgtcgaaagataaaaagatgtttaggaaaaacaaaaaagagtgaactttgatatattccattctgttgttgaaaacaaagtggctaaaattgaaacattattctgggattgcgttattagacagtgctaaatggaataaagttaaagatatatatagcaaagaaggcgatcgtcaaggcctttgttcaggagattaattaatcaatttttcataatatatatatatattttttttgataattaaagcataggcagtttttctaacattctttcatctcatgatccagtgcaatttgttgcaaagagagatatattagcttgacagctttacctttctcttatcatgatcaccacgtgtggggtcctcctttgcttcaatataacaccataatcttactggttgtaacaactgtaaattaaaatttacaacacaagctcatgaattaatcataaaaagttgctcttcctatgaatcactttggtgactcatttttcttcttatatatttttcttttt

SEQ ID NO: 188674 - DNA, 4544 bp, Cannabis indica
catggaagccatcagaaagcaggctacgaagctaagagaccaggtcgctaaagcaacagcaggttcacttctacccttaccgtacttctttatattattaattaattacgttcttatgaatcaagaatttagatcactggacactattgactagatcttccgtagtatattaattattgttaattactgtgatcgaggagatcaatcaatcaaataagaaattgatcaatttgatggtgacgtgtattgatccgatttcaatactattttagctttctttcaaacttttcatttttaaaaatttattgaattcaattattagtattttggttgaattgccttcttcttcaatttgcaattttttttgttttttcatttatatattggagttaagattatgtttttttttctttgattgagaatatgacattgaaaggaaaagaaagaaggttttttcttttcttttacttgtgtcagctttttggtcctgcattaataagtagtgggtaatctgcaattaagaaagattaaagtagataaaatacttgcctttctttttttttttttactaatttatgcatatggctctttgaacatcttaggctgtcttcaaacaatttgctggtggtatatacggaggttcagataatgttggcgctgatggaactgaactccaacaacatcagaaacttgagaggctctacatttcaactcgtgctggaaaggttaatcttttgttttcaattttttgcttgaatgtaactataccatttcttcaagttttttcttaaatcttcatctcttacttgctcagcattatcaaagggatattgttcgtggtgttgaaggttatattgttactggatccaagcaagttgaaataggcaagtttctaaaaagacgcccttttatttatgggatgtgatttcatatttgttttcataacacatattgataaaaagtaatgtatttatatattaacaggtaccaaattgtccgaagacagcaggaaatatggtactgaaaatacttgtaccagtggtaatacgctatccaaagcagcccagagttttggaagagctcgtgctcaaatggaaaaagagcatggaattcttttgaaagcacttggcactcaggttgggattggtattatgtttattagaaaattctaatgtgtatgagtaagagagctattggtataagtaatcatacgaccaagtgagttcttctttcttgaaaataatccaggttgcggaacctttagagcaatggttgttggcgctcctttggacgatgctcgacatcttgctcaacgatatgatagaatgcgacaggaagctgaagctcaggtaatttaatggtactactctgtcttgtaaaatagtatttaccagtctcggtagtttgtcatggatttaccatttctttggatgaaatctagatggaggcaaacttcagaatgtatggatttttgtaaagtatattgttcatttagtatttaagcttgattgatgatttctacaaggtggtctttacattatgattgcacccagacaggctattgatgtatccaaacgccaagcaaaattacgagaatccacaagcactcctgattttattatgaagctagaagctgctgaaaacaggcttcaggagctaaagtccaatgtggcaacaatggggaaagaagctgctgcggcgatggcggctgttgaaggacaacaacagaggttgactcttcagcgtcttcttgccatggtaatataaaaggctgtttattttcgttatctaattatgctgtgaaaacaggcttatatctgtttcattttcaatcaaaatgtgtcttattaagttcaagatattttgggtttcaaatgaaggttgaagctgagcgcaactaccatcaaagagtccttcagattcttgatcaacttgaaggagaggtatgaaatattttatttacgtctttttaagattcatggagtctttgagaggtttagttgggtgtataaattatttgacattaatatgatgaaataaaaatttgtggtcagcagatgtcgtcagagcgccaacagattgaagcaccttccactccaactgcagagaacagtatgcctccaccaccatcatacgaagacgtcactggtgcctttgattcagaaacctacgatgaatcaactgagggtgcggattatttcttgggggaggtattttccctgtttgtttacacttgaagtgccaaccgtcatgattggtatagattttcaaattttgagacttgtttacaagttctaactgtatattcccattgtaggtaatgcattcatttaatgctgtcaccgacgtggagttaagtctgtctatcggcgattatgttgttgttcgcaaggttcttccatcgttatttttctatcccagcatcttttgttgtttccattaatatgttgggatgtttggttgtggtctcataactaaacttccacccttttcaatcatatggtgtccctctttttgatgcctacaatgatatttcgaattttgtctgtcatgacaaggtttttgggtgctcatgcaggtctcaagcagtggatgggctgaaggtgaatgcaaggggaaagcaggttggttcccgtttaattatgttgaacggcgagaacatgtgcttgcaagcaaggtgtctgaggtcttttaaattactcggcagtgtatggctttctttacttcaactgctgcgaaatttggtcctactagccattgtaaatcaacccaaagttgtttgtatcacactcatcaatacatttattttttccaattatcataattgaatggcagtgactgtaattttctccaccatgtttgcattaatacgagaaccaaaacatgtagtgttgagtatttttatccactcttatctttttggagtagtaaggtttctttttgaatgtattcctgttttgactgatcttttatatgcttgcgagaaaattgtattaatctatttgtttcccttttcttaatgtctaagttcagcactattacttggatttctgtaacaatttcattactcaatacattactgttaagaacttgtttctttggctttggttttttacgggcgtaacgtgaatggggatgaaatgaatggtgtcaatgtatgatcacaatctatacactaagatgttcgtagggctcgtttggaacgtcgtattaggtcgtattgtattgtattatattgaattagattatatatcatatttttatataacattgtgctaaactattatatatttaggtatccacaaaaattaataatacatgtagttttacataaacatattacataaaattatattcaatataatgcgatacaatacgacttaatacggcgttccaaacgagcccttaatttttatttgttcaaaggttataatccatgatgttcaaacttcaactatgatacaaagtatcatagttgtaaatacgttcgtgcccgcccaatcccatatttcgaaaagtctggaataatatgtcgtgtcatgttggcccatataaatatgtgggtcgtgttgtgccgtgttaatattttaaagggtaagcttatatttttatgtcgtgctcggagtcgtgttgtgccttatttgagctgacctgattttaataaatgggacagtttattttcttcttcgaactcgaattcgagctttactttttcactgtttcttttacaattaatgagttaatcaccaaattatattgtattttttatagtgtcaatttcttttatataatttttcaacaataagattagaatttgaatatttattagtaaatacatatgtattattattatataagagattttaacgtattatgcttttaggctagtctatttgtgtttatgtgtcgtgtcttcgagcttatcgtgtcgtgcttaaatctattttgtcatattgtgccgtgctactttgaagtatcgtgtcatgtcgtgtccatcaaatttatattttttcgtgtcagattatgctcgtgtcatgtgaaaaagctttgtccgtatttacagcctaccaaataccaacgtgcgatataagaaaataattgtaataaatctttgatccgtgaataaagggaaagaataacatttataacaaattggccaaaagcatgcgtattattttctcttcgacaaataactaaatttaacatcaaagaaatcattactaacattgataatatctttaatcacaatcccacttgaggacgcctagggtaaaaaaagtatgcgaaacctagcttatctcaattgtcactaatgagtctcaatcttccttttataaaccactgttttgtttttcaatccaacataagatttgattttgtccatagactaggaatgctaatcattattactataggaattttaatttcttaagagaaagcacaatcttcatgtttaataacgaagaaggttagcctaaccaagcagtttggactattgcacaagacttttattttataaagcctaattttttttttcttttttt

SEQ ID NO: 188675 - DNA, 2544 bp, Cannabis indica
tttaaattataatggtattatataaagtaacatatagaaaaatagaaatagagaaaataataactacatgtaactaattaatcaacaacatagaaaaatataaatagagaaaataacaactacatgtaactaattaatcaacaacatacaaaagtataaatatataaccattcaaacaaataaattcaaaataaaataataaaaagcatcaacaactcaacaaataaataaaattacaatttacaaagtagtattatcatgttcaccaaaagtggtggtgttaactagaattattttgacctgaagacttttctccataagttgagcattccttcactctgttctcagccttcatcacctaaaataaatagatgaaaattaaacctataataaaaaaagaatagatgtctaaaaaattaggattatgttttattcaatataaaaatctcatcttatccttgaggttatatttggtagtaggaaggagaaagagtatgatgaatgaaggggaatgatggagagtaggaaagtaagggagatagaaagaatagttgttattctttgtattgtttggtattgtggaaagatgaatagtaaaataaatattaaaattactattttattattttttaatataattatatattgttttctaaagggtataagacacatctaattttttttgtctttttcataaattccttcagttttgaagggattgaaatttgtgcacttggaggggatcctctctcttctctcaacctcttgccaaacaaaggttaatctaaatttctccctctatgcctctttctccacccctttccctccttctttctctcctttttaccaaacatagtgtaagagaatcctcatatataaaatttgtcttataaaaaatgaaacaaataaaacggcttaaaaaaatatagacttacttctttatcccagttggcacgtaagatgatcataaggaaaaatattacattcacaacaaagccaataatcatccccagccaaagcccctacagcaatcaaatatatcttattttatagtaaactaaaaatatttagtaattaattcttgcacatgaaaatcaatttattattactttggatttcatgtggagtacgaaggcaaatgtaacttgacaaggaattccaacaaaatagaacgctgcaagattgaggtatacacctttgttttgccagccacatcctttaaaaatgcctaagatttaaggaagaagagcaaataagttattttctaataaaatttacctaatgtgttttgatgaaacaaagttatatatatacctgaaagaacagtctgaaatccatttagaaagcatgacattgcaagaaagggcatcaaggatgacacaattttgacaacatttttatcattgctatataactcagcccacattttacgcaagagtatgatactaattcccactacaagtccctcaatgatgactattattgacaccacgaccatggctaaacgagctgcttctaagtttttggccccaatttcatttccaactcgtacactaacaagtaaacatatattagaaagttataattaatgtttattcatatattgctgtatgagtaatcataatgcacttaaaatatgcaccaaaatattatatctagtgccatgaaactgttttcttaaaacaatgagtctcagtttcaataaacgatagtaatctctctaactttcacttgttctcgtatttaaatgcaaacaaagagtttgacatctctaatggaaagtatattctatttagccactatttgaattttgctccacagtacaagggacaaaataattttaaaaagtcaacaagttattaatatttattaaagatatacaatattataatattacttgagggtagttcaaatgattatagaaaaataagtgtgtgttggaactcttgcgtttgagtctcaacttatatattataatatataaatgtttgattacaaaaaaaaaataatacaatataataaaatataaattagaaagtctttttttttttttgaacataattagaaaaagctttttaaattaataaagtacatccatacaaaaacaaataaattacataaatacgagaggtatgttagtaaattaggtcaaatttgaccatgctaatattttggaccaaattaggctcttaatatattttcgatcaaatttggtcatgctatattttgaacaaaattaatttggcccaacatttaatatgtatcaaatgtaaccagcattatatattaggattggtgttcatttttcatcaatatgtgctaaggaagaaacaattgacaatcacgtaaaagtttgattaaaaattaataagaagcctaatgagtagtatttatttactcttaccttgcactgaccatgagcccagcagggatagaccaaatcaatccaaatgtattaagactgggaaaagagaaacagattttacattccttgataaataatagtttttatgaatcaacaaaaaatatgcatgtatttaatac

SEQ ID NO: 188676 - DNA, 2905 bp, Cannabis indica
tacatttatcattatttttatagttttgacttatatttattcaagccctcactcaactaaatttctggcttcgtcactgagcacaggcctaacctacctatatccaggtccggccctttacctaatataaatatatatttacgtgtgtgctttggtttacacgagtttttttttttcctttacaagctaatattgtttgtttcacatatatttttgtattgagaatattaacacatgctaagaaaaaaaaaataatgtacttgatgaaaatgaccagttcgctggctaaatccactacaagatacgtcgaaattttgtctaattaatatttgccccgcacatgagccccattaatcatcaaattaattacaataatgcttatatttatatcactaataccatattcatcaatcaatttagttactcttcttttgctcttcatttctgattaattaactagtttagttagtatctgaatgttgctataataaattggatatattaagtaattgtacaaaatataattttttttttttgaatggtttctttttttctttcttataaacgaaaatggtcacttgttgtaaattccattgaaattcaactttattattatttccctcctaattcccaatcactcaaatgatattccctgctagaagatatatatatatatatatatatttagggtgacgattttgtctggtgatgtactttcacagagaatgtatttcgtggtacattagatgggtgttagcgtacattagatcggtctcaaggtatgttattattttttaactctaattactcctggatcaactccagccctcagatcaaataactcccccatatagagattgtcgtatattacagaatacatctcgtaaaagtagatcacgggacaaaatcatgtcctattatatattatatataatagagtagagtaattgactttgttcacttattaaagtgaatttgaaattctgagacctgacacataaaataagtaagacattcctaatttcctactactactactacttctactacaccaaacaaagtgtggtcaatttccgaattttcacaccacatgtatataggtagtcagtaaagttacaaaatttaatatagattacatgaactggtcatatatactttttacataatatattaatttgacacgtagattttagataagagagtttatcaaatgatcaattggtataattcagaaaaaaaaaaaaaatcagagaaagggtcacacacgcaaccttggaattataatatatcgatcgttaatttaaatgcacttgtgtaatttcttattcgtattcatccacaacgacttttaattaaggacaattaattaattatgttggtttatatattggtgagtttattattcgtgtgaaacagaggatataacttcagtgatggaaaaatttgagtgccatttgcaaactatatacattatacatatatatatactaaataataacacatgttaattaattttttgtaagaatacattatggcataaaaaaattgtttatatatatatttaaattacaaaaatctaaaaatttatacatgcatattaatagctttaatatataaataaatgaaataaatacaatgatgaatattattatgttgctgtatggatgattctattattattctattattattctttttctttttcccactaaattctgaatatattttgtttttgtgttttgaatttctaaaatgttgaaaataaggctagatatgggaactggactccacttcaagttaaagataattaataaagagggggagttgctgaagtgggagtggtttgtattccaatataagaagtaaagctatatacacaaatcaaattaaggaccttttttctacgtagaaaaagacaagctacgacaaaataataataataataaaatcttgataagatattacgtgccgatatatattatatattttttttatatatgtataccatctttgaaataatacatgcattcttttcttgtgtagtactaactagagcaagtatttggttgacataaatgacaatcaataaaccttgctagcttagccttataaaatatcttctagaagagacataagatcataacctagctagttagctctaccagcagcacaatcctatataggtgttcattcatagtgataagctaaaataataataaatttgatcatgaaaaactggtatatgatattaaaaaataataccataatatataattttaaaactattatttgtactgctcaacagccgcgtatagctagccaaacaatattttgtattaatttaattaattcaattagatatataggacttggagaaaaattaaggtcatcatatatatgtcaatccctaaattgagtgttggaaaaaaaaaatgattgagtatggagtatatgaggagatggtatgggtatatacaggaccaaatttgagttggcgggcgtacactacactgcaagagtctaccactatacgagtagaccaaccccaaaaaaattcataaccaaaccaaaccaatatttatatatatatattcaaccttttgtttttctttttctttttatcgcactagcttatagcttgaatgatcacatggcatccacatggaccatttcaccatcttatttggctgcttatgtggacaactctttatttagctaattaattaacactaacctactatattttatatcaattcaattgtgtctcttcgatttcaacatgacacatgggtatatatacgtaaaatataatatacatatataataatataagagtttgttatcatgagtgtatctcgctaaggcaaccatcgatttttcaagtaagatatatatatgtataata

SEQ ID NO: 188677 - DNA, 4145 bp, Cannabis indica
acaaactgtgaaatgatttaacaaattgcttcatgcttttttttttctctttgttattcttctgtaattgattggagtaaatgagacatggaaatttttctgttcgtggtatcagattagaacaagttgagaacggtaatataatttagttttgaacttttcatataatattaaattaaataatgtttgttttattcttcaatgatctttgtctcagtttgactctgatttccatttacattagcagaatcattctataacataattcatttggaatttactttagatgcatgtttctgatgtgactctatttctttattaagtttagttcttcatatccccattatagggttttggtaattggataaatattactttggtgtgattaaatttatgtgaagtttagttcttaatgtctaagagattgtgatgtagagctacttgtgtgacaatcccaaattgggtcaacaatatgaatatatatattaatttatatgtcaattggaaaatgactaagaaatagttcaaattcacttgaatagttgaatgtgaagatgctttctttatatcaatatagatattttatatgtagaggttatagcaatctaattctagcctcttcttttagtgtaaagcttaatttttttttttgtttttcagttcctaaagaatcacagaagagttcttctgtaaatgatgatattattcctcaatctcagaaacttaaggttaaaaacctcaaccccattctcactctcagatacaatttttcattatgaatctcaaatgggtttttgttcaacattgccaagagttcaccaaaagaatgtttctgtattttgggatttaaacaacaaacccccaaacccatttccgccatatgaagctgcactcaagctcaagaaaaccgcgtcctccttcgggtttgtacgccacacggttgcctttgcaaatcaacagaccttgagctatgtccctgcagccattaaagaacaaaggaaagatcgaaagaagctgacacagttggagaacaagggtttagtaaagcctccagaacggtacttttgcagggtatgtggtagaaacttctataaccatgaaaagtttgttaatcatttcaaacagattcacgagcgagagaacacaaagagattgaatcagattgagtcagctagagggagtcagagagtgaagcttgtagcaaagtattcaatgaaaatggagaagtacaaaaactgtgctagagatgttttgactccaaaagttgggtatggcttagcagacgagctaaagcgagctgggtttttggtgagggaggtatccgataagtctcgagttgcaggcattgagatgagggagcatatagttgagatgatggatttgaggaaagcagagtgtgtggtgcttgtttcggatgatttggggtttggtagtgttgttgaggaagctaagatgaggtgttataagactgtggttgtggggaatgttaatgatggaggtttgaaaaggattgcagatagttctttttcatggaaggagattatgatggggaaagctcggaaagaggctgtttctgttgttggaaagtggaaagccgggatgttttgaaaggactcgagtggaattataagccagagaaggagaagagtgagtttgatgatgatgatgagagtgaggatgatgtggattttgagaaaaggtttgaggatggtgatggtggtagtttgaagaaagatcacagtcgtttttggtgggagatggagtctgataatgatgattccatgacatctcactcttgtaaatgaatgttcaattaagagatcaaactgtgatgttaatttaatgttgttagataatggtggaaaagctctcaatgaggacaaactttgcttggtttagaggagttttgaggtttttattaggacattggattctcaccattgtttctgttactaaaaccgacattctccctcgtttctgcttcgtttgctggtgccggtgctttccctcaacgctctcctaccgatgatgttcaagtaccccaatggggacaaaccttgcttgctgttgtagagggaatcttggaggtttttatttggacattggattctcaccattgcttgtgttactcaaaccgacttctcgcttctgcttcgtttgctcgctcgggtgctttccctcttggagggaacactctcttaccaatgatattcaagtactaatccagcagagcaatgcttctatgtatattgtgaaaattgagttcggttaagctcattccattgagatggagtctgaattgttcaattgagctggttttgtacggtattgttttaaaagatcaaactgtttgggacaacctttctatagagaaattaccatgtaatttatcaattactttctcaacttatttatgtttaacataagataaacttaattacaatcaatagaatatagttgtcttatttcataatatacattttccacttactttactaaccaatgaaaagtattacaagttccaaacacacaaaaacatactccattttccactgacctacgtggactccacagcagttactcgttaataatccactgcggtcaagcttaccaagctaaacacttacagccgtcaattcgccaatcatttttcacatagcttaatccaacgatcataaaattcaatctcacctagtctcgaccttacacaatcacaaaactacctggtgtgtttgtgcccactggttactatattctgccattaataaacatttattttcacctctgaaatcaaaatagccataaaaaaaactaactttatcaaaatggagaatcaagcttcaatcccattataataaaaattctaacttcgaaaaagtttaaggcatagtcttaatcttagccggccaagtaatatattatatggcttcaagtttttgtccttattcgaaacagagttagtgggtttcactcgataaaatcgaaaattttaaggtgataaaaaccataatatggggaaataatcatctgggattgttagaaaaatgagaaagctttgttttttgagttttcttttgggttttctggtgattagtagtattgatgtcgtttgtggtagttatatgaaatacgacactaaaagtgttgtcgttgaagagaaattgaatgttcatttagttcctcattctcatgatgatgtgggttggttgaaaacagttgatcaatactatgttggatccaataacagcattcaggtatgttctgtttaccatttttgtttaagtttttagttttggttgaattaatgttttgggtttttgttttttagggagcttgtgttgaaaatactcttgactcagttgtgcaatctttgcttcgtgatccaaataggatgtttgtgtttgctgagatggtaaagcttgaaaaatcattatgatgggactatttataatgaacattgtcatttaccaaagctttgattttttatttgtttttaacttatacattcttaggcatttttccaaagatggtgggtagaacaaagtccatatatacaagaggttgtgaagaaattacttgtggattctggccaattggagttcatgtaggtacctttgtagttggtactctcttttgacttcattatctatttcatttttaaagagaacattgtactgatatggtacgttgtgattggttagcagttttctatattatatattaactcaagatgtacaggaccagatattgaattattccctttagtatttctctttttgagccttggacaaatgaacttatgtttcgataagagaaatgctaaaaggcacaactggtgcctagcacattttcaagtgtcataaagctattaaatatcatgtctcatgtaatttaatataataatttttaagtaatatcgctaaccaattgtaagacgttacttctaggtggtgctagacaccactgatgctcaataataatactctttcgataattctttgcaaatagcatcaggactaatggtctaaatttttaaattgtcattttgagtgcaacatgacttgaaaaaaagagaccattttgccaattatttcatttgaatcattggtactttgattattaagatgttttgttttgtttttttt

SEQ ID NO: 188678 - DNA, 3238 bp, Cannabis indica
agcagatgtggcaacacattaattgtcctagaataaatgaaaaaaactcacattatgaaagagagtcaaattacaataatatctcgaagaacttataaatctaacgacgaatctaaaaaagcattattgttaatattattactttattcaaacaattagtttcacaatgaacatttttacaaactaaaaagaatgatattagatttttacatgatgaagagcaagaaaccatatgagcatataaataaccccatgactaatagctaatcatgtgtcaaatagctgagccataaacatcatagataaccaatgcccataccaaaaatctccttatacatctaaaaccccatcatgtgtaacaattaatacaataaataaattaatgcaaataataattagaatttcttaatattgctgcagtattatcttatccggaataaaacgatcgataataatgaagagatattatatataatatatattataagttgatctcataaatcattatgcattatttatctattattaaatattaactaatgtttaaatattatatatatatatactgtatcatcaattttttcaaggtctttgttcttgttagtctctttaacggggtcgacaataattcatcaaaataattatatatttttcatttctaaagagtgtgacagctatatgttaaacaccaaatatataaatttatatatatatattttcatttattaattttcttataatatattctttttatgtcattttctaaatatatatatatatatatataattatatgatggtccaaccaaggccttttttttgtatgcagataaaaaagtcactgacaattgggatagagctaggccctatttgaaagtcaggtttcaaagtcttattaatactcaatatttattatttttattcactttatttttcccataatagtatagattaatgaataaatagataaaatgagttgaccttattttttttattaccatgcagaaaaattttggtacagtttgcagcaaaaagtacactgtgaattcaattaatatttcattaattactggcaataaaccatgttgttttaattaatttttggtacaaactacatctaagaggtcttacattcccacaaaaaaaaaaaaaaaaccaaaccccaaagaaagttacaaagctggaatagcaccattccaaattgtggcttctcacctagccctaaagctttcataaccagattatgagcattagaattacagtttttaagaacatatttaatacaaactttagagaataaagacaaagagtgcttaatgtcatcaataacatccgataaagccgaaaaattttctttcttatatcgaactttatctaccaacaattttaaatctgatccaacaatgaaaagtggaattcttatatattatagcaccaattaatgctcgatctcaaagctaaagcttcggccatagctgaattagcacagcctattgcaggaagggagtaacccgcaataatgttgcctctccaatctctaagaaccgtcccataaagccaagcttgatttttctaatgtccaaaggctgtatcagtgttaagttggtaaaagccttctgccactgcaacatcctgagtatgagagtgattaggttggagttgcttgcacatcatgtaaagttcttcaaggctttcctgtaatctgagagaaaagagctagtccaaactacaatatcagtaggagacatatgaaatttttcgaataatttattatttatattgccctagatggtccaaagcgtagataataaaagtaacagattatctttttgtaaaagaacaaaacttgaaaggctgaattctctaatattattatttatgtgagaaaaattaaaatgactaaggggagaaactttccaaacctgagatgttttggaacaatctagcagagcatgagtggctattttattatgacagtcacaaaaggagcaacaagggttgggaaggactttcttcaagaacaggttaagagcagttgggagaatatgataataaactctaagagaaaactttgattttgggagggagacacaagtttcagagggcggtccacctttctcaagaaaagtagaatctgaagaggtgggagggagagaaagagtagctaaatggtaagcaattttcacagagaatatacttgagggatgctaattccaaattaaaaaatcttcctaatcaacaccaccaatagaaacctggagtatgtgagaaacaatagcatcatcaaaatattggttaagtttgcctaaatctcaatgaccttcatagttaataaagaaattgaccctgtcagagggaggctgaatatcattctgatacctgagaaatctagcccccgggatccaatggtcatctaaagttttgatggagctaccatccccaactttccaaactagaccttttttaaggagatcccgaccccagatgagtctagtccaagtaaaagaaggagaatgaccatgactagcttcaaggaagctgttatgcctaaagtatttagctttcagaataatagcaagcaaagattagggtcaaagttcacacgccaggcctgtttagctaacatagcttgattgtgatgaattaaagatttgaaacctaatccccaaagaacttagagttacacatgtgtgttaggttgcttttagtattaattttagtgtatttttaatttagttttactcgtgtttggagtaattttacgcttgttatcttttatttttgcagaattaaaatagaagaatattagaaaagtatcaatggaaaaagacgaaaaaaaagagataaaagatggcataaaatatcactgtgcaaaattgggatctgcgtagaaaaaagatggtatgcgttgaatacgagtgaaaattacacgtgtgccacggcccaggaatgggcatgagtaaaagcagcatcatcgtgtggaaatagcgtgccacgacccgcccctagtctgaagcaaaagaaaaagatttctcaacgtggatttattgtgatggcctaattcaaaactgaataggatttttttagcatgtgcaatttttctatcttttaggccctcaatggctatataaagagtgaacttcagttgatttcggtaagcaattcaaaaggaaattaaacgcaaaaaaagcagtacaaatttcagagaccgacgtcaaagggttttcaacattctcttc

SEQ ID NO: 188679 - DNA, 1200 bp, Cannabis indica
ttttaatattattttttatgttgtaaatttattcttttttgttatttgtatattatattttattattattattctattaattttatttgatattcttatctttttttttcttatgaaataccgtaaaaaaatatatataaaaaaaaaccattaaatataaaaatgtgaaaaaattttaaaaaatagccgttcatgtaatttttcccatagtttcttatatataattatcaaaatacaatttttaattgttatcaattctaactaataacgaaatgcatcttgttatgttctaagtcgagagaatttgtattgtttaattagatgaagttttaatgtgatgaaaacttgattaaattggtatatttaggaatttaattaatataaaaccctatgatatatactatatatttcttaattaatttatgaatattattattacaggtgctcacacatttggaaggggtcaatgtggagccttcagtaacagattattcaatttcaacgacacaggctctcctgatccaaccatagaacaaaactacttaaaattactacaagatctatgccctgaaggaggaaacgtctccatcttaacagatatagaccctaccacaccagatcaatttgacaaaaactactatacaaatcttcaacaactcaagggcttgttccaaagtgaccaagagctgttttcaacaccaggagctgataccattgaaatagtcaacaattttagtgggaatcaaactgctttctttgaaaattttgtgatttccatgatcaaaatggggaatttgaatccaattactggttctgatggagaagttagattgaattgtagaaaagttaatgatgttggtaatggagtttcactgattggatcaagcagtaagagttctgtttttgtttcctaataagtattttatatatgagataataagatgtgacattaacatatatgaatatttcatatacatgtgtgtgttctgtgttcacatatatttaatgtacaatgtatttaatggcatacaatattactatatatttaattttgctatttacacagaaattgagtcaggtcaactatatatggccaatcaaatgaaaagaaaaaaattatatgctatgcaatcaaattaattaaaagtaataaaatacatgttgtattattattataagtttttttcatttttatacttc

SEQ ID NO: 188680 - DNA, 1233 bp, Cannabis indica
gtgtttactatgtcatcttatcattctctgctaagcctaaaagtactgttggtggtgtgtttaataattttaaggtggacgattgcagaggaggaggagcaaaattatggaagaaaattagtgggtgtgaaagtgggggtggtggttgactatgagagcttggttgggaagatgggattgagatgcattaatatgtctctttcccatttttactcttctcatcctaattacacaacaaggctccatattcatgctacggactctaaaaaacacgtcattggagctgccgctgcaggtacataatatatatatatatatatatatatatataatcattttatattatgaataatattcatggagaaaaaagcagacagaataacttccttcttaattttctaacatgtataacataatcattccgaatagattttcttttttaataaaaataaaaaaaatattccatggtagttacatgttgctctaattattattacgtaaaaatcttttgttattggaatagtcatacacttcattacatgtttctatagccattcatatatatacatgttgaatgagaatctacaagtattttcaagtagttcctgaaaaaatttcaaaaccaataaatataaaaaataaaagtctttattattgtcaacacaaccatctaaattcatgactttgtgctatatatataattatataagttatggatagtgggagaatcatacacatgtgtatatatatattatatatatctatgtatatacatatatgatagctaatttataatttgtcctatgtttgggttgtacgcgtacggcctacccaaactgaccgaagacaacatccaatgcaacttgaatcctggtcccagtgagtttttgtatgggactccataactattttaaataaaattaatcaatcttttcattatacaagagataatattttttttataaaataataagtctattgatcggcgatacaccacataaccaaatgttttattatttacaaataacttcaccttcaaataattgtctagcaaggacaaaaatcagccttagtaaaaatggaagggtcatcctttcatatgatgatgggagttgcatgtgttatttatggtgctacgtactgcaaaaaatctagtatttgaagatgttgatagtgtaaatacattatggggataatttcacaaatgcaccaaaacaacaaaaaaaacaacaa

SEQ ID NO: 188681 - DNA, 1341 bp, Cannabis indica
gattgcagaacaacagaatgttgtcgagggaacagttgctccatctcttcaatcgattctcttacctcacttctcagtctggtactaatttgtttttcccatttctaattgatatctttactgcccatgtttttttatttttaataatttatttgatattatcattaattacagatgttaagaaaaggattgcagatgctgttcaagaccagcaggttaataatctcttctctaaatttgtctttgtagttttttaatccaccaccattgtgtaacgaagttctcaaaatgtgactcttttagtggaagtaatttttcagtttaaaagtttgtcatttcagatctggtgatgtaaatgtgtaatctttcattcacaagtttgaaattgatacaagggtttctgccaaatatgttactctgcctgtcaattggtttgattaatggtctgaatttcggtattcatatcacaggaacctgtagctgtaaccactaacatacaggaagagatatttttggaaatgggaatcggtaaatttgtcctatttaccctcagatgctagtttggcctgttatatctatatttagtattcaatgtttgagcttttgtttatggcagatcctagttttggcatatcatgcctgggaaaagtgaatacgacttatgaaagtgatcaggaattgatgattcagttttacaaattcgtttcaaagtaagtaaccgctttctcttagttgaattttgtacttatacttaaatctaaggctaaggctaattttacaagtggagctattactgacttgtgaggttgtgaagatttgtagtacttttgttaacaattctaaattatttgatcaatggaataacagggaagaaatggtttgtgatgaagcacagcttggaccagatgaatatgctgaaagaatgcgtcgccaagaactactacaagagcaggtaaagacaattttgttttgaccgtactggttaaaaagattgatttctgaagtagagggaatcttattgcagcaacttgagatgctgaagcttatgcgcaagtttgatcttgatgatcaatctacaattctccagaaggtgattatatgttattacgtagtttagtagtgactttatcataaaccaaacttaaatctaagttctctattatgttctctacagttgcatcaacagatggaaaatgctgactttgattttgaggtatcagttttgtcagcagagcaaattcaggatattgttcggcggagggtctcgcctttatacaagcctaggtagatcaaaaacttgtaactcagggaaattgtgtatttgttcaaccgcaaacattt

SEQ ID NO: 188682 - DNA, 8249 bp, Cannabis indica
tttttttttttaagagagaaagttgtatgagctttaatgctcaactttacatagtttccctctaatgaattattcatttctttagaaaaaaacaaaagtgattaaattgtattttggaatatgtttgtccaatcacacaaacataaaaaatgtatcaaatataggtatgaactaaattcccatctcagtatatgaagcatttatactcatttaaaaagaaaagttaggacacagtcacctgggccgggcccgtgggccacaagcccagttcaattcccgtaacaaaatcatccaaaataagaaagttcccaccgccacacgtacaccctcgaattttggaatcgacaactttcgaacaaaggcacaccaaaacctgctagcgtgacgcgccatcaacaacatttgtcatcattccagtggcgcgtgcttcacatttcccccatatgcgcgttaaatcaactattacacttctcagttttaaattatctccaaatcccaacaatactggtaatcaccttataacacgtggcaaaatataataggaggaaatcagtcaaagtcagcataaatatctacgctgggccacacgtgataacccatgctctctctttctcttcctcccgcgtaaggacaagagaatatagccgtgactgtccgtgcaaatgctaatactacttcaagttcaaccatggctcagcttcgattagggttttagggttttatgctccgtattcaaatatattcgggtcgggtcttacagtatccgattcagggagcggtagcgagagatgaagcgcaggagcgagctcaatccctcggctaagcaagtgaagtatttcttgattgctttgattgcgtgcttgggattggtgtgtttatactacggttcgtcttttgctccgggatctcggaggtccgacgaagaatcctccgcttccgatggaactgacccggtttatgggggattcgctcggaatcgggatttcgatgagttgcatgaagatcaagagcataatcctgaaattcccaaaagtataccggttggtgacgcattgccttagctattatgtatttaatttcatacgttgatttcggttgaagtataattaagctaaacgattaacgaatgcgtgttcttattaatgttaatgaaatgagtaatttgatttttggtgccttttgaaatttaattattgtatgtttatgaagattttgcttgtttgcgtatgttctttcactaaactggtggcattggattttggtaatttacagatatgtgatatgaagttttcggaattgataccttgtttagacagaaaccttatataccagttgaaattgaagcccaatttggctttaatggagcactatgaacggcattgtccgcctccggaacgtcgttataattgcttaataccacccccactgggttataaggttggtagcagttactgcttacctgaaagtttagtgtagtttcgcttttcatttagttttgattctgacaaaattaatgctagaacttcagatacctataaggtggccagcaagtagagatgaagtgtggaaggcaaacatcccccacacacatcttgcacaggagaagtcagatcagaattggatggttgtcaatggagacaagattaattttccgggtggggggactcatttccacaatggagctgataaatacattgtttctctagctagagtatgttgcgtttactcgattctctttatttccttgtctacttttcttttctggaaaaatttaatggaaaagattaataatgatcatatgagtaaacagttgaatatgaccttttatttgtcagtgtaaatgtttctttccctactgtttttttattcccacctgtctgataaacagttcatcatatcatgccattactagtttattatttctaaaatcgttattttttttattggtttagatgctaaaatttcctgatgataaactcaacaatgccggaaatatcagaaatgtttttgatgtgggttgtggagttgcaagttttggggcctatttactttctcacaacatcatagctatgtccctagcgcctaatgatgtgcatgagaatcaaattcagtttgcactagagagggggattcctgctactctaggtatcttggctacaaaaaggcttccgtatccaagcaggtcatttgaactggctcattgttcccgatgccgtattgattggctgcaaagagggggaatccttttattagaacttgataggttactaagaccaggaggatattttgtgtattcttctcctgaagcatacgcaatggatcctgaaaatagaaggatttggaatgcaatgtatgatcttttgaagaaaatgtgttggagagttgttacaaagaaagagcagagtgttatatgggctaagccactttcaaatagttgttattcgaagagagatcctggaacatatcccccattatgtggtacggatgatgatccagatgtaacctggaatgtgagcatgaagccttgtatttctcgatactcctcaagtaagtattattctcacttatcatgcattttttttttagaattttttgttaattccttaaaagagaaatattgctctgaagctattccttttgaagtatgcattttataaattttttgattgagatactataaagcaaggttatgagcgtgttgctatccttatatttgggaaaggctaattagtattgctggtctctcttcgtttgttatagtatttaatgctgctaggtctgtcgttctaaacttttctgctgttttcactataaattagaaatgcacaaggtaaaagggagtggattagttccttggcctcaaaggcttactgcagcacctcctcgcctggaagagttaggtgtcagtcctgaagaattctcagaagacactgtacggtttttaatctgcacaattatcaaactatgatggtaaagttacaatctttatatttttgtttctaactgcttaagaacttttttggtgcagagcatatggcattttcgagtcgttgagtactggaagcaaatgaaatcagtgatgcagaggaactccatcagaaatgtcatggatatgaactcaaaccttggtgggtttgctgctggcttaagtgatagagatgtctgggtgatgaatgttgcccctgtccattcgtctacaaggttgaagattatatatgaccgaggattaattggaactgtacatgactggtatgcattttatttacaccaagtgatgtaagaatcaagtctaaacttgctaacacatttaggctatgttctattcacatctttgaactacgaaaataacttgctatagctattcctttgtgcatcctttcttttattctaaacttgatgggttactcagatagtcacacccctttggttttttcatagatagtgttacattcattatgaagaccagtacccaaaaagaatgttagccatgtgcaaaaaatagagtgatcttaggcaataaactatccactaatttctgttaagttagtttcagcttcaatttttcttccaagttgaaattagtcatatatgtaagtgctactctatatgggaatacgttttgttcatttttattatgttctcatatatttcctggttctgagtgttgattgtgctccaactcataacaggtgtgaatcattttcgacatacccacgtacatacgatcttctacacgcgtgggcagtattttcagagattagtgagcgtggatgtagtatggaggatttattgatagaaatggatcggattctacgacctaaatgggtttgtaatcataagagataatccttctattataaattatatccggaaatttgtcactgcactaaggtgggatggttggatatccgaagtagaaccaaggattgatgctctgtcctcgagtgaagaaagagttttgattgctagaaaaaagttgtgggatgaggacctgatgctaatgtgataaggtaaaacatattccccatcaatatgtggtacatcaaaatttcaccttttttcctagagattttttctactgtagttgatggtgtttgctgatgttacttgtgttctaaggtatctggtgtgccccggtaggagtcttcgcttaggttcggcatgttatgtttttagctggtagacgagaatatacaacttatagaggctcagagatggaaatgcttatggtatgtgagacttaatagagatgcagctgtgtatacatcaaaacaagaagtgaattatagctataagctattgcataacttgtagggattcttttgtggttttgtatatgtactagttgcattattttttaactaatataaatcacaagttattgggaaatgtatgcataaagttatggttaatcttgtaatttcttgtcttttaatgcttaatttattgggaaatatatgcataaagaaatggttagtattgtaattttttgtcttgtaatgcttaatttataatttattctacttttctttgtgatttatcatttgtttaatatgtgcatattaacaccttatactattcatataattgcgtcacattggaaacaatggttctctaattaagtctttatattgtagatctaaaaattgcatgatgatcaagcaagagtttcattttcaaattgacgatgttaaaagaattatcttaggatgatttgaggtatggcataggtacataattttcccaatattcgtacttgtcttctgattgtgcacacagtaggagtaggagttcttatctttgtccaaaacttaatgacatgtctcaacacacttgaagcagccattatcaagaactttgaaagttagagaacccagtaggttggttccttctttctcttcagccatgtctgtttttacttgaattgtcaaaaggagcagatgggttagggccttgaatcgaaggctaagttcacaacgacccgttttaaaatatagtcttataattacttccgtatattattctcaattttataaactcataaaaggagagttaagtacatctgtacatggttagtaattaagctaaattttctgctaaaataaaatacattgagataaaatggacacatatattaattgaatcatgcttgcttatgaaatccctctcaattgtacaaaaattgaacaaggtagatgattaccactaaatgatgaactccaagtactatgctcacaacattaaaagaagtttcaaaatttctctacaaggatttagaaggtagctcaactccaattgctgttttaatggcagtagtggcttgtgacatgtgagtggtggaaaccagtcgcacccttgtcgaagtggattatgatgcgtcaatgaaatgtggatattaatattatcaattttgagatactattaggcgtcaatagagtgtatatgcttcggaatgagggaaatcaatgtatagatatcgtggctgcaaagctatgaagcttacagcgactttaactggtggggaaatgaatgcgaagcctacgaaggatagagttgaagctcatggagcctcaaataggtggagatggttgcaaagctttagagaaaattagggcaaatagagatggtgaaatgggaggggtataatgggagtagaaactcaaaaagagggtataaatgaaagaatttaaaatagcaggtaaaaatgagagacccttacttaaaaggggtatactatttgtttacaccaaaagtagtcttgatgacgtggacaacaatgtttgacatgtagcaagaaagatgacatctcaaagttgagtagtcctgagtcatagcaagttggcatgggaaaggtccctagtcctacgcccaagttgacttcgggaactcctgaatggaagttcgaacttcgataaatcatttccaactcactatatttaagtattttgtaccatgaagacatggagcaatcaaatccaagtcttgggagctgaaattacatgtacctgcaccccagaagttaacctgggcacctagggtttcaccgagcgctcaagtcctcaactagggtttcaattttttggaccgtcttagtgaaagtaggtcaaaatttggattggtacatgaactagacctaccacgaacatatttgaggcatgagaatcaaattcaaagaaagttcatttttgaggacccgaagctgccggtgcctgggcacccagcgcccaggttgacaatttttcaatttaggtgacttccaagtatcagattaacaacctaactcgtgcattttattcatcttcatcaaaaataaggaaacaagcgccttcacgaaaaaagcaacacttcctcggtgccaaaatcaaggcctagcacccaggttgaaacttggggcagtcttagcgcccaggttgatattttgtcaacctgggccattatattctttgttttcagcaaagaataaaatttaactatttttgaggaccaaacaaaacttttgggagggcaaaattgggacctagcactgaagttgacacctgacactgggcccagtgcccaggttgacatattgtcaacctgagccatttctaatcagtttctcaaaaaaatgtttcgggcatttttttcgtcataaaaaataacgaagatacaagcaaactcagggaaaaacaacaaccacaggggcatcaaacttgagcctaacgcccaggttgaccaggtgctgggcctagcacctaggttgatcacaatgaacctggtgtgctatcttcgatcattcaaatgccatttcttctttgagcattatctctggaatggtaaaaaatagagtaagagacctcgtcctcaagctctagaaccttagaattatcaaaatgacatcccagaagctccgaaacaagccccaacgcccaggttaacataaggcctggtgcgctgggttctatttatccgattcggattcttgtctcaaccgttcgtctagttttcaacaataactgagaaccatgaagttagaaaagttgaagtcacaacttctcatttctcatttccaacatggtaaaattactcggaaatgggtagtttcgagtctcccatttcgcagaacaacaacatctccgagaattggtgactaattttgccaaaacacaaaaatagattaagtgatgtcaaaatatcacttaggtattaaaaaatacatctccatgacgtttttccactcacccagtgtctagattgacatcatatgttgacctgggcgctggatgtcaacctggacgctgagccaaaaacaaccttcaataaaatggtcaacaaggttgattttctagcgctcaggttgacatctaaaaatttttacaaaatataaaatccaaaataatatttatctattattaattagaagaaaaaaaaaactaaataatctcctttaaaaatttagatataaaatagtctactttcattaattacactaaaattttactagagaagaaacaaattttcttttaggaaagaaaattgaagtgagaagtttcacacacacaaaaaaaaagactaaattatatttataaaaatatttataattttaagaataatatagtaattttgcaatataaaaattttatttgcttcctagttcctttttttttaaggaatttgcttcctagttcctacattacatactaaaaattatggaaagaaatatatatattttcattctattttcctcagtatcaaccaaatatagggttaaaatctgttatggagtagcagggtatggagaaagagccacaattataaataatttgggtataaattaataataataataagataatttatgcccaaattattatactgccatcatctcttgtgagatctgacataattttcacatagggctaaaattatataaaataaataagtagtgggagtcctaacattatccaacccttaatttattcctatcttcttccaaataatatttctctccccaaaattcatccaacaaacaaacaaacaacaaatgttgcccttttttttttttttttttttcttagttactaataatattttctagataataataataatataatttttaaaggggacatacaatccctcaccttttactttgaggttttactacatttctaaatattaagtgatataagatttagatttgatgactatctgatttatttttgttactatatttttgtatggtttttcattgccttttatgtctattg

SEQ ID NO: 188683 - DNA, 3373 bp, Cannabis indica
  modified_base (3328)..(3328): a, c, t, g, unknown or other
aagtttgaatcttttgtcggcttaaggattaatgaacactaataaactcttttcagctacacatgagaggttctgatcaatttagcttgatatattattttgatgaaatccgacccttgcaattttgtgttccaagactcagtaatgggtagtgatatgtaaatattttggttcttttatttgttttttcttcgttctataaatatttcttcgtaatatgtgtctatgtttcaagatcagaaatacccatattttatttttgtttctttagataaaaaataatcaaaatcctcagttgtttagaacctgaaaaaaaaaaaattatgagaaataaccaaggtgcattggtaaaagattcttgggtctttctcctttgaacataaggagaattctcttttcttagccaatttgttgattttgtaattttcttttctttattgaaaaagggacatctcaaattttctgtgctgttaagatataagaaaatgccgttttagcacaaacttctgacacttttgcatttgagaatgttagacattgcatttgagtaggttaaatagattagtattgtttgtttgaaaatttgcagaagacaaatcatttatttatttgtttttgcaactcaaggtggtcaacaatgggtaggaatctatatccattactacaggaagagttgaaaaatcttgacaaagatgctgatagtcgcaaagctgcaatgagagcactcaaatcttttgtgaaagatttggattctaaggagatccctctcttcattgctgaagtttctcagaagatagaagccggatctttgtctggcgaatgcacgatttcactctatgaagtccttgcccgtgtacatggcgccaaaatagtgccactgatagagaccataatgaaaaccataatcaacaccttggtttcaagtgcagggtgtttccctcttcaacaggcttgctcaaaggttgttatggctattgcaagatatggtattgacccaaacttcaatgaagaaaagaagagacatgtaattcattcactctgcaatcctctttcagattctctcttgggatctcaagagtgcctcacttcaggtgctgccctttgcttgaaagctcttgtggaaaacgacagttggcgtttctcttcatatgaaatggttaacaaggtttgtcaaaatgttgctggggctttggtggagaattctactcagaccaatgcacatatggggcttgtttcggctttagcaaaacgtaatgctgtagctgttgaaccatatgcaaggttgttgatacaatctggactgaggatagtaaatgctggcatagaacaagggaattctcagaagaggctgtcagctattcaaatggttaacattttgatgaaatgtttagattcctggagcatatgctcagagcttcagtggataattctagagatggagaagtgtcaatctgatcggatggcatttgtaaagggggctgcttcggaagctttgcaaacagcaaggagaatagctgcaggaaaagggttgaattttgataaaggacctgatttagtcactggaccaaattttagagtgggaaacaatgacaagaagaagtttatattgaatgctggagaccaagctactgtatcacctggaccacagattttcaattcctttcctgaatatgactccttgattgattctcctattttatcaactgaggatattcaatacttggatagcgatagtagtggtgcggataaaatgctttggaattacgataatggaggtgttgatgtgtctctgaaggatggatttttctctgggattgctaaagcaagtgggatctctaacacaaaatctgatgagcaacctactgcaaataagtttgcagataacaaagaaaattttgacaaagaatttttaggattctcacagagcattcccagtaatagaatctctagtggagctactagcagtcctttggtaagttacacttacacatgcattttttagtttaaatcttatactttgctacattttaatgttttgtttatttgttgtaagagctaatacatgtgaaaccttttgaatcagactccacacactccaattaatgttgacaacaacaatatcttcaaaactccaaagaagcttgttcactcttttcaggatccaattaaagtgaactcggtttgttctgaaaatcaagcgagaagttctagaaataattccctggatgattttgaatggagctcagattgtagatgtgatcataattatatttcacatgatgattatgattatagagatgatgagaagttgtatgctgatgttgaccaatttttagaaggctctgaatctgtgtcatctactgaagactttcctactgatgccgatttacaagtatctctgaaagtagttgctgaaaacaaaactggtcatccgaagttggtgctaaaattagtttgtggcctatcttttgcagcaatggctatctttactccactcatttggttaaatcatcaagacgaggttggatatcttgttccaacttaatttagttttgaattacttgtttcaggtgtatgcaatcttttaatggttagattacaaattaaaactaatgtgttctttttgggtgttatagaaaacagtaaattcgtattttgtttgtaagaagctttgtatagtatagtagtatatcttagaacttttacaatatgagatggggtcgaactatagtattgtgtgaggttttaattgtaacgaaggataatttttatttcattcttgaatgtttggctggtttgctcaaccaaatattacatctacattacattgatacatgtatgtatgtaaaatgatgttggaggcatggcttagagatttggattatgcaaatcctgtccaagccttaacactgtttcagcttccacaactattggcttaagcatggctgattggcctacacatatataagaatacttgccatacaattcatgagtagaacctggacttaacatgtatagttcttcaaatccttttcttccaactaccactgaatttcttctaccctgttaaattggaatgagaattaaacaacaattaagcagattgttatgagaatatggagttaatataagtacccgatcgataattgtcatgttccgtggtgcactagtgtagatttgactcatctcttctcttaaatgtttgtaattatcagtttcttcaccctccaattcttgtcccgaatcacctcggtcgctctttgtttgtatcaccattgctgttatttggtattatttggacgtccaaaaggcctatttgactctaacntttaggccaaaaccaatcccatctttggccaaagtctgaggtaca

SEQ ID NO: 188684 - DNA, 1019 bp, Cannabis indica
tacttattgactcataaggaaaaggaatatataaagtaacaactattgttttatatgaaaagaatgtatagcttaacactcactcaaaaaagtatgcacctctaaaaaaatgcaacaaacttaattaaacccttgtctaaagttgttttcttctttattcaaatatataaatgtgtgtgcttcctttcactttttcttagtttattgtgtcaaaacacccttctgacaccaaataattccattacatgttttagaatctgaccccaaagatatcaaatgaaaaaaacaattggtgccctctttaaacaattgtagtagtctttagcttgcattgtcagcttagcatgaattcatggtttattaactcatacaaagtgaactttactgtggctaaattatatattgatataaactcttttataatattttgcagtttggtgcaaatgatctaatgcaacaagcacagatattcttgtacgctaatgggaaggatcagcctcctactgctatagaacacaacaaagaattggtcaaagatcttttcttcaatcaaagtccttctaaggtatgcggcataacacttcataatgaggcatttctcacttagttttaatcgaaatcgagtaactgtgatttggagcttctgttgatgaagttttttcatgactattctaatttcaggatgttgtattggcctcggtatcaatgaggcctgttccttttgcaccagtcatggagaaactctctctttccgaagcgaattatggctcggttagcaggttttacattgtaacacaagaagatcatgccataagtccttctctacaggagattatgataaactcgaatccaccagagcatgtttttcgaatcaagggctctgatcattcaccttttttctcgaggcctcaagctttacataagatattagtagagatagctcagattctaccaaagtaaaacttatttccaaagtacaccaattctcaaagagccttgattccttcaaggctatagtg

SEQ ID NO: 188685 - DNA, 978 bp, Cannabis indica
cataactttggagatgaagtgttgagagggtttcagataagggttgtaaacacaattatatatggcaaggacactttaaccataacagaagtgaaggttgcccttaattctcaagagattcaaaagaagggagatgaaagaggtgaaagcaatggagaagtgttggaaatattattacaggatcgtattactttatatattttcattatcttgtaatcaaataaaataagaaaaaccgaaaacatatttctaatgatcattttaaaaaagcaaagattagagaatataccacatgtgcagcagaattaatgtctctttccgtcaatcactctagcccttgatcatggttgttacaaagcaataacaatagattgacctaaatcttcaactttgagcgagagagagaagagaaggagagatttttttattcaagtataggaatagctagaataattagtgttatgaaaaatcttagttgtgccttataaacatagccaagtcagtttttctttttatattttctctctttatttaattaaataaattacaagaataaatagtattttacaacccatggtcaaaccttatagagccttgtgctcttttggagcttttccaatttaagtccaattaacttaaattgagcattttatttttgtcacattttattaaacttaaattaataactataccatatttacactaaacaagtcggatctatattactacaaatatcttcacattttgcgttggttttgacattggtaaaattataaaactaacacaattaatttgtgatcgaattttgcagcggttattaagtgaagcaataggtttgcttcagtgcacaaccgatcgatgcaaaaataaactatttgcgtcggttgtgaactgagacaaacgtactagtttaaaaaaatattaataatagatttggacttcaactcttaaaaaaaaacctaccaatataaaacctaa

SEQ ID NO: 188686 - DNA, 1958 bp, Cannabis indica
atgtttatgctagcgctcccactcaattgcactaccgtgttcccaaaaagtacgtatcaccctgacctaaaagtaggcttaactaacaattcaaggaacacgaatagcctttcaagattgagcctaatcataacaggattaagatcatttgatctaggatcaactaggcgatattgacttgaatagattttacggtaagtttaattaaatctaagtcaaagttcaatatcggtcccttccgatgcatactccatgcatccaacctgagctttactttaaccaatgttctggaaagaacatagtatttctccaaatacaagtaaactcttgttgtagattatcatatcagtaaaaccctgtgtctgataaatctaggaaactttattcacatagtcatgtttactttccaatgtgttgacggcacaataaacaggatcaagtatgtgaaaagggtttcagatgaatttatacattatgtacatataatcatgaaataaatcatgtgaaccatgcaacattaaatgttatttctgatctatattaataagtaaatctgattatattgaaatgagttttatttagggcataaaacccaacaaagttctcaataactactttaagaggttgttctcttcctctaatccttgttttcctgaggatcttcatggcttgatttcgggggatattactacaagagagaatgaggatcttatttctatccccactcatgaagagatttctcagctatgttttttagatgcatcctttgaagtcccctggctcagacagtttttctaggtgcttcttccgtaggtgctggaatacgatagggcctaagacctcgaagtgtattcaatcgatattcaggacagggaaaatcccttcttcacttaatcatactttcatatgcctcatcccgaagtgcgagaatcctaattcggttgaaaagtttcgccctattgctctctgcaactttgtttacaaagtggtaactagaattatttcgcatcaccttcgttctatcatgaatcgtcttatctctccttttcagtctgcctttgtccctggtaggtggattgctgagtcttctctacttacacaagagttggttcatacaatcaaatcgaaaaggggtaagggtggcttaatggctattaagattgatgtgaataaggcgtatgatagacttgagtggaagttcatcaagaaagttctcgaggtttttggatttcattcccattttattaccttggtgatgaattgcataacctttgtttcctactctatcctttttaatggtcggcctctgaagaagttttttccccagagggggatccgccaaggagaccctatgtcgccatttttgtttattctctgtaatgaagttttttccagattgattgccaaggagcaatcccttgggagggtgaatggcattcgtattgctcgagaagcccccgctatatctcatctgatgtttgcagacgacattatcctattctgcagagccaatgagaaggaggttgagtcgctggtgaattgtatgatgatttatgaaagttggtctaggcaacaatgtagtaaactcaaatcgggagtcctcttttctaaaaattgctctcgggctcttcagagaattttaatggataaattgggtatcggattggttaaaggagaggagaaacacctggggaacccgttccttttctcccaaagcaggaaaaaggattttaatttcctcaaatctaatctttgtaaacggcttgaaggatggcgtatgaagactttgtctactattgggagaatggtgaccattaattttgtggctatggcgttgcctacttataccatgagcacttgtaaaatcccaatcacctcttgcaaggagttggattctttagtcagaaaattctagtggaaaggccgtattgatagctctagattcctggcaaccaaaa

SEQ ID NO: 188687 - DNA, 3842 bp, Cannabis indica
tttttttcttcttttgtgcatttgcttgctaataaaagtaacatttttttatttaaatcttcaaaatttattattttatttgtatttaattttttaaattcaaaattttgataataaaattctttcaagttattgaactaatttttaaagtgtcatttatttactatgcttatctattaatatagattatttacgtttacactcttatacacatgagatattcatattgacatacataatattattatttaaaattataaaaaattattttaaaatttatttcaaaactaaaaaataatttaaagttatagaattaatgaaataaattaaaattatttttattttattttattcctttcttatcctgatgactccctctcttccttcactatcactctcacctccatcactagtgccaccacttccatcaccattgccaaatcaacactaaaataccatgatacaaattcaaacccaaatttaaaaaaaataattaacaaaaactaaatctaagaaaaaaaaaaaatggcaaacctagatttgaaatcattatgattatgttgcacagtgagtaaaaaaagttgttgtacagtgaacaaattgtgagctcaatttacattctcttgcttaatttcttgcaaactaatatacttaatcctattaaaaatttcaaatttaattttttctgttgtacaatgtatagattggaccctattttcccaataagcaacattcagacccttgaaatgaagtaaatcactgctgtaaatagtaaaaaatagacccctcttctaaacttatcaagtgagaaaggcacgaaattgaaatgggaacggacacgacgacactgagagtagtgatgctcatcatgagtgtgcctagcttattcgctggcttcgggagaaaataatgagagcgtgcagataacgggatcgggctggtaggttttgtttatcgacgagatgtgagtccccagtctgttaggttttgaaattatttttttttataatttttaaataataatattgtgtgtacaaatataaacgtgccatgtgtaaaagagtgtacatgtaagtaatttatattggcacttaactatgataaatagataacattttaaatttactaacaattgagtagtttaaagaaatttaccactaaaatttaaacttagagagttaaatataaatgaaatataattcaagggatttaaccgctaaaaactcacaaaactaatgatttatttttgttgtagtttgtattttaatgatgatagaatttaatctggagtgtattaatttgtgacagaaagtactagctagggatataattcagaatattatgttttatatgttacttttcttctactaataaataagatgtgtaatgtaagaaaatttgttaaaaatattaaatttatcgtagcaaaataatcataatagttacttcggttgcatacttataatttgtagttggtcataccactaaacatgattatttgataataaaaattttcaggaaattattttcgtaattaaaaaaaataattttacaaaaattaaatatcaaaatatgaaaacataaacatatcattttttttttgaaaaaaataaaaagaaaagaattaaaatcgagcatatataaaatataatgaaattgatcaaaatacctccattcattaattcgcagagctccgatctacaaacttagatctacgaagaagaacgtagaacagaaatgttaaactaaattaaataaaatgttaacgtgaggtttgaatctaaataaatggagcttcgtgtttaaattaaataacaaactctctcatcgtaaagttttattttttttattattttttgaaagttaacgtgaaagttaaaaatgattgtttgacggaatagaaaaataaaatgttaaattaagaattacatttagccactttataaaaaaaaaaaaaacatattaaaattttaaatttaataagcttttatgactaaattataattaaacaaaatacgaaacacaatttgtttaacataaaagataaatgatatatgtatagtgattgtaaatttaaattgtattttttttaaaaaaaaaaataacactagccacatctaatataacatttataaataggtagactaattatgtactttctttcttatattaaagagtttagaaattaaatcacaaaagaaggaaaagtaaaactagttgaaattaacaaaaaaaaaaaaaaaaatcttgtacaaactgttgttgagttataatgatcaatggaaacctcttgaacctctagactgataaagttccaatctacttttggcttcaggtaacagagcttccatgacaggctcctcaaccaaatgaccctgcttcgtagaccattcaagaactataagcacttcttcttgagcaagaacctcactatcaggaacatgtaaagcaatgaaacacaaaagaatcaaggctggtatttgaatcatttgttctccaaaataaaccaactgtatcaaatgcttagtccctcctccatctattattgccttgcagtgattaacatgaagaaagttttctgtacaagcaaacttattcagagcaatcacagcctccatagtagtgtccggatctctttcatctagtaacttaactaaaggtccaattattctggtctctgtggccctgaaagtcctagctaagttaccaatggctttgatacaaggagtgaggagttctgaatcggccttttcaatgattttaagaagttgttccaccactgcttttgcagcaggcgaagtgggcttaaaagcagagcgtcttagatcagagttttgctctgctacggctgtgatttccatcaatgctttagctgaatacaattgaacatcctcttgtcccttttcgagtagtaccgcaaagcataaaagggctctagactctgttatgctgcggcaaacgacaacatttccctttgagagtttccacagtgctctggctgccattgctttcatctcagccttggttgcagggtcttcgaattccctccccttgatactagcccctgctaatgagactggcgtgtggtggtggtgttgcttagcgttgcccgaaccttgactcccttttccttggtgtgagtgactattatgaggaggcatctgtggttgatgttgttgctgctgctttggttgatttggagtactattagcattatttctcatggccatagtgttggtgactacattgtgcatctggcttggagtttgattccccatcgggtgggacacatgactagcttcgtcttcagtctctttcttgttggtgttggggttagggttggagttgggttcttgattattgttattacttgccattaccaccgaatgtatggacatctgttgtttagtggcaatggcatacttactatgctcttgaatggtctcgaaagccagatggctaacaagaagccgaattgcgttgttttgagcaaaatggtcttgacatttgggatgattccctgccaattctgagactgcccaagcaactagtacctgaaccttcatgtgaccttctttaaggattttcgcaaacacattacaaactccagcattcacaatgtgttcaacgctttccgggtcacgccccagacgcccaattgccgtggcagcattctcctggccttccattcggccttcttttgccaatttcagaagtggcgccaccccaccttcctcaataataagcttaccgtaccgttcattgtctttagccaacgacgccaacgaagcagcagcatccgatcgttcttccaatgaccccgtgtaaagaattgctatctg

SEQ ID NO: 188688 - DNA, 5483 bp, Cannabis indica
attctttgttagcttttaaaaaattctatttagcattgcccacggttctccactgttggcattggtttttcccaatggtttctttgcttcgtttctaaactgttgggaaaaacctccacttactttttccaacggtttttatatttgaccctcttattaaccgttgggaaaagccaattttgtagtagtgttttttggggacgtctcacaataggtagggattgaagactgttacctatcttactaggggtgttcatcaaactgcctgcactgcaccacagtgcatacaaaatacagtttgaaatcttttgtgctgctgttgcggtttgtttgtgaaaccgcgtggtgcagtgcagtttacagttttgaatttaataattgtggttcaaaccacaccgcactatatattacaaagctaccaatttttataatagaatttttattcttcttttcatataagaacaaacatatataatatatatgtatattactttattttttagagacaattcaatataatgactcgataattattatacatgttatgatgtaaaaaaatttaataatttttttttgtattgttaaagctttattaatttaatttttaaatttttattataatgtttgataatgatgatagtgtaaacagtaaaccgcccaaaccacaccacaccacaatgcatttttggggtgcatgatttcattctctgagtgtggtcctgtggactattaatgtttgaaagaacactaatatcacgtataattctcttgtgtcaatttttaaattctacactgttatttttgttttttttctttactgttattaaagaaaattattggcatttgcaaaatacaattttcaccttggcagagctttatgtagtagtttagtttggtggtcaaggagttcaatttgtattcaaaatgtgttgacagcggatatttattgctcttagtgcttagtggttgagatattttcctaaaaaaaaataaataaaagggttttactgtgcaccttcatcaatgaaagaatcactgtacatataaagttaaaaaaaaaatgtaacattaaaagaaaaacctaataaaaagagcataattatgtaattgttatattttaggaagaatttttaaaaagtaatatattttagaggacaagatagttaatgtaaaaaattaagagggcacaaatactaatttttctctttatttactagctcgggactaaatggataatagttggaatttttaccgcaaaaaataaactacattaattacataggattttatatcagcaaatttatataaaaatttaagtacaacaaaataaataacataaaattctcaaaaaaaattacataataattaaattcaacaaaatgaactatacaacgatcttttatgcaaatttcccaaatacaaattaaattcatcaatagtctttgcactttctcctttttcttttttttttattaagaaaaaagaaaaacttacataaaatactatttttaataaaaaaaaattatacttttatattcatttttttaaaaatatttttacgatgttttataaaaacaatatgaaacaacatgaaaactatataaaagtaagaggaaacaacatccaaacaatataatagcaatataaaaaataatatacaaataacaaaaaatgaacaacaaaataataaaaatatatcaaaagactgtatttttataaataaaatcttaaaaaccgtaaaatatttaaaattttgtacaaccctatttttattttttgtttgttttttttttttttttgaaataatcccaaaagaaaaggtgtatttggcccacttaggcacgtaaagaattactttttttaaaagtaagaaacaaatatctcgagtaataaaggtttaactcaatcactattcactaatgggaagagcaaaagcaaataaccccttaaacatacatgcaaacagaaacctcaatctaaaaagatagataatagataaaagataaaagataaaagaaagtaatatataagtaactgttggaaaaaatactcattaaaattaatcataaggtaatgaaaaaaaaaaaaaatacagaaatatatgctcataagcgtgttgttgtgaaaatgtgagttgtcatatgaacagaagtaataatcaaattattagtaacatcgacctaccttttaaaatagtgacatttacctaaaaaaaaggttcataacacaataataaaaacagagagaggtccactcttaagtattcgttgtcacaaaagacttgtttcctgccaattttgactacatacttttttccaattcataagcttaagattttcattaattcaatcactataacaaaattattacagacaagaatttgtatttgtagacttgtagacttgtagtagtgttgaaccaacttaataatttccaagaaacaaaactaattcgacaagatatatgaaaaataattactaggtacaatgagaatagtaatgaaatagttactttccatttcatttctttagtaattattcatcaaaactcaaaaaggagatttacaatagaggaatgcttgacacactctcaatatttaaaaaagaaaaaaaaaactactacttaattatatatgtatatttctttgtgtatacagtttagtttcctagagaatataagaaaatatataatggttttaattaaacacacaaaaaaccatacttaattatttaactaataactaaattgaataagatcacagctccttattgcttacttcatgaactgtacccaaacccgaataggacagagccacgggctcgcgtctaactaaaccgactgggccaggcccaggcccacaaggcccaacaatctccatcatcacagacgacgacgtcgtcttcttccgcttttccaaatacattttcacataaaagttcacgaacagaagaagtatgacggcgttgaggaccgcgtttaaaacccacgcgccgattccgttacagccgcctttcatgaaatgcaatagcaatacgccgacgtggcaggcgacgttgcagccgagcaaagcgatctggcagttggcgacgaaggggaagcacgcgccacgtaaccctacgtcggtccagaaccgataaccgtacacggcggcatagacgagcgtggtcgatagtattgccaggacctgaaacgattgggagaattcgagccagagaaaagccatgaaagtgaggattgagttgttgaggagttggaagaaggagagcttacgacgccgtacaatcgagaatagcgttcgaagcatgtggaggaatcgagagaggtaatacatgtaagaccagaagaagacccgacccgaaggacgggttccgagaggaaaacagaggagccattcgagtggcgttcgtttggatcgtctccaagaccatcgcgtatcgcggatctcggcggcggcggagagtaggattccggcgaatattgttgcggagattaaagccatggttagactgtggacggctgggattggtcctagggaaatcggacggttgtgtatgagggttaggaagagatggagaaggagtgataaggtgaggtagaaggcgatggaggtaaagagaaatgaccacgtggagccccatgattgggtgtggctccaacggaacccgactattgatggatgctccgaaagccaaaaagtgatcatcatcgtcatcgccgtcttccccgccatatctgacggtggagataaattgtatggtttgatcacatcaattgattattgaaagaacaaaagaaaatgtttcaaacaaaaaaaatcttttgaataaaaagaagagagagatagagaaaatgagagagagaatggactaaattgggcggaagagaatgactggtgagaattaacatatgaaaatatttaactacttttatgggtacacgtgttttcttttcattggttatacgtgttcttaggctcatcattttacgttggcatgtttacaatatgtgattttgatgaatttggttggggagttctattatatatgttaaaataattattatagtaataataatttaggaaaatcagaatttaaaaatgaaatgggattgaataaaatttattatgtacctaacaaatttataaaaaataattcttgcattaaaattctctttattttttatttttaaatgaatagtaactctacaatatataagatattttcctttgcaaccgaataaaaatcattctataatattataaaatacaataaaacaagaatgaaatcaaaaaaataattatttttttcttccatgttattatcccaaaaaggttaatatgtttgaagacttgtccaaaaaggaaaaaaaaaaatcaaacgttgaaggaaaataactattttatgaatcaaatgtttgattgattgtctactttttataaaaatacatgaaacaaacaaatcttcatataaacattaaaaatatatatattataatactattttatctatttttattattattattatttaacaaaaacctagcctaacccctcagtttacaaaacacttcaatttaattttcaagcaaaaattttggattataattttctaaattaatttttcaaaataaatatagggtataaaaaaatctctgtgtttttatataagtaaataaatcctatttagattggttaattattttttttaataagaaaagatgggttgaaaagttggaaaaaatatagttaggcacgacataatggcgggttataaataatgaatattattttaataaaacttattaaaaattagcttatgatatggtaaatgattttagaattattaatattaattagtttgaccaaatagcctacattatatttatattgcaacaagaaacatctgcttttttttttttttctcgctgttcaaattggcaaatcgtacccatgccctaaagctaaaaggaaatactatttaaaataaatataatattattacagtctaagagatatgtataaaacattagtgcctcatttaatgtctttggatattttatgtaataataataataataaaaaacataaatatatatagctattttaattgtattttggtactgtttggaaacatgggcaatgagaataataagatttcattacttgtgaggtgatatcataatctcataaattattcgttatgtatggttattctcttcgtttttattttaaatttttgtcgagtaagagagatcgaatagattgttaattaattaaagaataatttaatatttttggtcttcaattttttacactattatatattgtattctttatagtatcttaattattaataatatattttttaaaatataacatttaatttataataatataattttttaatcacatttaattcaataatatcgtgaaataaatgatagttcttaaaatggatataaattaaatattgttcacctttgaa

SEQ ID NO: 188689 - DNA, 3450 bp, Cannabis indica
actagataaattttctaacattagtactttatctagtttaaagaagcaatcgcaattaagaactaatcaaacttaaaaaaaacaagtaatctatagattagcaagaaaacaataacgagataaaggttatgctttgcttaaaaaatgacataaaacaattacctgacaaagtcacacttcttcaatagggttacccagtaagcctattagattccattattcagcacaatagtttatggtggagaaaatggcatttctagtacataaaaacttctattgcaaaggaaaaaaatggatattcgaactcgaactctatatagtagtatcttcatgcctattaagaaagaaactactgtttcatagaacaaataatcattttactcatacaagtactttctattcacatagagaaaattgaaaatgcattcacaacattcattccggacaactacataccactacaccaggaaaagagagatccaagaagcatgaaaaagtgcagcatttcctctctttatcccggacctggactacaacctataactcaaataataaccaataagcagttagtatcaaaagcttcgtggtgtactcgagaaggacatcgcttgaacgagagattgttccctttttatactgcccccaacagccaaaacattacaagggacgaaacagcaaggaaaaaccacgatacaaaagccaaggcaacagaaatttggtacctgagacatggaagatgaggtggaaaattgcagtagttcaaatctttcgaatagagaactgtcaccccagctgaggagctagcagctgccagtgataaaatagaagtaacctgaattttgtaatttaacaaagaattacttaaaattaggcaaaagaaaattgattgcacattgaatgactcaataaattcattatcataaaaaattgccacatttgtatctttgcacattgcacacaaaaatgagttgatgaattgagtaaaaacttacccaatcaccaacaacaaagaggctcactagaacaggattatacaagcttttctttgacttcaaagcatgcagatcaaggcatgcaagtccaaaactccaaagaatttgaagccccatcgatgcaattaaatagctgcattcaaagaaacaaagttatgtaagtaccaaatcatttgcaacagatgaaaacccaaactattctaaagctaaataatagaaaaaggagagcaaaagcatataatataagaagcagatactacatgagcggatcaaaacagaaggtcagatatgtattattgtgagaatacactaagtatatccctcaattttcttaaatgaaaacaacatgtcaaacatcaaatacacgtagactatcaattaagaaaatgcccctttggtagacgcagtgatctatgagttcttttttcaagcttccagtgccttagaatagaggttattcaagcttgtacacagctaaaaatagaggttgcatgcagatacaagtgattacaaacttctggtagacttcctcaacaataataaacatttcccaggtttgtcacttactcatcttcctttggacggccttaggttgattaaatctttcagtttttacaaagtttgttatatgcctagaaacttcaatgtcctagcggactcgattgctaaatgatccagaatcaatggctgtaaaggatcagttaccctaggggacaccctacccagtgtggtagcagtttcaataaataagaactttcaggctaaaaaaataaagtaaccaaataagtagaataactgtggagatgatggcaggtttagctgtgagtgatcatgtttgttttatcagtgtttaagaagtttcattttggctgaggttatttggtgtgcaatgttgtctcttacaaactcctttggatgtaaatgtagaaataaactatcataatatttctctatctaaaacgaaacatatcaattcacagttctgataaaaagtgtttcattacaaataacttttccaaggatttggaattatgaatatggtaaatggggattaacatgagatgacataatttccaccaagagaacataacgttaagtatcattttattgtactccccaagtgatatggagtgacttgattggatgactactatacctagctttccctagcaaagaagacaaaaggggtcctctaatcttaaacaaaataggccattttcatcaaatactcattcagaaaggtactttttttgatgcttgagttcgttctactgaaaatgatggaacaatctgataagtacattttatcaagctaaactaaagctcacaatttgaaaaggggtcccaataactatatactaaaaacatatatataaactacaattaatcagcatagttaactaaaaatgaaattacatacacgagttagtaatgaaatacaggaaagaaaacgagttagtatacaaactgtgaatataccattttcaggttgagtgtggattggaccattaattcatatttcaaaaagccaaagaaggttagagccattttactaataataatggtagaaaaactacttcttcgattaaacccacaaaatatcctgaatcctttaactatgcatgcaatgcaaagttgttttcaaacagaccctttgctaaaaaaaagataaataaataaataataataataaaaaaactcgcttgtacatctaaagtcctatattctttgactaaaaaaatgaaaaatttccctgaaaataaacccaaaaacaaaagataaaatacaccttagaggagaaaaaagtttaagagagagagagagagagagagagagagagataagtagggaaaataaccagaaagcggtggagttgaagaagccgaggggcagagaccataactccaatggaagcagcagcaaaagagaactggccgattctgagagcaaacccactcaacttccctgggctcccaaacagttccttcatctctcaaaggcccaaattaccaacctgaaagttgcgccatgagagagagagattctttcagattttcataacagtgtacaaactcaaaagactcatctttcacttccaattttcaaacaccacaatgaatactctcgtctctccaacggacacagcttcccaccaatactactttttcttttttgtctgatcaagcatttttatttatttattttattattattattattattattattttataaataataaataaatcttttaaaataattaccattaattataattactattcttcattataaagtattaattttcattttctctcttcattttcttctttttttcttctttattttattttattcacaataattttataatacgttatcagcacgaattttgttcaagataaatatttttttaaaattattaaattgtttagaagttacaatacactaaatatat

SEQ ID NO: 188690 - DNA, 1361 bp, Cannabis indica
tctctctctctagctatagttttagattatggaaaacaattacctatctaaatttcttccatttccaacaaattcttcatcaccatcttcttcttcgtccttgtcattaagtacagctgtggatattaatctccataacaatagtaataatcaagctggttacaataatattaagtcttcttcatcaaatgatgataataataatattggattcttggggctgatgtcagagatggagatcccagctacctccaataatgatcatgatgatcagtttcagattcagagctctaataatattaatgctcatcatggtcaggttatgaaattggagaagagaaaaggagatcaaaatagtaataagaaagcaagaaagcctaggtatgcttttcagaccagaagccaagttgatattcttgatgatggctatagatggaggaagtacggtcaaaaggccgtcaagaacaacaaattcccaaggtatattcatatttttctgaatttattttaaaaaaatatatatagacatattgcaatagatttgggaatatatattaggtgggaaaaaaaaaagaattcgattaggacgtatgtaatttatgttttcagatatatactatactctcgaatgaagcaataataatttcataccacaaataaattttgatttattttttttttcaataatgaattttgattaattttgtgataatataatatctatatatttttattattattaattaatcaaatttgattatataactagtgccagtagtcatggcggagggatcgatcaatatatatataaaatctttattatgctttgcgatgcctaattcttattcttaagattttcattacaaaatatgttgttatgattaattatatatatacaaccatgataatataattgataaagataagaatggaaaactgtttttgttaataattgtattaagctactgttttagatatagttttagctactatacactccattgatcgtacagatattctgtaaaagaaattaagattttaaaagaggacaattaaaatggtgtaatatagtattaattaatggcctaattaaagtagatcaattgttatattttgaagtataaatataaatattactttagctgtgcgatgggagagtattatattagatttcaacattgtctatgtttgtacgaacattaaatattttctttaattttccatgcgcctagttgcatatgtgtatgtatattatggcgccacacagcaaaataaatatatgacataaattaagtacacatgagcaaatattttatactatattattattggacattgagagagatatttacaagtgaaaa

SEQ ID NO: 188691 - DNA, 1904 bp, Cannabis indica
aaaatggtcaaaaactacaccacgcacactgcgaatagccctagttttagcctcgtggtccttaatttcttgatttccctactctttactatgggtttggcaaggatcctcaacccattagggtcccattcagttaaaaactgaccttcatcttttgggcctaacccccccccccccaccgttttggttgttagcccttctagacactgggggaggaatcttatcatacttacctctttgatgtaggttgtagcgggttgggactttctaaaggggattacggccatccggcttgcaaatctcctatggttttgttgttcattggtgcaactttcagcctcatcatcgccatgaccattagggtagttgggatgatatgcgctactactattaacctcgggggtcgtccctcctactcctaggtctattgtttcttggttgaccattcttatttgagtttggttgttgtgatggggttgccaaacccagtagtcaagtggcccccctctcttttcttgttggacaacattgttatttctgaagcttcctaccctacttaattggcctcagtcggacattatgatggtcatcccgtccaatttgatgtctaggcaggacttgatcatccactaggagtggacaattattattgttgttggcaaggcccatattggagtggtgactccagacacgttccacattcctttgacattcgtgttagagttttatgtcctaaataaaattgattatatgtgatcttattattcaccaataaaagaaataaaaatctttattgacttgatcaaatactttattcacatgcttatttttcatgattatatgtttactacttaaattctattaaacttagaacatatagttattcataattatagtgacgtcataacaatagaaataagtatgattatatgtttcaaattcttatcccaatttatcagtgcactaaatttatattgacataataatcatcaatgaggtttacttatacttttgataagtggtatatcttttccagtgatcaagtaaagtaaacttgtcatttgatgtatagagtttacatcaagacgggatcgatattaacaaacagagcggtttttataatttaccatgctaactattattaggaaatatcacttagtttataatagatcaattagatttgtatcctgaaatgattaagtttaagttaattattctatttgatttctttgattttctctttacaagcttacttgtgctcgagccaatacctcgattttaggaactcaatagtataattgagtgtgagtgtgaatatgagaaatggacatctatagcttctatttgttagaagtaaaataatggatacatgatagagtgctcatttaaatgattatatttagttcactaaaataacatttatattaattaagtgtttaaggacaaaatacattgaaagggtaaaatggtaattttagttcctactcaatgtaaagtatctacagagaattgttgttgaatttgatagaaaaatgatatcttatatcgtatctatatttagaacattctttgaaattatgagtgtaatgttaaatttatagtggagtcatgagaaattaataagtcaataaatttatcaaagttcaaatctatcttattgggagtctaaattttataggctcgtagcgctcacattatccgtagtaaatatagtaagtcttagtaaatgattattagttaatcaattaaaatttatattatttactttgtcaattaagaaaaattttactcttagtgaaattagaaaaataggagaagagaaataaataaaagggtaattttattagtatttgcattttgctttcaagaaaataaaaatacttaaattattttatttaataatt

SEQ ID NO: 188692 - DNA, 4254 bp, Cannabis indica
ttttttattgacttatttaacccatactttaataaatggattgtgtttagatttacatgactaatacaaagagaatattcatgacctatttaaaattaatttagaatcttaatatgctaaatagaccataaatgtattaaatatgttataaatatgcccaacagactattaacatattaatgagttagcatatttgattccatttgaaatatatcaatttatatatgggttatacgagtcgttcgtgttgtatcaacccatctataaatagattatatttagattttattttttgacataattatttgtatttaggttgggttaatatttataatacatgaatctcgacatgataaaaacataacatatgtatataaattgtcatccttaattaaaaatattaattacggagacttattagggaatactaataatcaacaccaaatttattaggacctttttaaaagaaaatgtagtaaacatgtatttttaaaataaatgtcgttttgttttgagctctagatgcaggtctaatttgcctaattcaaaccgaccctaatattactaatatctactattatgaggtatccattggtaaaattaatatcaaattttatatattttattttaataatattataaaatatatgtattcataatacatattactagctagtagctagtgtataataataccaatacttactatataatagtgaatgtgttggttagttttattagtatccacatggaaccttgtattgcatacaaggtatggccttgttaattatataagtacatatagtatagtagtgtcagattgtcagttgtgtctatcaactttcattcttgtagatctagattgaatagtcttcttatatagatagataccactagatacccaaaaaaaaaattatatgattaataataatgtcataaaataaatacaacatctatcaataaaaacaccacatagatgatggtgcttcttgtttttattcccaacttgtgctccatatttttcttctattcacaatcattgtgtttgaataataatttctttttcttcttctttcacactattttggaatgaaaaatatcaattaatgaattaaattaaaaaaaaattggccaaaagtggggtgcttcccaaaatgccaattggcttgaaaaaagattgacactttcacaccatttctttaagttctaatctaagtcaactttaaaaactcaatatgcttgtttttgtaactagctaaggttacaataagtattttttaatttttatttataaagtttgattctttatttgattgaattgaattggtctcccaccacctatccactcattaaattttaaaggatgaaaatgatacatttttctttctcttctttcttggtcggtttcttgaaactttcacaaataaaatctaacacttagaaaagaaaaagaaaaaaagagtaaatgaaagcttttattataattacttggataactctttattactttcatttgctttgtaaagtaatattggattgtagaaaatattatttaaattcattggataccacaaaatagatagataagcttatatgatctagaaactatatttaattcattagatagataataagataagtcttacttcattttaaacttgaagtgtttggatatgtagacaaggatattgggttgttgagatttcctaacacaactaagtacatcaatttatatagttccaacacgtatgagacaaatgttgttcacttaaaatttcactcaaaactaggattttattactcaaagtataggctctaataatgggtgtaaaattgggtgattactaatttttcatatttgtaataaattaaaatatgtaagaatggatattaaattgtgttaataattgtaccatgctataaatttaatagtctctaatcacacataatagatttaataatgccatcactaagccacatgacattatactatgattaagcactaatcacatacaattataataataatctctaaaaaataatataattaataaaagtaaaaagcaattaaggtggtcaaaattgtgggattaggaaatgaagaggaaattaattgacaaccaatactatttttttttttttttgacaaccaatactattgaagccatgtgattgggtctaattcaccaatccactaattcatataataagagcattgttatagtatcactgtgtcgctcaacgattgattagtaaattttttaaaatttattatcttaatttaaatgagatttgacacttaattacatcaataataacctaaaaaatattattggacttaggttaggccttgaaatttagtggctataaaaaaatatttttgagcccttattttaaaaaaatgtattattttttaaaattaataaaaaatatgtaattttaagaggggaagattttttttggcccataagttaggtgggccctagacacaaacctaatccgcctatgcctaaggtcgggtgaattgatgctttttaacatttctcatataataaattacacataaagtcggtacacacttatgtaagtgagattcatcttaattaattgatacaaaataattgtattatatttaatacaaaacataattttataatatatttacattaatttttaatttgtgtttgagtacacaattataaattttgatataaaatttaacttcatcattaactttattatataaaataataaaaaataaatataaaaagttaatagtataatgtaataattagagataaaatattaaaaatgacataaaataaatataaaaataataaatttattgtgatataaattttgtattatatcattgtaattaaatttagattaacttttacaaatttaaattatttttgttgcacacaattaaaataattttttttataaaagtgaactatattttaaaaataaatcaccaatttggctcctagtgtcaaatttgtgtaaggatataatttatcctaatctataatatcccaaaatttcccttttaaaatttgataagatttaattgagtaataaaaacaaacagttggtgttcatattcatattattattatcaaaaaccaaaaaagaaagaaagaagaaaaatcaaagccaaaattcaccatcattcgtatttatgtggggacccttttgcgtgtttgcttccgtaatcttcatggggtggctggattttatttcttaaatgaaagaatatatatataacaagtccaatgtagactctgtactctctgcactatcctttttttttttcttggacattaatggtgattagacagagtctatcttttaatagcagaaagaaaccccctttcgagctctgattctcattcaatattccatttgctttcaaattagttgttgttgttgttgttcatccatgactgaacagatgaaacaaggttcaaggcaccattcggaggtacaacactttttcttgagcttttgcttttttttttatgtatttggtttgtgggttttggttgaattttgcgaaagtgagaaactttgcagagaagttgggctgaattgtgttgtttcgattggtcgtgcctacagctcttctggcccaaagttgtgatgaggaaattgttgaatatcagtgataagaactcagattacagtgccgatcctgaagaagaagacgatgatgataacgattctgattccgataatggttagattcactctctaaattgttaattatactttcaataacccatcttgagattttccttgattgaaaagaaaaatcatttcttggctcagatttttctcaacgttcaaggaaatcaaggtttgggagagagaatgaagaagatgatagaatggatgatcctaatggtaatatttccattcctagaaattttacattttctgaaatttatatatatattatataattaagtataatggatctactgctacagtactttttactattgcttttgaaattttggtgaatttggtttgaggaagagagaatgaatgagtataaggcagctctgcacaattttgaaacagagcaaaatccaataacacttgtcaattattggctgttttttttggaagtttctcttgtctattttcatttgtaagaagctatatttgttcagttatggctaacaggttttttctgcataatctaactaactggtctagtgtaattaggattgtgaaagatctaac

SEQ ID NO: 188693 - DNA, 6508 bp, Cannabis indica
tcgaaaccatggatggacaaattacaagtgttacaagaactggcatctcaaaacccctcatcggctagaatctttaaagccattgccgacccgccaactactagtttacagcgtttgaaggtcagtggttctatgctttcttttagtgtttgacacaaaatccctttactcatcttcgtgtaaggttttacttaaccactttcaacctttctattgatggtttatcatttcaaatttttcagtttctgatttggattatatcctgttctagttatggtaagttcagtatgaagctggtggaagatcatcactttaacatgatcatatttttctcactgtaatgctttcagggtttaaccactggtgggctaccaacttttatcgatgttgggaatagctttggtgctcctgcaattattgaagacaatttaattcatcatcatcaagtgtgtatttttttttttaattttctgttcgtgtttttatctatttgctcctaaattcttgcatcagatacaaacacatatacatataatttgaacttgagagatttaatttcttgatgtgctttaaccgatgttttatctcctcttagctagttcaaaatggaaaacgagtcacaatgatgggggatgatacatggatgcagttgtttcctcatcattttgaaaaatctcatcctttcccctcatttaatgttaaagatctacatacggtatgtattactgctttgtttgtatgaatgagtttcaagttcattttttattggttaccccagttattgattacttaccaaaactgcttgtatgtgtatattttaaatttactatgccctatcaggtagataatggatgcatagatcaccttcttccgtcattgtatcaagaagactgggatgttcttattgctcattttcttggtgtggtatggatgtcttgctttctcattaaatttagaattacattacatgctttcatttcaagtcaaaagatgattacttatctttccttcggaggatcttattggcagactttgttagggtcgctcacccaattatatccaaaattttaaattattgtttgcactttgttggtctcacgtgttttgctttttcttattgtttttaaccccttaaataggacttctaaaatcttgtttaggttaataaaattccttcacgtgcctagagcaagaaatgataaatcaacaaactgcaagtaaatcacctcaacttacttatcctaacaaaccttcaatgatgtaggctattattgagcatattaattgttttattctgtggctaggatcacgctggacatatttatggggttgaatccgtacaaatgattgacaaattagagcaatacaatgttgttctacaggtgagttccttgaacacatacatgattttattatttgttttaaagttttttaaaaagaaacttctttgtatgctctaagctttttctgttttgagctttattattaaaacgtcaatattgttatcatggttttcctcggccataagtgaggctccctaataaattttggaggaggtcaagtttggtctatgtctcttttacaaaaaaaaaaaaaaaaagaaaagaaaaaagaacaaagaaacttttttgtataaataatgggggaagctaaactatacagtttgaagcaaataacaaaacatagtttacaaagatccaagttgtgtattattgatatctacaaccctgcgtaagggggagattggtttacaattgtgaactctgatttgcttgtatttcattatttatgttttgttcgattttaattactaagtttatgagatcgcgatattggcttgatcctagtatttgtgtatatgtttatatacaatagcttctacgttcaaggaaatgacataagaaatagaaagtaatttcaagcttttcctttttcaatctctctgtttattcataccttatgagatggccactgggccttgaaactaagcataggaaattgacttgcgagagggatgtttgtcgtgcacgcaagttgggaaagcatgccatatgcccacccaccattagttatttcgctgaaggtaacaccccactttcctagcatcaaaaggaacaccctttctatctcctgataatgatgtctcatgtaggcttatagactatcttatcctatgatcagattaatagctgaggcttctttctagagacactcttaacgttttcctatagaagggacgacattcccctccccctaaggcaagccacaggcttatgcttgagaattatacattctctctgtgtttccactctctctaactaaagagatttttcaactaaggactctcgcttacaagcactcctctccgtcttatcttgggacaatagctaaaataacattctaatatatccctcaaaaaaataactgaatgatagcccttgtgcttgactaaaacttgagggaagagtctaacataaaagcacaacatcgactggtgtttcacatttccaccctttgcttttctatatagattttaacgaaattaagcaccaacatgttgtataggagtttcttcttgtaaacattttagtttgttttttcaaatttgtagtaatatatcctccttttttctttctattaaaagaaatgaaaagaaaaaacattggtgaaccctaatacgtgggacagtactttgaattagcctgctgtcaaagcatggggttttccatgtggacttcttgccttgaaccctaatatgtggtttttacatatatgatatatgcactagttttcagtttcttacattatcataagacttgtctcatatgctgtcctactaacctttctgaatagttggtatctcattgtacaatgcttttctttatcaatcattgtctagaatatgaccatgtagtttcttcagaaagtaattgaagtgctgaagaatgagtctgaacctggtggactacacgagaatactcttctgtttgtgatgggtgatcatggacagaccctaaatggagatcatggagggggtactcctgaagaagtatgtttttcactttcacttttttttttcttcttatattctaaagtacagtttattaatgccaacttggggtcaagcaggtggaaacatcaatctttgccatgagctttaagaatcctccggcttctataccatccacatctagtacttcttcttgtgaactcaaatcggtaatacttgctattattatgaatacatttgtactggtaagcctgatttgaaaatcaattcgctcagccattttgttttgctgatcttgtctttttactccctggttaaggagtggaaaagggacagaaaagataatccataaaaaatggacaagagaaatgtaaaaatattagtgtccgaccgaatctggatagtttaaggagttatgtcattgtagggctgatgccttaatagatagaagtaggaaagtacccagtataaacctctacagaaagttagtcccctgtattcattttatctccttgcaaagaatattgctttcctcttagattataaattccattgctcttttctacaagttgtgatagtgattctagaatttgagcccattttgattgcttctagatcttcaacaattttatttaatatggagttctttatggttggcaataatgactatagtggctttgttgaatttggctttattggtaaaaagaaatattaatgatttaggaggaggatgtaaatataaatgatttaggaggacgatggagatatcattgataattaattctaaggtttcgtttggttacaaaataaaaattgggatgggataatgggaatggttataggaatagaaatggaatgaaatgaaatttctattcttttgtttggtaaagactatggaatcaacaactgaagaagaattattatgtttggtatgtatggaatggaatggaatttttattatgttgttcaaattgtccttcactcttttaaaaatggtttttgttttatcaaattaccattattgtacaaattaaagttaaacatataaataatattaaaaaaaaaataataaaattgtacatataagtagctgatgatctattttattttaaatattaagtataacataaatatcattcatataatttagtcctctcacatatattgtaataataaatgtacatatatgcttcaacgtatcattataattttaatcaatatatttttagttagtatggaatgcgttttcaactcattttatttaggaaagcaattccttagtttacatgaattacaattcctattggaatgagttttccaatcataataaggaaaccaaacacttgaatgacccccctttagggatagcaattccattcgtactcccatttgtgaaccaaacactacctaaagatttctgtaagtttatgttttctgattttataaggtggtggaactatctcttgtaatagtttttccttttgactttttattcctcaaattttcacaatattaaaatggctccattaattttcttctgaataatatttgtttttcaaattttaacctcaggatgagaagaatttgtgtatcaattccgtccaacaggtgaggatgttagtttgttaaggcaaagtgtggaatgatttgcagtattagttcctgtgagattcatacttaattcaagtcttgtttgcagcttgactttgcagtgacagtttctgccctgcttggtatcccctttccttttggaaggtgtagtgtaattaccttgtcatatttacttttgttcttgcgtgttttttaaatttttcactaaagtttgggctttgctttcttatttttatcttctactttgtttgtaatgctgatttcttttcagcattgggcatgtaaatctagatttatatgctttaggggcgggaggaaggagttttaatggagatgtagaattctgtgagcatctgtctgaattaggagaatggatgtggcattacgtcaacgctctctgtatcaactcttggcaggtatttatttatttttagctaaaattctttgcaggtatttgcttcattattttgcactacttatctacatacatcactttgtttgtctccgctgttttgttctgtttttagatgtgtgttgtgttttggctatcctagttttgattaagaaagcagtggctgatgtattctttttgtttaaggtgaaaaggtatatggacatttattctgcttcttctgttattggattctctggtgaagacctgttccatgttgcagaccttcatgctaaagcagtggagaaatggtcatatacgaagaatttttttgttaacaaaaatgaaagctgcaatacagtattgcctgctcttaagagtcagattgatgcatattctaatttcctatcaagtgttaaagagctagcacgctccaagtggactgaatttaatttaaagacaatggctgttggttttggaattatgctattatcgattttcattcatatgcttgctctcacagaggtgaaaaagaaaaatggcatttctttttcaccatcacaagattccggaatttcctttgggctgttttgcgcttgttttatggttgcaatacgtgctttcagcttcttgtcaaatagttatatctgtaagttccaacttctataagttgatgtatggttgttttgtcaaagtataatattgatgcttgcatatgtttcttttgtttctatgtttatttgtatgggtattgaatgggtgattctcttaatttctgatcagtggaagagggaaaagtggcatgctttcttttggccacaagtgcagttgctaagttaagaaattcagtactaaagaaaaaactgatattgcaagtaagtattgattaaaaattacctttcaaagtagtcttaaaaaggattttgatctttatttcacctgaagtctaagtaccattttttgttttcttatgaaaaagctcaaaagttgcgtgtaattctaatttttaaggttctttgcaggtgtttgtttttcttcttgtaatcattattgtcaggtttacaattgaagtaggattatcaaagcaagctcccgattttgattttttaaacattttcccctcatggatgcccaggattgcctttggtcttccggttttgtcatttgtaacagatgtggtgccagtcatttgcttgatgttattagcaatcttcttgtataagactttaagtagtagcatttctgagggactatggaaatatgttatcagggcaactatattaagttatatgctcatagcagttcattgggcttcggaaagtaatctgtgcggtctagcttgggtattcaaaggcattggacgaaatttgattccacaaatggtttatgcattgggattcgcacaattactgttactaatatgttggcagtcttccaaagagggatccctttattcctcaaaaaagttaattactaaagctgtggccttgttatct

SEQ ID NO: 188694 - DNA, 1912 bp, Cannabis indica
aaaaggtagttgttaggactcgaacttagcacaccaaaactctgaagaacttaaaaggaggcgcagcaccattacgccaatgctatgtaatttttataatagtataaataagtatataattattacattatctttataaataaataaataaataatatggggctcctggggtgggagccctaggcacgagcctacccttaaaaccagccctgtatgttgctccagcattcttcagttgtaaaggcatgaccatataacaatagatgcctttgttagtttggaagctgatatgttctttattttccatgtgcatcttgatttggtggtaaccagaatatgcatctattaaacttagaagctcgtatctagatgtgacattaaccatttgatctattaggggaagtagaaagtaaatttttggacaaactttatttagattcgtgatatcaatgcacattctccaggttctatcattcttggggaccaacacttgggtatagagcttctcagagaaactctatattggttagtttgtcaacttttgtttttattgcttttgctcgaattggatcaaacagacttctcttctgatagactagatctacatttggatcaatgttcaaggcatggcaaattacatgaggactaattctagtcatatcacaatggatccacgccaacatatcactattcttcctcacggttgatacgatattctctcttacaaccagaggcaaattcttccctactttgatgacctttataggatctttattgttgacgcatacttcatctacctctaccattggcttgatgattctttcttccttcaatttgagttgagttagtagcttgcttctcgttcgaagtagctgtaggatgtttaattttcctataatctgccataatgtgaccataaccttgacaagctttgtatttcactagaagccattcatagtcaactccttgctctatgagttggccatgttcattaagaaagtgtatcacactcggagatttatctgttatatttatttctaccagaactctagcaaatttgaccattgttctctcccttataactttgtcagccataataggtttttcaattgtgctaacaatggcactaaggcatttatttccccaatattcataatggaaccgatttgaccagcttcaaagcagtaagatctgttgtccatggccgcacaataactgatttacgatcgaactacagaacaccttcttccaagaccaaatctcgagttgctatatcattgaatttaacaatggtatagccaccattcatacaaactatctgagtaatacccagcttcccccattaatgtttaataaacccttcaaaaaccttgattggagggttagctcctaaaattatacaaaatacaacagtattccattttgttgcatgttcttgaacctcatcaatatcaacttgagcaatttttaacccatctttaagaatgggaatatgctagtttagaatcatgaaagaaagacttaccttccatgaaatgcttccatagttgctgagaatttgttagaaaatcctctcgatcaacctcctcggccaagctcttcttcccagttgtctctaccttttcatcatggattgaagggagatcctccacagattgtttgactgctggctgttggatcacctattttttctttgccatggaaaagagaaacgatgaacacaaacgcctaatcctccaccaagacatttttcaatccaaaaaaaatcgacaaattgaatcatccaataataataataaaaaatagagcttgacccaaatgatgacacttctcttagaatgcactgttgcgatcttaatcaacattctcaacgaggcttactgaatgattttggaacttaccaatataagtt

SEQ ID NO: 188695 - DNA, 848 bp, Cannabis indica
agtcaagataatgatattattattttgtataacatatgatcatttacaccaaaaacttattctattctaaaacaaatcaaattatattctctttctctgtaaaaaaaaaaaaatactatatatgtataattgaatcaccaacagtgggagtaactttatgaagtaaaaatgaaatgatggttaatttgtaactaacaaaacagataactttacagaaaaggaaattaatgttggaatttttatttggcttttgaagaatatatatgctaatgctactactgcaataataatgatgaaaataattaatcaacattatttcaaataatatgattgagaagttgaataataatttaataaataatgtttgaatacatgtgcagaaggagtagactgactttgtttgagacttgactcaactaataccatttctacttctagtggtgttttcttctatttttctttctaaattagatcaagttggcataccatctttatcttgttaattagagcaagttggtctttttaataaatataaataaataatttcattaagtaatacgaagattacaataggaatctgctaaaacaatagaacatgctaagcaaaaaaaaaaagtatatatttattattggctaactctatagtatctatcatttccatttcaataagcactaactccacaatttaaagttatattggcttaacctgtagacaagattattggcctctctaagcacaaaattacaacctctaaaatgattttttacaccctagttattaataattaaatataaattaattgcctattcatccaaacattttaatttaagagaaattttcaaaaata

SEQ ID NO: 188696 - DNA, 1743 bp, Cannabis indica
aaattgtcgtttttatataacattgtcgtttttcaataatattgtcgttgctcatgaatgctgttgtattataattaaagaatatttctaataaagatgtcctattaaaataataaatgaacaaaaattcttgactcagccactagtaattaaataaaaattgtggtggatccaaattaaaaaaaaaaaaaaaattacataaaaaattgttgtttcatttgatagtatcatgatcttaatctcagatctaaccactcatagaatgatataatcattcaaacctatcatagaataaaataaaataaaaactagaactagattcaaatcaaactataaaaggaacatatataaataattttgaaaatttttataatacattctcttaaaaagagttcattaatacacttttatctattccgattttgcaaaaattttttagttcagttttttatggtttgtaaaattttgagaaattaaaaaaaaaaaaactaacacactaaaaatagagctcaagtagtctatttcacacgtgtataaaataaaagactcacgtacaatagactgtttgaaccatatttttagcgtgttaaatttttttagaatctttcaaaaatttgtaaaatatcttaaatttctacaaaatatacaatcattggattaaatttttttttcagatgtatcgaaacaaataaaaaatgcattagattttttttaagggggtgcactataaaaatatccaataatatttagcttagaaaagttccaacacaaattctcacttaaaaaatctattttaattaatacacaaaatcaaaataataaatgactcggaattcaaaatgtatttttcatgagaaaatattatcccaattgggttttcccaagaaaatatagcaattggacaacaaagataaaaagatatggtaggtaggtaccacttttagattctctaatatatattatattttggtgaaaaatatctatgcaatgcaatcttgcattattaagaatattttgtatttgcatgttcacaccacatagatttgtatattattaaaaagaaggcacatgatgatggtgtgaatattactttattacaaatcaccatcctaataaattaataatatgtagaacatttatttcaattattgattaaattagtgatattcatcacatgttttcttaaaaaaaagaaaaaaacatatgatgtaaatgatgtatatacacatgatgaggtgaggtgttcgccccacctaaaatttgagtgggattctaaattatttgagacttaggtctaaataattttttttgggcttcatataaatacttttgaggttttgactagaatgtctcaaaactccattgatatctcatgatcaatcttctaagcttatgtcatcgttgaagggtaatttttccaactcttgatctctgtaacaataaagattgggtgctaagcgagatttgatatgattggaccggaggcgaggaggatgatggcggagatcaaaaatcagaggtgcaaattgagccattaaagagttgttaagtgggtactaacaagattaacagaaatatataatttgactattttgctcttatttttaaaattggggtaattacttgtaacaaaagagagtgagtatatttatgctccaattttttttaatatatattataattcaaaatatttaaattttattctaagaaacattaacactacattaagggctcgtttggaat

SEQ ID NO: 188697 - DNA, 6016 bp, Cannabis indica
aaaaaaaaaaaaaaagcatccagccaagaccatcggaccccatagcatcggaccatcggactggacccatcggaccaaacccatcgggaccatcggaccgaccccatcggactgtcttcttctccaaaaaaatttgcagattcgaatccacccattccacccaaaatttcttagatctaacaaataataggtttcacaaacaatcccaaacaaaatcacaaacacaataaatctaaactttttaaaaaaaaaaaaaaaaataaaagaaacaacagggttccggttcggcgtgggtgggctcatcgtcgattggctgggtcaccatgggtggacgaagttgcctgcgccgtgcaccgtcaccatgagcacaacttcgagtttttgtgggttgaggaggctcaccgagagagaggaagagagaggctgagattaagatttgaaatgtgaggagtagttttgagaaattagtaaagtgatcatatatgaccaattttaataattatgcatttaaagaaaaaattataaagtattgtacgtatcaaatttccctttaatttataataacaagtttgttttctaaaaaaaaaaagaaagtagtcaagagtcagactgtcagagtcaatctacggaagaagggctttccagcaactcagaccaccattaacgacgtatacgagagagaatgtcgagcgacggtgaggagctggacgaggatgagcttctccaaatggcgctgaaagagcaatctcagcgagatctcgtttaccggagaccattctccggcaacaacagtaagcccgtcgccaattacgttcaaccaccacctcagcctcacccgaagaaagcctccgtccctcagatacccaaggccggtggcgggggaggaggaggagcaaaggcgagacgtatggtggacgacgatgaagattccgaggtcgaaatgctcagcatttccagcggcgatgatgaatccactgacagagatagtctccgacctggtgctctgggctccaggtctcgacctgtggctggcagagcttctgggaaggacgacgatggcggctgggatggagatgagcccgatcgttggaagcgcgttgacgagactgaggtactctttgctaattgaataaatatttaattatttcaaatataattttgttttttgttctatttgtttagttagaattgtcactggtgagaatctgtatttctttgaatgaagaaaataaatgaacttgagctagtgattgagtataaaattgtgagggagtgtaaatatcatctatgtagaataccaatttaagaaagtagcggattttcatatctcgtttggatgaaagaatgtcagaagagcgtaagctagttgaaccagtaccagaaatatcactttcttgtactggactattagcattagaagaatccttattataagtcattagtaaaaaatgtatgtgtttttggttatggtgcatttgttgatttttgttgcgtgttgattcttttatttatgtgaatgggtttctgtattaatagcatatgatgcttcccaatactgatatgacattttattttgttgtataaaaggtttggtggggatatttagatctaatgttatgatgcttctcttacagcttactcgcagggttcgaggtatgcgagagacaagaacagcacccgtagctcaaaaattcgagaagaaagtatcagcagtggggcgaaagggacttactacttttacaatctttccctcgtggcatggaatgtgttgatccacttgggttggggtaagccataattaaattccagattttattctttcttatcatgataagactattttacatcatgctccatagctggctatggaagcacaattaatatgttttcagttcattgttctaatttttctttaaaaattttttcgtacttacttgtgctcatattgttcttgtagtataatagacaacaagtcactcaggctgataactgagacatcagaaagttctccatctaagcatgaaagagagcatctagatcacgtccttcgtggtaatgcatttatgtatcagattttgaactaattgcttgcaatcttgtccctcaaatacttttagacatactgaaacattaagcacttctttttgatactagtttccatgacatattagattgtagacatatgagccctaaagtttgtagacaaatttgttagtgcatcgtgtaaattgaatatttgtttaattgtctgtggctaacatctccctttatgttaatggctgcagaaaagttgttgtatttttctgagaaatttgatgcaaaactgtttctatctcggatacatcaagatactagtgcagctgacctagagggtggtgctgtggctttaaagagtgatcttaaggggcgtactcagcaaaggaaacagttggttaaagacaactttgattgttttgtctcatgcaaaaccacaattgatggtaagaagtcttggtatatcacataagataagacctttcatagatgggctagtgtcaaggactttgttttaaactctggtttcaaagaagctgctcctaattgtgaaatcgtaagaaattagcgttttatatttgaaagaagataaattagagttatatatgtgggttttctagtcaattagatacattcatggctataagaatattgatgaatttgttcccttagaaagccgatatatgtgggaaaaagaactaaaaatcaattttgtcggtgccaataatttaattgtgcatcctcatcctcaattgttattatttattgttttagagacttgtataatcaaattttagggagagaaaaaacataagccaaattttggagactatttattttctaaataagtagcttctagcttttctacaagttttactaaattgagctttagtcccaaagtgacgtaggcagtaaggaggttgattgtggtgcacaatttcttggaatgttataatcgattggatttataagaaagaataggagaaaatgagaagagagggaaaaattgaaaaaagaaagtaggaagattaattttctctaattttccgatgtgacaaaaaaaacattagattttctgcagactttctgggttgtttcttaattaatgatgtgggtaatatctccattgaaatagatattgaatcaaagctaagacggattgaagaagaccctgaaggatcagggacttcacatttgtttagttgtattgaaggagtgagttccttggctaatcgtgcttttcagcctttgtttgagaggcaggtttgtgatacctatttcttgtttggtttggaagttcttctcagcttgtttataaacatatatttcatgaatgactgctgtaggctcaagctgagaaaatcaggtcagttcaaggaatgttgcagaggttccggacattattcaatctgccaagtacaatacgtgggagcattagtaagggagaatatgacttagcagttagggaatacaagaaggcgaaatccattgctctgccatctcatgtaggacaatatatttctatttgtttgtagttaactgtctgaaaattgttactataataaaaaaactccagaaaactttctagagaggaaattagagagactgttattttatgcaggtgggaatactgaaacgtgttcttgaagaggttgagaaagtgatgcatgaattcaaaggcatgctgtataagtctatggaagatccacaaatagatttaacaaatgtaagcctataatacacctgctgattttttgtttttcttttcttgacacttgagcaagagtaatttaattggtacctttatcccttatggggttatgtgctgagtgctgactagagtttcatctcatataagtatgacaaatgtttactcgtctttctttttggttttataaaacttgtaatcaactgctctggggatagtaggttgcattgaacatccttcaaatacgagagaacaatacaatgggccagaatattatgattatgtagttagttttattattattatttaaatttgatttagcttcctgaatggttttgtagtgacatgtttttcttggtttacaagaagaaaaattgtataattgtgtatatgcttcagatttgggctaggtttcttgatttatgttaaaagaagtttacagatgggaggtaaggactaggttttatcgaaacatgacggcacaaacgttttccctttattctaggattttttgtataaaagctagacattggatctgcagttcagtgatatgaatgagaattattttttattccttttaggattcagtgcatttcctaaacaactttacttggtttgaggctctaatggggtgttactgtctggcatgttttggacaatacaaaagaccttagagtcctgcatggaagactctttcaattctcgcaaataaataaataaacaaataataaccaaatctttgttcaaaaaaatatagtcaacaccttttctttttagccttgcagttgcaatatgtatcccaggtttccattatgttgctgtcttaccttcttcgtttgctattcctgctctctttttgcttcatgtagctcgaaaacactgtgaggctgttgatagagctggaacctgattcagatcctgtttggcaccacttaaatatacaggcaaggcaaagtttcctatcatttcacgttgctaaattgcattgcaaactaacttttatactttgcactaaattgaatttctttagtaattcttcatcaatgttgctaggttatgtagatgaagttggttagctggtgcacacaattaatcatgaaccttttgaatttgaatttaaatttattttctagtagatctgtttatacattccaaatttgtaaattaacatcagctacatggtcaccagggaacacaatgtcggcatacattagatgattttgtgtcctttagttttctttaaggcaatacagtaaattgttagattacttaaattgtagtatgtttcgttgcagaaccaaagaattcgtggtttgctagagaagtgcaccttggatcatgaaagtagaatggaaaatttgcacaatgagatacgagagaaagccctatctgatgcaaaatggaagcagattcaacaagaaccaaaccaatctgtaagtctagccattaacttttaaactacaaaacatatatgagaattatattcacaacaatcaaacaataaacaataatgctcatgaaaaaaaatccaaaatccaaacatttatttagagcattaattattgagaaaacatacctcctaaagggatattgtccatgtgagccatttgacattaagagtctctaatgtgaccatcacaaacacaagattagtggtaaatctaagagagaagcaaatgtgaagttatccccttctcctacccacattaccattaattaaaccatcttacactttatatatatcacaccctcctaacccttatggtttaattaatgttagactataatttaatgggtcaattatagtcataagggtgttctcacgtgcctctaatatatttagtagctattaaccatcccattatggttattcacattattagacacatagttaatggttgtgtttatgaaattatgtctatgattatattagtcctcaataataattctaacattctcccacttggatactattatcaaccaccataccattgtccaactcataaagctatcaactaaatcatacacaatatcatatcaataggatacatattacatatgacttggctttgaagactttcaatacaataacaatcattaataatcaaaccaaatatgcatgtggtacaacaaattgagacatgtgcattcatttccttttgtacccgtcacttcagtaaacaacacacacatataaatatgacagttgcaacaagaagtgactacaacatcattatgcatgttcaagaacacaagttataagcattccataca

SEQ ID NO: 188698 - DNA, 1095 bp, Cannabis indica
ttttttttttttttttgtatttaagcgtttatatattacaatcatatttaacttgggactcgaactcaggatctccaacaacacccacttatggccacttaagctagcctcaagtggtttcgaatgttcgggacttattcaatattatatatgtatgtgggtaaatgtgtaaggtatgtttgtagaattagcacttggtccggaaagcatatctacctatggaggtatagatcgacttggtcactggatgtaaaccctccttttgcaggtaaaaaatattgcccaatttatttcatatataaccgtatattcattcccacctgaagttcttttatatatttatttacttcaacaaataataatataattaatgataaaaagtgcttactatttcaaaaagaaaaatcagtttgtggggacattcatatatcatataatgagtatttggaaaagaaaatgaagctaaagttactaaactaactaacctctagctactatgctcttgcgctcttggcctttgtattgaagcacaacataaggatccatgtcacctataccaattttaagaaaatataactgaaatctgaaacgggcatcttttgttttggagatttatgaataaataatattgaataacatgtgtgaaaagacccataaaatagaagaaagatgaaaaaaaaaaacaaatgtaccaatgaaatcagtgtctccaagaccctttgcattcactagcaagacctccatatttccagttgccatgattctttctcgttccttctctctctctgtttctatctttctctttttgaaatttgatgatattataatactcttgagtttatgttaaaaagggaaactatttagtcagaatgacttcgtttttatcgatgttgtagtgaagactgggcagtgatgctgtaacagcgcgttgacaattccaaaatgaactacaagccacactctcctatctctcacatacacccaccagttaaaactattgttgttttgtttgtttgtagagacagcctagttttttttttttttttttttttgtagtaaccgatcaaagttaaagataacaacggtaacaaaagt

SEQ ID NO: 188699 - DNA, 7231 bp, Cannabis indica
catagtgtactatggaatacatagaaaatgaatatccccatattatttatgaacttagattatgttgtggtaaagtcaaagttaggatcaaggtcggaatgaaattgggttagggtctaaggtcgggatccaagggtcaaggccagaggtcgaggtcaacattcacaattgaggtttggatcctggattgggatccaagattaggctagagccgaggtcgaaggcctaggtcataggtcaagtccaagtctacgttcaggtctggagtcaaggtctaaggctgaggtttaggtctagggtcaagctcggaggtcagtttgaagcttggagctcaacactggaggccaaggtcgaattcaggactggatcgaggttaggatttaaaacatacattttgtttatgtttttcgaaaaattaatacaatacaacactattattcaccaaacataatataatttcacacatttattaatacaagccaatactataatactatactaaaataataacaatacaatccaacgggttactatacagcagtgtacccacacctccttactgaaattaagcaatcttttttattagagtaattgaagttgactaaaattcaaatgaagcttgaccatattcataatcctattattactgggaacttttgaactataaattacttttctattagaaaatgcatataaagaaatatatggatgtcgatctttttcttccaataatctacaactgccttatcagattttttttcatcaatattaaaatatattttacttatatattatgtattttttgagaatacgaaacagaaaaaagaacagaggaaaaaaaaagtcaaaaatatacatttttgggagtgcatgtgtgggaatcatgggatcaaatcccaggtgagtaacaagaaatatatttataaagacgcttttgatacaaggactttctgaaacaattctaaatagaattttccatttacttcaacgaaaccaaaaaaacaaccaaatacttactatgagaaatacttgggccataaatttcagaagtttctaacgtaaaccaagccattctatcctaaaataaaatcataatttatgttcacaaaccagccaaacagcactaagacaagaaagaaaagggctattttcagagatgaaccaagcaaactatcaagagatggaaatatagcaagaaaaacaaaaccctccacacccaactttcaaaaaagaaaagagaaaaaaaacagttaaacactcacaaagacaaaaacactcacatggttcttgaaagaaagaaagaaaaaacacaaacacagcaaaaaatcactcaaacaaagaaaacacacaacacacaaaacatgcaaagaagaagacaaggcaacaaagtgaaagatatcaagaaagaaagcacggacaacacagcaaaacacaactacaatgggaattcaaaaaaaggcacatatgatatagttttatttcctttgctgaaaaggggaaggcaacaagatatgaaatggcaaaactagcttaccaagagggcaattaaaaaagaacatgatggataaagaaattgtctcaatgtgtactttcaggagaatgatgtatccgacttaaatttaccgactcagactcatttgacccagacatcacagcctcacaatcctttggggatgtttcgcctggaacagacacaggaccactcatcccatcacccaaagtcataccttcctcttcattctcaacagattggccattgttggccctgctgctatcttcatctatgtgttcaccctcaaccgatactgatgcggcaggcagtgatgcattgtcaggtgacaaggctccatctgctgctgctgctgctatttctgcagttgaatcctcaggaggaatcgcctgctgctcagaggaagatatctcctctgtcttaacttccttgaagatggcctgtggctcctctgtattctcttgaccatcctcttccgtgggcacttccaactttggagaaatgagaggattgtgattctgcatctcgcaagtaggaggtgaaacaacaggttccgatttcacctcagacacaacaggcataacaggttcagcattctccacatccatcttcgaattcgaagcatctgcaatttctgtatctatagttggaaccgagtccttcaccatttctacatcagtatggacctctagcttttgagattctgattctgatacaacattcaatgttctcttggacaaaaatggtacacctattgcttccgttctttgcttcttgtaaagatccatagccctctgcaagacatgaacaacatcaaccaactgcgcaaatcagaacagaaacagtaatttttattgaaaacttcattccctagagatactgaatatcttctcatgttttaagttcagataacaattcatgatcaaggctgaaagaaatgcggcctatattaaaaagcatacgaaaagtactatacaatatcaaattcaacccaatcatccatcatagtttacctgaaagacagatttcttcacgcaaggaaaatgagaactctgcaatgtattagcagacgatttcacttcggctctcaaatggtcctgtaacataagaacagaggcagccactacaatcattagtaagcctgatctagtaaaaattaaagatagacaatagattgtgtgaataaaactcatacctttgacattatacggacagtagtctcttcatcagtcattgtactttgatcaatatttagtaagctcatacactggctatataattctggacgtgcaagttctacagaaatatcaagcttggagagatagtaacggcttaaacaataaacattatccttcgtagatttagaaggaccaagtttcttctcacggataaccttagtagattcttctgcagaagaggttgcaccagatcttgtttcagaaaattttcccagaatcccatcaccacgattatcttcctgattagacatctgaccaatctgaacggccaaaccatcatccactgtggcctcatctttgtgagatggggaacgcaagtctctttttgtatctccgttttgtcctttccacacgtccacactggattcccttgcccggctattcattggatgcctgttttggtcccactcagctgccgcatataagtgaggttcatctcggaaaacaccattgttatcccacccatgcaaatgagacggccccgaaccatccatcatattttgccaaccaagtggacgcatgggactggaaaatctgtcagcatcagggatatgatatggaatcccagcatggttaatttccaatgaaggtctaacaccaaaaagtggaccaggaaattgtgtcatcatcccttggaaacctgcatgaggtggcccaggttgaaaaggcataaagccatttggtagtggtgaattccagtttgtcacacccctccatgcattattatgccctcttcccatgttgagatcacccctccgataacgagcattagaattcatcctgccatcatcttcatgtgagcccataaaagggctgtcaactccagccctgaaggcagagtgtgaaggaattaaagatgagttgccctgattaggcctattgtaaaagttggaatcattaggagacgattcatctgccaaaggcttctctgatggtaagtcccgactatgtctatcatcagaagcaccaaaatctctattatcaatagaagcagtgtttctcctccctgtttcttcaatgtcaagactccgcctagcacccgatctattaatgtacctacggtcaatacttgaagatgaaggagatctttctatcaaacccaagggtgaagctttagagctagaagacttctcatttgacacttctcccaacagagtgtcatccaatttagtggatttctccatggatctgtatttagggcctttttctagtccagtagaaaaaccagatacatctttagaaggaaatcctttggacctgtagtctgtcaacgactccctgtacttcaaatcatcagaatttagatgcctgtgataagaaaattgatgaaaagttactacgggtccgaatgagtgcttcatgaaagaataatgaaaatttatcctccttaaaacattagacactaatacaactaaaaatcacataagaaagaattcaagataaaaggctggggtgccaataagtgaagaatccagaactaagtaacatagtaaatatcccttgtttcattagccacaatcaagacaatcattaaacttgatcctaccataaagttagatctaatgaaataaccatttacatcttggtaaagacatttctccaagtaaatacaaatataaggtagaaagttcaaaatcggtcctctaacatatgatctgtatgcatttacagaatacaaatatacaaggattagtgacacaaaatggtgataaaaaccaaaccacagctttaaatataattttttacaatgactgcaaaacttaaatatcaattgatccataagaacctactagttactgttctaagaatgattatccataaaaatatactaatatttctggagaaggcaattcaataagagagaaggcccttaaatgttgaacggttttagcataacaaaatttaacgcctttactattcatcaactaaaacagtaatgatacagaaactgcactgtctcttaaaataatggatccgttgaagaagaagggctgttctataattattcaattcaaatagtctgacagcctctctattaaaataacttggattgttaactctttcataaggaacttgtattcaattaccaaatattatcacaactttacaatacaccaatgttaaaagaaaaaagagagagaagtacctatactcatcaacaccaacacgtggactggagctgggggatttcctccgcttttcattgcttgtcacagggtctaccagagtttgccgtgaatgagatcttcccttattagcatctgaatctaatcgatcaccacttaaagccttcttttccagatcagagtaacgagctttactacctctagatggaaaatcactgatatcatcacggtcatcaggagatcttttctttgccctggtgctatctttgtatctagaagctcggtcatcaagatgtgagctaacatagtcccgatcaaaatcatggtcatgatctcgatcatagtccctgtctcgatcacgctcacggtctctctcacgttctcgttcccgatcccgatcccggttgcgttctcggtcacggtccccatctcgatctcgatcacggtcccaatcccaatcatgatcacgatcataatcacgatcgcgaccacggtcacgatcatgctcacgatgtcggtcacgatctctaacagttaattcacgatgacgatcacgatcccgatcattctctttagatttcttattttgcatttctgcactgtccttttcatccttaacatgcttatcttcagatctgctgctaagatgatcttttgcaggacgctcatcctttggcctatcatcacgatgcttgctgtctctatcaataatttcttctcgatacttgtctttgtatctctcatccttgcgcttctcatctctctgttttccatccttgccagtatcctccctggaagataatcttctattgttgaactctcctatatcatcttgatgcttctcataatcaatagaagaatctcgttttttcctcattcttctttcaagcaggttatctggttcaggacttcccacatcaccctgagcatccaaatctgcaacaccacattgttgttaattacatatataaatacatacatctacatatctacagctacaactgtcatatacagcaaaggagatctcttttcatttttccccagtgcaaaagacacgttagccatagaagcaagttatttaacttctacttagcaccaatcaaacataagaactaaaaaaagtccattaaaataacaacaggttaaagaattaaagaggatttaggcacatgattttgtcaatgcaagacctcaaggggaaagaaaagagccacatgtaggaacgacatcattatagacatggacctaaattgtaatcaaatatatttattaaaaaaaaaaccaaacaagaaaattgcccagaaaagaatatacggtcttccaatttatagggaggactttaagggaacaataacaatactaacaaggcaatcataaataagcagaatcttcatatacagggctagagtagacatttcctaaatgcaaaccctactgaagcacatttcttttttaaagaagcttaaggaaacatcatcacatacaataaaaggataatgaacctatggaaatatagaaaagacctgtttagactgtactagaatagaagaaaactaatagccacctcagctccaaagtgaatttgtgaaaatacagctagagcctaatttgtaattaaatttaattttatattgccaaaatatgtccacttcaataacattaggaaaataaaaagagaaatatctaaagaaaatatggattttcatttctgtaataatattggtgtatataatcagttcattgactactcaagacttccaatattaaagagtaacatgcgtacgtgaattccattaaaaccgacacatctcgtacagtaataaaatgagaacgtttggatcagagttgataacaccggaacaaaaacatataaaaaaacagttgatcatgtaaacaaggaactcaatgtcagttcttctactaaattaacatgataccatccataacagctttacaaaataaatttcagcacataatttttttcaaaagttactttttttatttaagtttataaaccatacagtattgataaatacagtgcacaaattttctttttcatccttaatattaggttgtcaccataacaagaaccttaactactcaaaaacttagttataacttaatacattaacaaaaaaaggcatagaactatagcatgtaccttagtttacattctaatattcttggtttcaaacttcttattgtcagaaattccatgtgctcattttgaattctcctttcacatggaatccaacatttaaggtataagtgttagagaatgtaggtgatgtaaaaaaaagcaataagtcaagaaagctacttatcaagcggggacgagagagagagactccaagcat

SEQ ID NO: 188700 - DNA, 1232 bp, Cannabis indica
cttgctcagccgcagagccaatatcgacgctcgagatcgatggggcagcaccgtgcgtttgtttccttttctctctacattactattgcctatgttatattccgtttcatatctcatatctggattggacaggcagctgcagatgccaaatattatgggaatcaagaaatttacaatattttgagagctcgtggagccaaagttccggtacctatcatcatttcaattctcaattctcatgatgcctattattatctatctattcagccttacattttcctttttgtttttgtctctgttttcttttttttttttcctttagaaaacaaggaagacacccatggctgttgcaaatcctcgggaagttcctgaatacgagcttaatccgttagagctccaggttcggaagagtgatggaattacaaaggtactgttcatttgtcaaattgtttcaaaaaaattgaacattattgtttctttctgcggatcacgagcattgtcgatagagagagttctatttttcttttggtttcttcaacattatactttactatggaacaaatgagtaaattttatttaaaatgataatcataataatttggagaaacatctactggtaatattggtggtacaagtacatttattttattggagttgtaacataaatggattactatcttatctacatcgtttcagggaacatatcaagtggctaaatggaatggtacaaaggttgctgtgaagatacttgacaaggatacctcgtcagaccctgaaaacatgtaagtctaaatccatccaacttaccatattacatttcgcaggtgtagcaatgtaactactaaaatggcgtaacaagcagtagacatagatgccattgtacatctgatttttcgttttttattctgacagaactgccttcaaacatgagctaaccttgttagaaaaggtccgacatcctaatgttgtacaatttgttggcgctgtgacccagaatatgcccatgatgattgttttagaatatcatccaaaagtaagcacacacccaactctttttctctccccacatctgcatacccacacatgcacactaatgcaaatattcttttcttataagaacattgatagtaatctaatgaactcactgaaatgataaagagatggaaagaggaaaaggtgtgaataattttctctgtatataagaacaggaaaaaaaaaaagacaatgtaact

SEQ ID NO: 188701 - DNA, 3515 bp, Cannabis indica
aattgttaatttatataacatatcatgcactagcctcagctactactgagttagtttagcttcactcactactcacaaaaattaggattcgagtttatcatgtgacaccaatttttgtggtgtgacaattaaggtgctcaagcatttccctcaatctagtcttccattcctgcacaaagtacatagaaatcgatgctcattatgttcaacatctaactgacactgttgacaaaaattttaaagtcaaatatgtaccattagatgaacaacctgttaatcttctaactaagcctatttcatctcctagacttgagtttctttgtcacaagttgcatttagcttactctaactaccacttgagtggggttgctagacacacattggaaactaacatgagtaagttggattaattggaagctaattacttatttgttagttagcttttcttattagttagtttcctattcagagctccaacaaagtcttgttaaagttaatcaaaatctctttgtataaatattcttattttttatgaatgaaaagcaagtgattcattgtatcaatatctcaactcaagaaaggtgcttaaggctggtaccaaacgattgccttttgttatgctcttagtggggaagctacatattgtctgaaatagttattgaagctatcaagagattaaactcgaggtgggaaattaataataatgtagctcagtgtaggagtcttatgaacactattttgggatgtaactattcaaatgtttctagatcttttaatttaattgctcacaatatgactaagtgaattttaatcaaaatgaatgtaactagtaggattgagacttcctaatttagataatattgcttgtaatggccacaaaacctttccatctatataattacgtttcttttcaaacaaaaaataaaagaactatacttcacgtttaactagtgctaaaaatgctactatgagatataagttaataccaataatcagaaattataccataacatgaggaaaaggcattgaaaatcaagggagcaaagtcatgaaaatgtgaaactaaatctaaagtccaaacgaacaataaggaaccggttgctgcgggtgtggtatcatcgacttatgcttattttaatcaatgggagttagctaacgctcggtctcaaagtgctacctctgttgataacagagtagttgaagagcgttggagtgttcccgaggaagatacgattaagatcaatgttgatgtatccgtcttcactttagcaaatttttttggtatcggatgggttgcaagagattattttggcactttactctttgttattgctattcgaaaactaaggtgggtggaaccagtttgtgccgaggttgtggggttgaaagaagtcttgagttgttttccttagattgttgtggaatccaattgtcaaattcttattaattgtctttatagcaccttgaatatgccttcctcctttggttctattgtggcgaaagtttctttgtcaagatttattttcaacttcttgtgtttttgttaaacgatctgcaaacaaggcggccaattttttggctcgttctgcttgtttctcatcagatcatagttatagtggggggcttgtccctactgatttgcaagctattctgttagctgatttacatgaataaaatttacacactttatttcaaaaaaaaaaatctaaagtccaaacactatttagaagtttgtgagtaagccaaaagtaagagctaaatttaaatacgcactgtattttatggaaagatttttttcggcgatgtgcattcaaaatgccctcatgttcctatgtatgtgcacaagcacacatataaaacatgtgtaatacacctaaaatatgtaccaaaacattatagtagtttaacgaaagatgttatatcaaaaacttcaagttccaataaacgaaaaaagatgatactctttcatgaaaaacttcaagtctcaaccttaaaaattgacaaataaaaaacagtaaaataaaaaggttcccttagcatgagcagaagtagtttaaatagataatctcatcagagctgaagatccaaatcaggtggctgatcagtgtcgttcaagtacagtagttgtggatccgggtcatcgtcaactctttcatggaggatattgctaccttcattgcataatggctttagtatccccaactgacatgaagacaaagcaggagcctgcaaactcataggagtgtagttccactggttcaatgaattgtcatcattatcaaacatcattggaaaactgctgactgtgcctccctccaacgcctgagcataattcccaccatagttttggcccatcattgggtcttgcaaattatcaagcccatctgattggtccaatgtattaagctgatcagtagtatcagaagatgcaggtgaagggtacagaaacttcactcctttagaattactaaacataagagttggggacaggtaattgcttctatcaacaaaatcattaagccttgacttccattcatcagtggagacttgatcaacactatccaatgaagtctgttgaactacttctacttgtttccctttctgcagcttgttattatgattcataatattgttaccttctgccagcatatctacagtcctgaacttggtttttgtgctaaaattaggagtgtatggaccaccatcgtcataaactgggatcacccgaaaatgtgaggctaaccggcatttgttttgactagtattctcttgttgaccagctgcattttctctgagaaaattgccagagtttttttccattttgtcatttaagtcgctcgtcttagctactgatttgcccatcatagggtattttgtatttcctcctccattgactgcaatgctgttatccaatgtgaatggtatttgactagaattctcctgttgactagctacattctccttgagaaaattcccaggacaaattcctcttttctcattgaaggcacttatttctgcaaccatttttcccagcaaacgatgctccgtatctttacctccattagatgcagtatatttatcacagacgaatggcacttgactggtattctcctgttgaccagtcccactttcgcagagaaaatttgccacgttctcagcgaaggcacttgtttctgctacagtttttcctttcaaacaagaactgtcatcattctctccattggctgcatcgttaataaatgggatttgactagtattttcccgttggccaactacatttttccagggaaatttttcaatctttccattgaaaaatacttgaatacttttctctggtcgatcagctacattttcccaagaaaaatttccaactttctcactgaaggcacttgtttctgatactgcttttcctttcaaccaatcactgttatctttgtttctgttcgctgcaatattatcatccagtatgaatggcatttgtatactattctctcgccgatcagctacactttccc

SEQ ID NO: 188702 - DNA, 1204 bp, Cannabis indica
aaacttggagtccttgagagttgaagaacaagttggtctctcaacattgacatcatcttcagcagtacaaagggcaaccctggaagattttctcttggcagaagttggtcttgagtgcttaaaactaggagtctttgttaaagtcctaacaagctttgatgagcttgataatgctttatttgaagtttttccaggttttttggtattagaaactgaactaacaactttcgaggtacttgagttcctaagactcacctgagattgttgctcttttctggcatcaaaacagctagtggacttcatataattaggggagccatatccagtcttgattgttgtcggctgcttgtgttgtgttggaggctttcctggatggcatatgtcgacttgtttaatgatcaaagttgaagttgatgaagatttcatgctgtgatgatcaaaatcagaaagcttgaaagattttgatttcttcatcatttttgtcttcaagtcaggtcctcttcttttcccatcttggtattgagacgaaaaagtttttcccaagctcatcaatagcttccgatcatggttcattgaacgatcagcttggattccaagcttatcgggaacctttctctgaaccatattccaagaaagaacaatgaccacaagctaaagacaagtagagaatttggtttaatttctttccttagaaaaaaggttcaaaaagctgaggagaatttagtttgtgcttttgggcatgttggatttcattggaaagaaaggagattctttggaaccaaaacaaccaaatatcttcaattctgatacatagctgctgcttctttatttttcagaaatatatagttttttagtattataatatactgtcttccctttccgaaaaaaaaaaaagtattataataactgtatgattggacgttctaacttaatctttattagaatgacagaaacaccctatattgtttagatgaggatatgcaagatgttatatgtaaaatcttaactaaatgttcaatcattgtccagagataagctctactggagcccattgcaatcctcatcctataatgtctcccaatattttttattattgaattaaagtgggttcatattaattaaataggaattaaacgctataaattcgatcgatggagagaaattgattaacaacataaattgcaataaaaataattttagaaac

SEQ ID NO: 188703 - DNA, 1445 bp, Cannabis indica
cacactcacaaacaaaccagtcttcttaagctgaaacacaataacaacctccaccacaagtttactttttcatggggtttgttgaataaaagttgcagacgtataaggatacaactttgtcactttatgtattttaggtcaaagaggtgtatggttaatttgattgttgaacatacaatgttagaagaatccaagcactcgtccatgtgaaagcccagaaagaagagagaattatgaaattggatgacatagaaactgcactcttcatcaatattcttcatttttttatgtctatttgtcttcatgatacaagttattggttttgattatgttttactgatcttgagtctcgactgcatgaagcatgcccaataggagataacaaatgaagaacgttatgagaaagccaaataagaatgaacggataatttttagattttatgtgaagaaagaagtcaaattcatcatctaaatgctgtcttcagtaattgaatttttcgaaatgacatgaaaatgaatgatgtttagccattatcttgtgtgggtttaccaagtcacaactcagaacacaagttttgacaatttgcaaatttattctcaaatatttattcatactcatgagattgtgaaaattgttttgctgacattggttaattcatgcagtgtttgttattcacaaacataatttttcagcttgtaaccttgctattgatgtttttctaccagccaatggcattcttatttgtgttatgtcggttaaatctctttttatcaaggaatttaaacatggagaaatgtttttttttcttataagatttttttttttgtttttctcttttggcttgatttctctgcagaaactcgagaatcaggattctatcgaggaaccacaatgattttgaatcaacaaccagagttcgaacttcgaacttacaacatttatggtttttttttcttgtacgagtatgaattagattttaggtgtaaaaacctctgttaatctacttggttcaattttatgatgatttgaggtccttggtttggatctaatagactttgagtatagttcttgggatcattttttaatttcactagatattcttttgtccagaaaagtatatttttttggttgttgttggaattggagaatgcagtgctccgtattaatgcatataatcaatgtttttgtacttagtatacggaagttaaattttttctcaagaacatttgattttgattacatgtttcatgtttgtggtatatatctgtatgttatcttcattaggtaacagcttttactggttactactaggatgaaaaaagtacacaaacttttcacattttgtgtaatcttgaaaattttacagaattctgtcataaaaagacaagcacatcagaattgtcataataaatagcaacaaaattaataaatatcaattatataa

SEQ ID NO: 188704 - DNA, 2479 bp, Cannabis indica
tctatcttttattttttgtactctctcattacttttgttgtactttctcattatattatttattatacatgagaatacaaattaaaataaaatactccttagcaaaaaaaattaaaataaaaatcagtattttcttaatgcttaaaatataaaataacccatcatttctcgaaacatgaaaattatccgcatatcgtatatttgcctgataatttctagtcaaactttacttttatcttctttaaataccaatggtacccctaccaagttaccaatacaattttttaaaatactgtttggtaatattttatttttaaaatttttaagtaaatttttaaatttttaaattcttatagttaaaacaaaaaaacaaaaatttgttatgtaaatttcattttatttttatttatttattttatttaagtctattaggattagttaagaattagttaattctattaattttctatttctacattttggcttttctttatatgtatacgtaagattcttcattataccattccattaattccaattaataagaaaaattctttctctttctgagtttctaatatgttatcagtagacacaagctgaagctctaagaatttaaattgtagcttcaagattttctcctctttttcctacaatcatggcgcgaacacgagccacgagttcagctactatcactgatgaaaatctttccggggtcgaagctcccaaggttcatccaccattaacaatttcagctgaaattcctccaagaacagctgctgctgctccaccagttcctcattcaattctgatcgacagactagcttatgaggatgttcgatctcctaactacctcagcacggctgatcatcctggtttagcactagttacacctgtttttacagattgtaattttcaaccatgaaaatgtgacttcaagctttccattggagcaagaaacaaaactcttttcttgaaggcactcttccgcaactccctattaatgatccccttcttgattcttggattagatacaaccaaatagtaatttcatggattttgcactcggtctctcttgaaatcaaaagtagtatcgtgtacttagacactgcatctaaaatgtagaatgtcttgaacaaccgactcaatcaaggcaatggcccacaaatttttgaattaaatgaaactctaacctatctcaatcaaggagatgattctgtcagtgtatatttcactaagcttactgctatgtgggatgagatcaaccagttgaggcctcgtattccctgtacctgtgctgctgctgctcaaaaccaggacaaccataatcatgatcaggttctacgaattctcaaaggtttaaatgattcctatcatgttattcgtaaccaaatcttgcttatttatccatctcctccactgaacaaagttttctctatgcttattaaccaaaaataacaaagaactttgggtaatcgaaccattccaccacttgtagcaagcacttttccttttgtacctcaaggtcctgctcctacagctaattcaacttcaagaaacaaaaagcatcgtccacattgtaccaattgtaaaaaatcaggccattacagggataaatgttacttcctaattggtttcccttggttatggtactcgaaagcctaatgacaattctactaccaacatacacaaaccagatcctggtccactaaccagaaatcttcctcaaacatcacaagtttctagcatcatacctgaccattctaattcacaactcactctagctcaatgtcatcaacttatctccatgttgacccaacaattatagccttttacaaatgcttcaacattgttgttaataatttctcaggtattacttatcctctttcatggattatagatagtggtgcaactcaccatgtttgttatcatcttaactttttctcttccattcaatctaattccaaagctacttatgtcacattacctaatggcactaatgttagcattcaaaaagttggtactgttacacttaattcacacatcaccctcacaatgttttatttgtgccagattttcaattcaaaatctataagtgcacttatcgacaatagtaagaacttcatatgttttactgctaataattgttacatctaggacctttcttaaacatacaggattaggacagctaaaagctttggaaatctatactacctgcaacaacaagctcccaaagttagtttatccatacatacttgtaatgttcatttagataaactacaatggcatactcaccttggacatccatctgtaatggttactaataaaattaataaacaattacaagtttttaaagtatctactccttttaattgtcgaacttgtcatattgcaaagcaaaaaaaaattaccatttcagtcaaataataatatttcttttgcaatattcgaccttgtacacatggatatttagggaccatat

SEQ ID NO: 188705 - DNA, 871 bp, Cannabis indica
aaaacaaagaaaacaaagaaaaatgaaaagaaactatcgtttcataatctgttttagaacgaaaaaagataattagggaaaaaaaagttgaggttgatagagaaagtaaataataatcttatcacctatctttgctcaaaaaaattaaatcacattctatataaattatattatttcatgaagaggaacaaacatataaattatgtaagataaaagaaaaattataaaaaaaaataatatgttaaaagggacaataacgaagaaacaaaaaatatgacaccattatatattatcatatattatactaaccataactatgaagtatagatcaaaatttgttttaaaaaatacaaaatatttaagatgagaatgagaaatataaatctatatatgatatatagtttatatataacaataatcaaaaaaaaaaaaaatactacatagagagtactaatatatgataaaatccatatatatattaactaacctttgtatctttagttagttagttatttttcaattagtttctttaactaacttctgttgttttgccttgtaaactctgtatataaataaagtgatttgtgctcttttttgagctaaggctttcagctaaatctctttctctgtttctctttctctctgatttttctctctggtttttaccactctagtttagcttgataagcttctacatggtatcagtcgccttcaatggagtcttcgattccaccttccgatcctgctcgtcagacagtcacaacccctgcaccagatctgtctgctcaaacatctgattctgcctcttcttctacgtggaacccgttttccgagttctctctcaacctctctcacgatcaaacttgatcgt

SEQ ID NO: 188706 - DNA, 898 bp, Cannabis indica
ttttttttgtaaaggggatagacaaacatattaaacatatatataattataaaatattaaataagtacgctctaattaataatattaaaccacacaagcaagtttaagcactatatatatctatgaaaattggctttgaacgagacaaaagtgacgtttaagcttacaatgcattatatgtaattgatacacatatcgtttcatgctttttcctatttatatttgaatgtttccatttaaagtattaatatgtcagaatgctagctgattatataatttggtaaatacttcacaattgaaaaattgtagcttggttaatgcctcttatacgaatttcatattttgattaagaaataaatgtaagaatatagttgttttttagcttaagatacaaaaaaaccttaattaagaaagggaaagttcattaattaaaaatatcaactatttttttttttttgaagaaagaactactatttttcgaagggtgctatatatggaccattaatttattatattagtgacaccgtaccaaataaatttatacactagaagctataaaatgagaagtaatttattaagtaaaaaactttaaacgttgctgagatgtaacatatattatagaatcaccccattatagactatcttttaattactctaaataacatactactaagttaatgttctgcaatttagtcctccatatatattattatatttcgagaaaaaaaaatctaaagctcataattaataatgtgcactgtataaaaaagtattgagaaaacgaaattcgaactcacattttaagtcttttagcctaatttctttgagttgaaaagactactaaactaaaactccaatatttaagttctaggctcataatattattgtcctacaatat

SEQ ID NO: 188707 - DNA, 3141 bp, Cannabis indica
tgcaccttgttcaatgcaatgataatacctgtattcctcatttttcaaaagattacatgactcaatgtttgtggttctaagccgtgcatatatccacaccaaaatcgcaatatcacataaccctgaaccccttgacctcaagtttgtgaatgattcgtgccaggagtatcataaccatagccccggcaccttagagtggcatcagcttttagttccttggttcggtcacgtatgttcgctgcagggaaatatgttgctccaatttgttgggtaatacctccagcctcaccttcttgaacattagtaccacgaatacaatccaacagcttagttttaccagtatcaacatgtcccatgatgcagcaaatgggtgaacgaaggtccttttcagccttaggtgtagcatctgaattttgtagttgcttttttgaccgttagcatttttcgtcttctttttttcagtgacttcaggctctggatttttcttattgtccacatcctgagattgaacaggcttggtgcttgcaactgcagaagaggctgcaaatattgaaaacccagaagagtagatgatcagttgtcaaaataaataaaacactagttaaaaattacagaaccacaaacatctgaaaaacaaagatcccatttcaacaacccattgaagctccatcaaccatccacaacaccttattaaaaccctaattaagcgtaagtcaaaaggtaaacaactctaacaagaaaaaagaatgtgtctaacaatttttttaaaaaaaaataaaaaaaaagcgatcttggaagttataacttataacatgcttaaacaatgaaaactaaaaaatataataaagccagctaaaatcctttacaagaactgattagatgcataaacttttcacccttttaacaaaaaaatttgatcatcacactctgttaatcaaaggaagctaaagcttaatattctgacttgaatgtgtgacaacgagatatcataagatagtaaactacatatcatggaaaataatgcaggacacaaatagaaacgccattaataatagaaatttcacaagattggatccattatcggttcaaattcagcaataacaaatttaaatgctctctagaagctataatcctgttgttaatggaggtttgggaaagcaagtatcaaatgccaaaaacatattttactatgttcgtacactttcatttttgtgttactccacctctaggctattttggtacaaagattaaaatcttatgatagtgagctgtataaccagctcaaagtttgtttcattttcaataaacagttcaaagttagtttcacaacagaactaacttgtaatattactcttatttatcacttggtaaatagatatcctaattaaaaataaagatcatgtgtacctgtgtttttcactacttttttaggagcaactttcgtctcagagtcagcctcctcttcatcagcaaatgcacttactgaaatattaacagtggcatcatcccagctctttgcatcccactcatcatcatcttcttcttcttcttcaattccattctctttgacagactcagccacttcagatttctcatcaacatcatctgtctcctcaaccttctcagataccacggaattgacctcagaaacagtttctggttgagattccttttcctcagtatcttcaactggcttagaagaacctgcaccattaacttgatggggaattggttttgacttctttttctggtataatggttttttaactcgtgcaccagtgtcgttggtaggaataggcaccccagcattagcaagtatttgatttctcattgcctccaacctacgagcttcttccttctgcttcccagttagaagcttgccttccagtttctttttttgcaacttctccttttccctctccttttttttacgcctggcctcttcagcttgcttctcaagctcttcttgcttccgcctctcctcttcttccctcctcaacttctcctcttcttccctctttgccttctcctcagcttcttttctcctggcaagtgcctcttgcatctccctgacatgttttggcagttttttgtcagcagctttacccttagattcattctttttgggttctgctgcttcagttttcatttcaattggcttttcaacttttgtttcaacagaagcagctgctgctgctgctgccgctgccttcttctccttttctttctccttcttctttttctttttctttgcagcagcagactctacattctcttcttcaccttccttttcacctaaatcatcaacaggaccagctgtttcaggttcaacctgaactttctcctcttgtgtaggagctgcagcctttggtattggaggtgcctcaccaagctcagcaagaattttatccaaatcatcctcttcttgttccgtccttcctcccttcttcttcttctttttattctttgaagttccagctacctcctggctcttattaactttagtcgattcatcagctccattattactatttccaacactcaatggttcagtttcagctgcatctgtaacttcattgccatcaccaacttcttcgttcaattgagaaaaaacactgttacctttctttttagaagatttcttcttacccgaaaatgctatgactgaagcatcttcatccacaggcacatcttcatcaattccctcatcgagtagtactgcattgaatgaactaccaccacctttcttagcagccttagatgacttctttttcttaccagaaaaagcaatttgagcaaactcatcttcctcgtctttcttttcatcctcaggttcagcctcatcttcgagagcatcgaaaccagaggcagtaaacaaactaccacccttcttcccacccttagatgactttttcttcttccccataatctcaataggggcttcctcatcatcatcaaccacttccccatcattatcatcatcattgtcatcatcaatagcatcaaaaactgaggcagagaacaaactattaccactctttttcgacggcttcttcttgccagaaagactcactacaggagcaacatcctcctcatcactctgaactgcatcctcctgtttatcatcatcatcatcttcaa

SEQ ID NO: 188708 - DNA, 5738 bp, Cannabis indica
aaaaaataaaaataaaaacaaaatcaaagaaagaaagatatggaagattcgagcaaatcaaggttcaagaggatttgtgtcttttgtggaagcagttctggaaagaaacctggctaccaggaagctgctgttgacctcggaaacgaactggtacatatacatatatatatatatacgtatatttcagtatatgctattttcattttcattttcatgttttgaaccttctttatccattttattttaaaacccaacattcctttttcctttttccaaatgattatttcatttcaagtacccaatagtttttttttttcattattattagggcttattaagtttcatctttaactatatttctgctaacttcattctctctttctttaccacctaaacgtgtagggtttaatgatctatagagacttttattttatttttttgttttcatttttttttgggttcatgtgatcagaaagagagagaaatagaagggattaattcaatataatgctagctgtaacctttctgtcaattgaattgttgagcagccttcttgcatgatctcttttttttccttttttaaaatttttaaacatacattatgctaattttaatttgtgatcacatcaataatattaacgaatatatatagctagcattgatgaatattaattttcaacttgacacattaatacagcattgatgatttattttcatggggttaaatgaagaacattaatttattattttttttactcatgaatagaacttagtactgtatcactactctagcttagtagggttatgtatgttgtaataaattaagtacaaaaataattattaccctttttctcatgatgggttgttgacacgtggacttaaggggttttattaagttttttttaagttttttttttggaaggtggaaagaaggattgatttggtgtatggaggtggaagcgtgggattgatgggtcttgtttctcaggcagttcatgatggcgggcgccatgttctagggtttgtctcactctctctctttctgtctaatcttggagtttgagttttatacaagtaaatgaaaagccatgccatggcatgatgatgggttttaatattgaactaaattaattaaatctataataatattaattaaggacaatattgtgtttgtttatttatatatttggaatttagataattattttgttacctcttgaaccttacaaaattcttctcaactatctatgaaagtggggctcttcttatcttaaacaactcaaatatgggggacagcataggatcaaatgctgggccagacataataacatatgcctgcgcatgttcctaatatatattttttaaaattgggacaaaattgtctttatatattctttttgttgttctttcctaaatgggtaccaaaagctaaatattgttattagttaaaagttgaatccattttgatctttgtaatgtgtcagcaccacaaaactggaatttaccagttgtaattgtaaagtggtcaggaaaaaaaaaggttttggaaagtttgtgaactttttagtgtaactttctctttataaaatttcccaaaactttgtcaaaagaaagatatctatggccattatttttttttttatctctttcgtacatattgtgatttttgcaactttataataatgagacaatttctaacttttagtactactcgtgtgttattaatttgcagggttattccaaagaccttaatgcctagagaggtacatatactcaaactctctcaaaagatttggataaaattaaatattctcttcattagataatatttaaataatcatcatcattagtagtattataattaatttggaagtgactaagctaattaatttaattattgtgtacagataactggtgagactgttggagaagtgagaactgtaactgatatgcatcaaagaaaaagctgagatggctcgtcaagcagatgcattcattgccctccctggtatatatatctctctatatatatatgacatgtgatatgatgtgatatatattattatattgattttaattaatttaagatcaatttggtaaaatagacaaaatatatagttaatgttcatgaatatttttatcaggtggatatggaacactcgaggagcttctggaagtcataacatgggctcagcttggaatccataggaaacctgtaagaacgaagtttcctttatcttgttatgtttgaccaatcacaattatatcttaaaatgtttatttatatatatatatttaattaatttattaagatgatcaatatgaaaggaaactatatatgttaagttatagtagttgacactttaaagaaaactatattttaaaatgaatttggtaaagttaataaacccctttaaacatggctaaaaggtatagatagaagaaacaaaacatctaacattattaattataaaaatatagtttccatggtttaaagaccttaaaaacacatcgaagctttcacatggggcatgtttcatgttgttcaactgtaattattgatgatacacaaacaaattaataataattaataaaaacatttgatgttcctctcagctaattaaactgtatctcacaaataataacttagaattattaaacaatatatattccaccgtgttcccttgtctccatgtggaggtgatgttatcatacacgtatgatttgtcatgctttccaagtacacgccttcttttttatttttatatgtttttaataattaattaatagcaacatatatacaaaccaaagtttgacgggtcatcgattgcaacctacctatatagaaagaaatcttagtgagtgggatgtatgtaatatatatcataaatcataaatatacatgatattataatgtatatcatatggtattattattattattatgtatatatttgtagaatcattgcatgtgatatttaattctaaatatcgtacacatgaaaagattacttataagatatgccaagatttgcaatttaatcaaataaagcattagatgatatctctcttttatatttataaggccggatactaaatatacataatatgatgtataaatgaatttgatatttaaagaatctccatttgaatgggagaaaagattctcttctaattaattacacgaaaaagatatgattagttggtttattaataaagcggttggatatatatatatatatgttcttgtatgcttaattctcaaacacctagaattggatattttaaaatatttaagttaatcttactaatatatatgtataggtggggcttttgaacgttgatggatattataattcgttgctgagtttcatcgataaggccgttgatgaaggctttatttcgcccactgcacgtcgtattatcgtttcagctccaacagccaaacaattggtcagacttcttgaggtaataataataattaaactcatctattatatatatatatatatatattcttgaaccctagctaactagcctctcttattatattaaaataatatttaaattgtaaatgattaactcctgtgtgtgatgtgaatcaattatttttttttttctctatgtactgattcttattatgaggaaacacaatatttatctagatttgtttaagagatgaataatgatagggtttaggtacagcgacaaatatatgtataaatattgttgaccgtatattattttatagaatgttgaccaaatatataatgataagtcccacttgttcatacatgcctagtctttattaagatttattattataattaataacttggaatttggtgaaaaattaaaatttgtgaatttctgttttattatctcaggaatacacaccagagtatgatgaagtaacatccaagttggtgtgggaagaagtggacagactaaattatgttgctgagtcagaagtggccacataataattatatgtaaaaatgtccatgttacgtgaatcatacatgtcttttttgggtttcacgtacgtaatatatacttataaatatatatgtagttattatcattatatttattatattatattatacggggggctcaccgtagttctacagcttaggaagtgatctggatctttttttgtagctgagccacaagtttgtgtattgatcatatatatatatatatatgtactttgtctcgaaaagagaaaaatcaaatgcttgtattgcttggcctccattttgtgaaggtgtcatcaatattgatcaagatcatgtttaatttgttctgagtctcaaaattcatgttctatgtatatcgaccattttatgtaaataattattgtttatcttcattgaatcaaagttattaactcattttgtgagatttgttgtgatcgaaccaatctaacagcttaagaagtttactaacacacgagcacatcaactagatgaaaaataaagtgcagaaattaattaaagaaagataattatgatcagttcaagttatatacaatgttttacattttggtagaacagcagcctcaaatcatcctggatcaagtttcagagaatattacaagtagtacaaacaaagcaaaaacacaagtaagttacaagaatgacttgtttcacttgagtatgaactctcttttctctttctctctcgatctctctgtaaaaattacaagaatggataaacaaatctaattcatctaactctttccgagagctaacaaccagcttacaattccacttgtccaagttagtaccaactaacttcactatagcttttgtacggtaacttgtaaccatatcttacaaatctccaccttaattagagccaatcatagctcctgtcactgtccaatcaagcccagagggcttagctataacccaaacattgacccattccaaacagtactcaaattttctgcatgaaaacaactttggttaacatgttgaggggttatctttaataagaatttttgcaatattgatagctcctttctccatattctctcttataaaatggaacttaatatcaatatgttttgttctttcatggtgcacctgatttttgctcaactgaatagcaccttagttgtcacaaaacacagtgataactttctgttcaattctgatgagttcttgatcaatcaaactgttaggagagttgaatctccttgacattgttgaacatgaaacttaacaagaacaaagaacaaagaacagagaaggaaagagagaaaggtagaagaaagagactgaaagattgagtgaaagagttcattacttgattatcagttagtacagtatttatacaagaagatagagttcaactgatcaagatcagttgtaactgaattgataacaaccataacagaatacaccagttgaagcaacagtaaaaacagaattaactgtaactaactattagactaactgactactcttaacactcccccgcaaactcagcattggttgtgtcaacaatggtgagtttggaacgaaaagcagagaaattctgaggcaaaatggctttggtaaagccagctgcgagttgatcgacggctggaacatgcttgactgcaatttgatgactctgcaccttctctttgacaaaatacaagtctaactcgatgtgttttgtccgagcgtgaagaacgggattcgcaatgagtaagacagtgctgagatttgagccaagcaagttca

SEQ ID NO: 188709 - DNA, 1542 bp, Cannabis indica
aaatagaaataaaccaatacataatttctataaaattaagcaagatttagttcatagtatgaacataagaaaatattcattcaaatcaaaagtaaaaatggttggaactctatactctataagatttgaactcttgacttaaacttacaaagtacaagcacccaccaataattctaaaagtaagagtatttattctcttcataaaatattaagtactgtttttatctccacactacaagatgtttggtacttcttttcttaaagaatggtgtatagagatttagatgttagtattatagttcaaagattagtccaagaaagaagtacaaccactaaaggagtgtttggtttgagttcttgatataaattttagtagagggttaatgattaagtgagtttcattttaagtttatttaaggggtaatctcaaactccttgagtcgaatacttagatttgagataaaaaaaagaagaaaataatgaaatagaattaattaatttttacactttattaaataatgaaaataatgagatataaataattttttttttattctgcattggaataactattacactttattttgaaatgtgttatactatattgaatcatgcgttttgtaaaagttactgactagactctctattttgttaaatgacaaattaaattatgtattttttacaatagtacaaaatagtacctcgagctcaattttctacaatttttttattataaccaacatgaagataatttttagtacaaacaaatgcaaaaaatataaccagtattgttataatacctctagatcgagttattattaagtttattttgacaaaaaatcagctcagactactattttgtacaattttaaaaaatacatgatttaatttgtcattaagttaaatcgataacttttataaaatacaaaatccaaaatagtatttatccttttaaaataaaataattattctaatatttttaaaatgctaactaaacaaagaataaaataaaattgaattactttttcattttatttcattctattactcctaaccaaatgcaccataaaattactcactattgattgtaacatgtataatggtttacaaagaaaaaataaaataaaattgatttagttaaaaactaacatagaagactcctaaaataagtcaaacaagttaaggttataatgttgacaaaaccgagttgtcattaaacatttataaaggtattatttaattgttaatcaaactatacctatatctatttttcaattaaattatatatatatagcttagctagcaagctcattagctactagccgcacatgcttcattttgagccaacctcttcttcttttctttctccctttctttttcttcatgattacatttgtctcacccaataagattctcataaaaattaatatgatatactaataataacacttgatcatagtccaaagaacccaaaacaaaaaacaacaatatgaagatggagaaagcaagaggagtaagctcaaccaacaacaccacaaaggt

SEQ ID NO: 188710 - DNA, 2161 bp, Cannabis indica
aattattatagttaacttactacaacaaataataaattttgtgacctgattttgaaaggaagctaaagccaattgtatgggttcataatacaacactaatttgagcgacccgattacttgaagcagtagcatcaatgatcgacacaaaaaaactttttaaaatagtatttgcacaatttatatttggaaaaaaaaaacatttaattatacaatttgtagtgaaaaaaaaaagtgagaagaagaaaatatattgaaacctaatatttatttagctaaagaccttaaagtaaggaagaaaaataagaaaatatatatatcaaaacatattaatacaagtacatttttgttgttcatattaaaatatggctgcataatgttttgagattatagtagtatcaaagtaaattttaacacatttttagttgcttaaatgatcatatatcattaatttgacaagaaataattagtaaagaattgtacaagcatatatataaatcatatataaacaaagagaataaccaaaataagaaaaaagatatatagaaaattaccattgaataattttagtgcatggcatcaatgcacccataataagaaacaataaatcaaatgtatttttgtagtgtcattttctctataccaatattattaaccaattcttcatgaaaatattgaagaaaagaaatatatatttattttatattttgaaataaataattattaaaggcaatgcatagacattactttttaatatccaaaagcaaaagttgtggtccaatttcaattttaaggttaaaatttttgaataattgagttttgttacaactcatagggaattatgggaaaattgaaagcactcttgttcttttattacaaaacaatcaaatccccatttgagatcttcaccaaatatattttggtataagaatttgagaaatagatgtagactggtcttgggttattggggtttagaaattggatgaaattgaccccccctaaatattaattaatggcctatatatacatgtatgtatatatatttatgtatataggtttaaataagatttactaatgtgacatatatccccattccaaccactggaatgaatgtgtttttgtatatatatacaactaaatctgtgtatgaatatatataaggtattttggtgttgtgggtgaggtggtccaactaagttaaccacatttttttgatagcaaagattcatgatatataatagtaccatatatacatatgaacatgtagtaattgaatggtcagtttcaatttattatatgatgtaatatatctagataaaaataatgtgtacatgaagggtttttttggttaattaattatattaaacaaaaataataaaaattattttttaaaaaaatgcattttatgatcttgttatatttatataaactaattatacaacttaaaattcctctccaaggattaaagatcttatatggtgtgcttgtaattgggtaggaaagaagcaaggcatggtggctatgatttgttgggttatttggagaactcgtaacgaatttgtttaaaacaaaaaaattccaagtgtgaatggtgtgattagttcaattaagttgtatcttaaacaataaaaaaatgctcaaattaatgaaggatgattatatatcactgtctagtggtgtggcacaagatggtaccaagttttgggtaaagcttctagacattacattgcctctcatcaatttggaattggcatggaagctcatgatcatcggtggcggtattgttaaagccagtatgttgtggttaggatgtagaacctgagttggctgaaagagctcagttggattaaaaataacgaatgatcagttgtggtgcttgagacggattgtttagtagtggttaagatcattcacaatttgttgttgattaactctctttttggactagttgttaatgattatagacacttgtttaattgtttaagcagagtctttttatgtttgtttatcgtttactagctaacaaagtgactcatagtttattagagcttcctattcttttcagatcgaatttttaatgaaatatctgtatttatgtttattttgttaaacaatttacctttttaataaaattttatttccattaaaaaaaaaatatatatat

SEQ ID NO: 188711 - DNA, 1903 bp, Cannabis indica
atgatgcagccatggatgaatgatttgagtttttgattttttttcaaatggaaggggtatttgtgggatattaggaatgtggtcatatatgaccaatattattaagtatgtatttagggaaaaaaatttaagattttctaagtatagaaaatcaaatttccctcatcctatagctaatattcatctgattctccaccctaaaaatctgtgatatttaattttcgttacataccttatttgcacttttgccgcaatatgcagctgcaggttcattgctcaaaataggttcatcattggcaactggatgttgatgcatgggaactcaaagaaacattcgtattattttggaattctttttctaccgatgttggctgtatctcatcccagtaaaattgttgatttgaatggaatcgtaatttgaggggcattagtttcatcacgattgtaaagtttattttttatatatggtttttttttttgagttaacgaatttaatgaatggaatcctaatttcaagggaattagtttcatcacgatcgtagttttattttttatatataattttttttagttaatgggaaagttaaaagtatcgttaaatttaatagaaaaagaataaaacgttaaaccaataattactatagacactcttaatatataaagatatcaattctccgtataattaatacgtacgtgtaccctatgtcacccatagttttattgccacttataataacccgcaaattataaggaagtttgtttgggctcagaattccataaaaaggatggtaattttgaaacaaatattcatttttctcttaaaaagtatattatattgtataatcttcataaatatatagatatattaaaccatataattcaatgtgtggcttaagaagactgataaaccatataatttacacacacaacacatacgtgtggtaaattatttttgataaatgagaatcattttaaataaaattaaattatttgttaaagttatttatcatataagcatgtgttaagtttgtgtacgaattgtatgtatacatactattactctttcataatatttcgtcgtgagaagtaaggcaaatcaaacgaggtcacatggaccttattataaatatattggactttcttttgtaagttacggtttttgttgccttctccttgaagccaaaggtaatcgtaaatatgagattcttataataaatcatgaattggtcaattacaataatatcatataattatgatcgtcacacactgcaactaataattattgtttcatcaattacacattcagccaaaaaaaagaaaaatatacatagagaaaatgatttatgaactactcatcatgacatatatatatatacatgtaaatgtttgataatgattttaatattataataatattttccctcagtgattaagaagaatattccaattaattatgtttactaattctactggcatgatcgcgatatgcaagctgagtacctgtgtcgttgaaagttggaaccgcatcatatgctatagtactatagtactagtggtagtatatacttacattaattatactaggtggatgtacctcgtattgctagtttcatttaagatttggtctttttaagattttaaatgtattttatttttaaaaattgcaaattttttatttgaaaaaattaaatatttatatttgaaatattatttaataatgtattaaaaataatattagtgtaattataaaattgtaaataaatttatgattggagtagtagattattctatttagttttttttttaacattagcattgtaatgtaagtttatatctataaatattctgtaaagtgttaatatttatatgaacatctccatttataaagctaaaaaagtgggtt

SEQ ID NO: 188712 - DNA, 2457 bp, Cannabis indica
tagtactctagcaagaactttgtgattatactaacctgtcgaacaactgcggatgatatgtcagcaaagctaaggtccgggtaaggcatatcgcaacaataaatttcccataagcatattccaaagctgtatacatcacatcttctattataaggcttaccatccaagacctacacagaacaccttatgagtttggctcacacaagacaataatgaaattcaaccccaagaagtaattcttatcagtttggttcaaatattttataattccatacgatacattaattctttaaagaggtaggacagcatgcaaagatagtatgaacatatacctcgggagccatgtacccaagggtaccagtttcaccagtcatatcccttggattttgagcttcaactcgagcaacaccaaaatcggctattttgagatttctttgagcatctagcaacatattctccgttttgacatcacgatgcacaatcttctttgaatgcaaatagctaagtctgtagattgaaagaagacatacaaacattaataataaaaaagtataaatatataatataacttcacatagctataaaatgttaagagcaagagaacccaccctcttgaaaggtccaaagcaagttgaatcacaactttaaaagcaagcttctttcttgtgtttcttattagaaactgtttgagcgtcccaccagcaaggtactccacaacaacacaacatgccttagaaggatgggaaccataaccctcatctgatgaattggtggcaggaatcttaagatttgaggcccccatagaagcaccaacaaactgaatccaaaatgtacaagaaaaaagttaattgtgccaactagtaaaaacacacccctgaaataaaaaaatttaatccagaaaaattgataaattttacagtagaacaggtacatgatttcaaagctattaaattttgacatcattgcaaagttaaaattctcaagatgcaactataataacagagctggatttctcaaggaaatgacattatgaaatcgaagaagataaagaacaagaattagtacttttgtaacgttagggtggtcaagcttgtgccaaacagcaacttcctgccgaaacgatgcccgcagagcagcagtttcaacagatgttgctataccgtcctccccccagtccaataccttcactgttataatagaacatacagcaaaaaatcggtaggtatataatcagttttcaatagaagctggatggttttaccaatgtaataaaatgaattaacttagacgtcaagttaacgagtcatcttccatatgcacaccattgtgacataatgaataatcattcaaatgcagaatgcccttatagtaacagtaacaaaaatcaccattatcccttatgacactggtcttgcagttcaaacaaagcatttacccaccaacaaaactaattaacagaatttgatgaccattcaaatgctctagccaatcacccaaacatttagctttaaatttcatttcaaaagcacagatggtaaactaaataggattcaacacaatagatttctaaatttacaaatatagaaataaaaatatgtaaactagtcatcacatctcaaattgacaccaaggtactacaaatggtaatgaaactgtatatctacttccacacatcaactactgtcaaccatttatgaaaaaataacaatctggaaacttgaccaaacttcagataatttgaaacacatgtaaagaaaaagtttaaaaatgaaaatagagaaaaagagaaaaaatacctgcaacatcttgattgtcataggtacccctatagacaataccataggttccctgagccacaacatatcttacatccatcttagataaatcaatttcccactcttctttaggcctttggctctcactgtccccattcctgtaaaataccttgctgaaatgcttctccagttgtatatctaaggtcttcaaatcaattttatctgctctgaaaatcatatctttgctactaatacttcctgtacctccaacctttgaatccacaccacccactgcatgatccatcttgctgattattttgagagctttaacctcctcacctgtctagtaaacagagcaaccccagatacaagatttaatctcctcactctagaaacgataaggagtgcaaaagagaatataccagagataactaattttttgttatatcaagaaaaaaaaaaaaaaaaccacgatttaaaaaatatatatctttgactatttctcatattcccagatgagtttgcaccagacagacctctgaagaaattaaaaaaaaaaatcaaggcttttattaaataacacaattagattcgctaagaaatcttctcataaataaataaaaagaaatactctagtaaaaacacaataatatcaaacacagcctatagcatatagatagat

SEQ ID NO: 188713 - DNA, 1533 bp, Cannabis indica
tcacggaatgaaacgtaatcaagcttaattacatagaaaaacagaaacagaaacaaatgaacaaaataaaatcataccataaccaaggagaacattgttaagagaagcaaaaacagcacaggcaaagacatatttcctgatgttacgtcctctttcttcttgataatgattatgagaagggtcatcatcatgatcatctgagagctcagaatccattctcttgtatttgttctttgtccccagcgaaatactagacaaccccatctctccatgcccattttcttggacaccaaccatccccatctttcttttccctctcacaaactcttcttgttcctaaaaaacaacaaactaagcagacccagaaccctgtttgactatttagagcctgagattgaattcatagtttgaggtttttagatctaaattagagcagagaagaaggagactcagcaagtggggtattttattttaatctaatttttatcaagcaatggagaactacttgatattatttacatgtgttaaagactaacatcactgtggacccccatggccttgaccttttactttattaagctaaaatggagctttcgaggttacagctgtggaggtctctgtgaaagaaaaaaatatataggatttttagcagttttcaaatagccaattggcttttacaaatttgttcttccttcaatcttccatatttgtggctatttcttaccatttgtttgtgttagtaaatacaataatattgtccaataaaaaaggagtttatctcgaagtacgtaccactgtacatgtggttatttgcttgtgtctcacgtgggtgtgagttcatttttgctttaattttaacttcttaactatttataaagtgttgttatggatattttaagataagcaatgtatgtatcttgaagaaatacacaaatgatattgataataaaaacaaaacattttgatagaaacaagataaatggattgtgaagtgctttaggaagtaaaataaagttgagaaatggtaaaggaaattcacaatacctattatttgatgtgtaaataatgatgtaatttaatattaagttttcaatattttattttaataaaaattataaaaaatcgctaactgtaactttttgtccgtagtagaaactacaaacttaattttcaaactataaaaaagagaaaaaaaaaaaaaaaaaaacatacacattcatgatagataaaatggaaacttaaaattgataaaattttaaatgcatgttgtgttttctttgtgttgattattctacatgtaaatgaaatgaccccaaactcattcaaaattattaagcaaatattaaaggtgaaagtttacgtgactcacactcactttgaatagattcaaaatgttaattacatataacatgactttgactttgaccttttgaagagatatgtaacaacaaccaccaccaacatttttcttattatttatttagggtattttaattaaaatgcatttatgaaaaagttttttttttttaattt

SEQ ID NO: 188714 - DNA, 1001 bp, Cannabis indica
ataccaagggacaaggaacaagggataccatacacgccacaattcatgtatgtataatgtaagttaggatacttataatggacaacaaatactaatatttttctttatttttgtatttatataccaatttaattattgggcaaaatttgaaagcaatattaaaagaaaaacttaaaaatatgcaaagtccccatcgaccaactcaagcctatgttatgctcaaaactaaagaattaacaactaaccaaactagacacttttttttttaatctgatactaaatagacacatattcatttcatgctagtatccgtgacagaaagctgcaaaacataatttattctgtcatctctgcttgaggcacattggtagacaatccaggtgatgaaactgatgtttttctttaatgttatcatagtatattcggttctaaaatggttgacatgacaaaggtgaataaagtcatagtaagatttggtttggtttgatggtgacaaatgaacaagttgaggcttagcttcatattctggtgatgaagttaagagggcagtgttttccattccaggcattaaaacaccagggccaaatagttatggtagttttttctattaggattgttgggacattgttggggcaagtttaactgaagttgtgttatccttccttcattcgggtaacattttaaagaaaattaattcaacaatgataactctaatgctaaagagtaaatgtcttaaaactattagtgattataggcctattgcgcttggctcaaattgattcttcctcatcttgttgctcaaaataaaggcaaatttgtacatggaagattcatagcacacaacattataatttgtcaagacttggttagacattatagaaggaaaaattataaaccaagttgtatgattaaacttgacatgagaaaagcttatgtaacggtagaatgtggattccttgaagaaatgcttgaggctttctagttttcaagtgcttttataa

SEQ ID NO: 188715 - DNA, 1959 bp, Cannabis indica
acgagatttagtaatggaatgagagacaaatttctacttagaggaggaccaatagatgagattcataccgagaaaaatacaatatgcgatgctacttcgacgatcatcaggacaagatgcccaatagacatcggtgaagcaatgaatatgtaaagaagggttcaggtgaataagaagaccaacttgagcagagcctttgaggtaacaaagaacttgtttggctacttgaagatgtttggaagcatgcataaactgacaaagtttgttaacaataaaggtaatgttagggcgagtaaacatgcagtattgcaaagcaccaactaagcctcgatattcagttgcatggactaaggaagtgtcatcatggagtgacaaaagagtgagtgcaagtggagtggtgactagtttagagtccaacaaccctatttttgtaagtaagtcatggacatacttggtctgagacatgtgtagatcgacaattgaacgagaaacttgaacaaggaaaaactaaagagcttcaaggtcctcaacaacaaacttggtatttagatattggagaagagtggcaatagtagtggaacaaggctcagtaactatgatatcatcgacatatactaggagaattaacatggcactgggagacttgtagacaaacatagagcaatctgctttagaagcttaaaaaaccccactcgagaatagtggtactgagcttgtggaaccaggtgcgaggtgaacttggaaagcttgcacacatgagaaggaaacttgagattaacaaacccttgtggctgagacatttacacagtttcggtcaagtcaccatgtaagaaaacattttgattgtctaattgtttgataggccagttataagaaattataagagagagaatcacccgaattgttgtaggcttaatgacgggactaaaagtttcatggaaatcatctcgggtttgatgaaaacccttggcaaaaagatgggccttgaatcgatcaatcgaaccatcgacattgagtttgatgcaataaatccatttgcaaccaataactttgcaatctgaagggagaggaacaagtatccatgtcttttgagattcaagggcagtaaacttttgttgcatagcacggaatcaagcctgaaactgagcagcctctttgaacaaagatggtataactaagacatttgaattcacactataaacaaaagggccttgtaaatgcctaatttagcatgagtaaccataagatgtaaattaacaggggtagtgacatgttcatgttggtcgtgaaattctactgctaagggtgtggtaggggtgattttggtgtataaatggaggtagaaggaggttgtatttcaggtagggaagaagaagactaggtcataaatagagtaggaagattagaggtgatatgagttgtttgagacattggaagagtataagtaggagaagatgatgtaggtgatggaggagacaaagagggagtatgagacaaatgtaaaacaaatggaagataagtaactactgtgtgaggtttatggaaaggaggtgaagggagacttgaggaagtaaaggggaagtaatattcattgaaaataacatggcaagtgatatagactctaccagtggaaggaagtaaacaaagataacccttatgctgacttttttaagccataaaaacacaagacaacacaagaggaagagtaaaatttgagtttgtaagagttgtaaggacataagaaagaaaatcattcacaactaaaaacataaaaatgagaataagatgatagattgttgtaaagggcttaataagtattacggttgtgcaaaacttgagtgggaaggcgatcttggtttcttatggtccatgttagagttagaaaaacacaagtcaatttgataaaaatgttttatccaatatgaactataagtccaaagatctcagcataatatatat

SEQ ID NO: 188716 - DNA, 1767 bp, Cannabis indica
atatatatatatatattgcttaattgtcatgcattatatgtattttttcttttcttttctagttttcgtggttacacgtaaggattgtgtaacccacaagagtctccaaacttggccaactgaaagaacccacatatctcttttttgaatattcaatcttattggcctttctcaattattttttaagcaaactttccaatttatacatatataatatatatatatatatatatatatatatagacatgatcaaccaaaccctagattattagtacttgtctcttaataataataatgatatatataataggagacaatgaaagactatggtgtttgacttgaacacacacacacacttagggttagatatatgttattcaatatccaatcaaactgtttggattcaatttgtggggatttaattttaagattggtataattataagtgtgcatgtgattgcttggccccactttcccatcaaactcttctgatctatttctacttagtcaaaatgtaaggtgaaaagaaggcaccaacaaacttagttggattttagaaagaaaaaaagaaacttatagttggattaattcatctttatttaattcatatttgaaaaataaaattactgaaaaaatattcaaaatatatataatattgtaataactcaccggcttctatagagtactatataacttaattagaatttttattacttgaataattttaatatgtatcatataaacttttcaaatctcgatcgttagaaatattttttttgaactattgagattattaaatttaaagatttttgtccatttcagttaaattttactcacatgattgttgttcatgtattaaataatcgtggccctcgaactttaataagtatcaaattgtgcccccataaactttgacaagtctcaaattgtgtttcctgaacttttatccacatcaagtttccattagtaaaattaagcaagttcttaattctaacatatatattatatatgtgtggagattatttagggttaaaataataagaataatgtaaattttttgggttaaaatctatttaataattagttaataatattggataattctacgtaccgtgcaccctttccggtaaatctattatttgttgtggcatacggaagaattttgtagttaatttttttattattgtacattatagttatttgagattatttataaattttcaaaaaaattaaataatttataatattaaaaataaaatttacatattttatcacatacataattattttttctaatacacatattaagtaaaggtttaaacctaattttctaagtgtgtttttaattcatgaatagctacaatgtagtacagaaatttctaatattatttatttattttatataagaaacaaggatgtattgaataaaagaagatataaataattataatctgagttacaacctaaaatggcaacccaaacctccttataaggcaaatcctcgaattttttactcttgaaaatccaaaagaattgggcaatgtatatcttctagattttacatttctttctcctttgcttcataggttgaatttccatttttttgattatggtctttcatatctttttctgtttctggtcttattcattctattcttaataattttacaggtgagggagcatgcacgaaaacttttggagaaacacgtaaaaaaacctttcttactttacggtgagtttgagagatagtgtattctttttattgtt

SEQ ID NO: 188717 - DNA, 1348 bp, Cannabis indica
aaaaaaaaaatgtctaaaatcttttaagactaaacctaaagaagcagctaacaaaatttaagtaggtatttatatatattatttttgttaatgaaaaataatctattttattaaaatatatataataataaagaatattatttttttttgtgtatgttttggtgttgttagaatgaaagttttttatcatcaaattcagtattgtgtgtaatactaaaattaggttgaaaatagcctaacatcacacaaccaactaaaatggatatcaagaatatagtttgggacttggagctagctgtagtaaaagatgatagttaatgttgttgttggtctggctattcctgtcctataagggcttttaattcaacttatgctgaagcacttgctttgaaggctgctctaaagttattgaatcagacaaagttacttgtatgtaaaatattgtttaataagatggatctctcaattttgagaaacatggttgtggacatttgtaattctttaccaaatctccctaatgtaattattagatgtatccaagggtgtttaatggggatgctcatagagttgccaaaaaaacactagggtttgatgaagaatttgtgtgaaatggtagcattataaatttcaaaccttttaagattgtaatttgtaatctttagttttatcttaatgaaagttataattagagaagagtccatattcagtcttggtcaagcatgaaaaattatttattgataaaaataagtgaaggttcttatgataactaggctgagaattagtatacttaacaaatggaaataataaaatattacacacgtcggcaggtgtaacttattcaccaaaattattcaagcatgaaattgttgtttaaaaaatagtgagttgttgtaaagataatattgtaatatcccaaacaagataatattgaattatttgataaactagttttgttgttgaagagtgatttgtagatataaaattactaaacgaaataatattattccagttttatattctcaatttctcatcttcacaaaggtatacccacatagattgagactgaaatatttgaaattatttgcacaattgacagtttaagatcattatatgtatatcacatcaataatatttaggagtgaaatataaattattctcacacttgataatttggtccccattttacctttctacaagtttatctttaagaatcttttttaaaagtgtttcattaagaattttttatgaaagtgttttagaacttacgtgtttgttcacaatactttaagacactttttgtagtagaggcatgtatatatggtttttgttttttatctccttttcatat

SEQ ID NO: 188718 - DNA, 581 bp, Cannabis indica
aaaataataaataaataaataactttcccgagaaccgaacagaaatacccggattgtattttgctgaaacgaaactggaaaatttgaaagctaacccgaccgggaaagtttaagcaaaagatacccaagttaaaggaaacggtacctggaatctggaaaagtctgtggagaatttcttcttattaaaatggactccagcgaacaaaaaagaagtgcctttttccatggtggaagacgatgaatgtggtctccttctcacacctgcaccgttttatatatgattatcagaaaagtggagttggattcaattgcagtggaaggaaggaataggtcgatgggtgaaattctgtgttttgtaagagcggtctatgagactctgtgcttaaaccctgctcttactcccaaagaatactaaatcttattgaacgacatgtcgtttacatcaacacatttagggttaatttaaatattggtcctctcgattttcccattgaatcaattatcatttatcattttctttcatgtttaatttcaaaaaaaaaaattacatcggaatttttaaaaaaaaacataaataaata

SEQ ID NO: 188719 - DNA, 2235 bp, Cannabis indica
tgttaatgttttcaagtgtattcatctatgaaaagtgttatttaaaaaaaatctatgaaaagtagattatccaatccaaaaataaataaaaagaccttaattaaaaaaaccactcacacaaataccataaaacttgtatgaaaaatcgttaaaatgaattactttataaggctttttatttatatactaaattaatatttatattgttacagggtttctctgtggtatctatataattaaaaagaaattgttttgctaacacgtgtacacattgttttaactcatttgaaaagttccaaaatttattcatttgttttaaaaggaaatgtttcataattaataagcattaagcagcttttagtgttataataagtttgtatagttgttcaaaatagtaaataataaagagactcaaaaattgtttctcaatagaatcttcaaggatgttctgttttataaaataaataaataaaatgttgataagagaatctttaaaggatgttcttaaggatctacgatcggtttttcctttccttattaataaatagaaaaacatgaccaaactctttgagttgaacgtcataataattttttaatgctgaactctttcccttattaaacatgccaaggtagcttcaagaacgtcatttaaaaggataatcattggtattagaagaaactaatttatattataaataaaaagtggcggtcatggtagtatttatcaaggcttatcatgcattaaattagagatacagatgtaatagcatagcatggaccatgagtcacattttcacaagcatgcctttcgatgtcatcctccctcgatcataaccacatcttttttcttctcctttccaaatatatgaacaatcatgtgattttaaaattagtatccatacaatatgtttattcaaatatgtcaactcaaaaaaaaaagcatcattaataagtatttaagatgggttcatataatttaatttggtttaattcatatatttttagaaagtaaactcttagcaagtggatatatatacaaataggcggtggttccagcagaattttagtgtggactcgatacttccaaagcttgactacttaaactgagagagagttttgttgtagagttgtagtgtcatcatccattaatggacagaatatctagctctaattctctatcaacaccaaggtttcggtgctttgatccaaccaactcttacccagatcacaccactaatcacaaacattatattcgaaccttttcaaattcaagcttcaacaacaactcccactctcactccaattccactccagaaatgggacttttaatcaactctgatcctaaaatcgaaaccggtgaagccggctacgttcttgaagatattccccacctatccgattacctaaatcatctccctgtttgtaactctttcacttctattgttcctcgtaataaagcaacctctgtcgtgtttccttaattatctttcttactttgtttttcttttttgcagactcatccaaatccgttacaagataatccttcgtactcagccgttaagtgagttgttctgttttgttttaatgaaatttaaagtattaattttggaacgaactgaccgttaaatgaaatttgatgttttgaacaggcaatactttgttgatgtggatgatacagtggcccacgaaggtgaataatattctcatccgtttgtttttcacttttttgtttgactcaaaagtcttttttaaaagaactttaaaagagtttgttataattttattgggttttcctttgtatgtaaaggttgttgtccagaaaaacggtccaagggggacacactttcggcgagctagggcctcgtcaaaaggttttagttttctcatcttctgtagtaagttgatctaggaagaaaacgaagtgatgcatgatcaacttgttttgttggtcaggtgtattttcaatcagatgaagtgcacgcttgtatagtcacatgtgggggtctatgccctggtctaaacacagtgatcagggagatagtatgtggtttacaccacatgtatggagttaacacagttcttgggattgaggtaaaggattacaatataagacattatccgtagttctactacaaatagtgaaaatgatacatatattgttttcataatgtagggaggatacaaaggcttctattcaagaaacacaatccctttaaccccaaaaattgtcaatga

SEQ ID NO: 188720 - DNA, 912 bp, Cannabis indica
ttgtgttgtgttggggccttatcctatttttccgaattctgaaataatgaaactttgtttggtatgtaagaaaccagagcaggattatgagtatgatgcaccataagaatggtgggtctgcttcggaacccacttctcaaattggcttttggagacgggactttcttctctttggtctttcttcttcacttttctcagttttcccatcttcaggtcagcagcttttccaaacccatttactatttttgtttttgttttttttttttttttaaatttgctttatcataacaatcaagcttgctgtggtttcaggttcttttgcagaagaggattcgaagatggttccgtttgttgatgaattaaatgcttattcgtatctctatccagtggaattgccttccaagaaactccttttcaaatggtatgctttttctcaagtttataaattttaagatttcttaggcataaatgttggtttcattcaaatgagggatgatttagtatagaacttgtgtatgtttactgaaatttgattggaataactaataccaccaccactgagcaaagctttccattgtaattaccactttcaatctctgaagttaaattttgtcaaagcatttgttgtttgtgtctttgttcaaaattctatgattttcaatgttgaactgtcttcaattttcaactctttgccaacagaaaatgttgtagatgattattgtctatctctattaaaactatttattccaccttaacttgtaaaaacttgtctcttttcttttgaagggtggaatccagaaagccagaacgatactcatctgcagcaccgctatctcgtaagcacactaatcctatccagctttgcagtaggaataattcaagtctttcagaagtttgaaagatttcgtagtt

SEQ ID NO: 188721 - DNA, 3107 bp, Cannabis indica
gaagaagcagaagtgaggtccatggaaccagtgctggatgaagatggatttcaggtggtggaaaaagggaagaaagtacaacaacaagatgtggttggaacaaaaataaataatcaatttgctattctaggaacaaattaagcttaaatgattaagagatagttaagactagatatgggggagatccttctacgtcaaatggatagaattctagtttagaatgtttgcggggtttaacagccagcacaagcattgagacattaggcaattaatacactcaaagaatgttgatttggttagtttgctcaaaaccaaaataaagaataagaatatgggtgagctttatttaaagttatttccttgttggtatttcactaataataacccttggttagataaatggagaataattatggctttaaatccttgtttgtattctatatataagaatgtgtacaagtcaattcattcattgtattgcttaaaaaattagaagtcagtaaagttccatattacttttgtgtatgcatgactttaatgaggaagtggaaagagatatgctttggaaagatttgaaaggccttaagaatggaaatgaagaaccatggatgatagtgggtgactttaatgagattttgaattatgatgaaagagctgatagaaggaaccacaagaagccatctaataggtttaaggaatgggtgatgcattatcaaatagatgaattgaaatattcaggatgattctttacttggaataacaagtagcagcctaatgagagagttttctctaacattgatcgtgcattggtgaactcaaaatggatagtttctttcttgaatttagaagaactttttcttctgaaaggggactttgatcatagtcctatcctcatttcctttctataaagattcaagcttctgaagggtgccattagatacttaagcatgtggcaagaacaagaaattatcaagaagagattaggataagtttgatggcccttactgtaggttctcctatgtatcaattggtggggtgtttgtagaggcttgagaaagtgctccaaactataaccatggatgagtttaatgagattcacaaggctaatatgcaagctaaacaagttatgttagctatctaggaagagttggatagagatcctaagaatagagacttgatagaacaagaacaaatggcacgagataagtattctcattaccataaagctcacaatttgttattagctcaaaaggtaaaaatgaattgggtaaaacatgacgatgagaatacttccattttcatgcttctttgaaatccaagagaactcaaacatatttaactctatcagggatgagagtgatatttgccttgataatgcagaggagattcaacaagctttctttgattactatcagaacttgtttgggacttcaatgagcaatagacataaggtgttccaatcggttgtgcgtgttggtcctgtactttcatcggagcacattcaagttctacagtagctattcactttacaagaagtgaaagatgccattttttccaaacctggtatgaaggctcctggtccaaatgggtttgggcgttcattctatcatgataattcagagctggtggtagaagatgtcaaaaaggctgtgaataatttcctaagcacgaggaagattcttaaagaaatcaataaaacaaacattacactcatccctaaaatcaaatgtccagatagtgttaaagatttctcaccaatttcttattgtaaagtgatctataaggctgctactaaagtcatttgttcaagactaaggaatgtcatccctaaaattgtcacggagaaccaaggtcaatttgttcatgggcgatatatagctcacaatattatggtttttcaagacctcattaggcactataaaaggaagaattgcaagtttagctgcatgattaaaactgacttgaggaaagcatatggcaccattgaatgaggattcattgaagaaatgtttgttaattttcattttccttgaaaattcattgatcttattatggcatgtatcaaaacccccaaattctccttattaattaatggtgaaattaaaaggatttgagacaaggagatttgatgtctcttctattgtttgttctaggcatggaatacatgtatagaatactgaaggaagtgggttcttgataaggttttaaattccatgatagatgcctactttaaaattgaatcacatgtgttttgcgaatgatttccttttattttcccatggtgattttctctcaattttgctaatgttgaagggtttaaagtcactttcttaaccttctgggctactgccaaaagaagaaaaattagagattaatagtagtggaatgcatgaatttgaagtcaactgaatgcttgatgtctcaagatacacaagagcgtatcatcctttcaggtaccttagcattcccatttgttcaaagaaaatatcagctagtgaatgtaatggcatccttgagaaaattgttggtcaaatccgagtgttgtgtttgagaaacttatcttattacatgggaagagttacacttatcaactctgtttttttaactatacactcgtattgggctcaaataatgatcatcccaaagaatttgttaaaggatgtacaagccaattttagggcttgtctttggaaaggcccagccgacactactgaccaggtttagtggctaggaaaaatgcttgtttgccaaagaatacatgaggtttaggctttcggaaggtccttgattgaaatatggctgcaatcgggaagtatgtgtaggaaattgccaccaaaaaggattcattatttattaaagggattaatagcgtttacttgatggacagtaatggattggaatactagccaccaactgaatgtagctggtattaaaagagattagttgatgtcaaggatgtttttagggccaagattgatttgccacactttttgacctaggtatagctttaaaagtggccatgacttattttttttagcaatctcttgatgtgggtcataaggtggtttaggatggattgagtatcacgaagcataaaatggtctttt

SEQ ID NO: 188722 - DNA, 4989 bp, Cannabis indica
tatgtacataataatacatagcattctctctctctacacaaatttctagcctgcctcaaccatccccatctacacaattaattctacacctatatatatatgtacttttttaaaataaataaataaataaaataattgctttctttttgctcatgtttggacacttctcttctctacacaaattgttttccctttattttaagatctcacttttaccatcggtaattttaaaatggctatctcttttctgtattttttttcagttatataactatagtatggagttattatgtggggcattttctcattttagagaaattatatatttttattttattataacttaaatatgattattattctaatttttatcataaatattatttaagtttaattctggattgtaaataaatatttaaatttaattttttataataataattaagttatatttttaaaactagtgtagatagttatcggttaaatgttaagttattatctatgtgttattttcttattgatatatttaaattaatatttctttaaaaaataaattttaatgattttaaccaatcaaaaatttcacatgataatttacttaaaagtaccagaattataattatttatattcttcaaagttgacatactgagaaaacggttatgtctttctctcctaatactggtttggctttacaagacagattccgcaatgttttgggtatgccaatctgtgatcttcatgaaaagtacctaggattaccttcttatgcgggacgggataagtcagaactcttcagcaacattaaggatagaatttggaagctcatgaactcttggcacgccaaacttttttccataggtggtcgtgaagttttacttaaagcggtggtgcaatccattcctacctacgccatgagttgcttcagtctgccaaagaaattttgtcgacaattggaagctatgatggcaaacttttggtggggatcgaacacaaacaaatctaaggtgcattggaaaaaatggagcatgctttgtcaatcaaaagcagagggaggtttgggatttagatctttccttcactttaatcaagctcttctagctaaacaggcatggcgaatcttagatgatccccaatctttgctggctcaagttttaaaggctcgatactttaagaatgggaattttctaaatgcttccaagggtactcttccttctcttacatggcaaagtatttgtgatggtcgggatctcttaattaaaggactgagatggaaaattggtgttggcaaccaagttaaatgtgcaattgatccttaggcttccgggtaatacaacttttcttccacttcacataccatgccggacctcaattcacagtcaatcattatatcactcaggatcgccaatgggatattagcttactccagcaacactttgggcaaattgatatagatagaattctctctatctcgattagtccaaatccaagagaggataggctgatttggcaccattcggattctggttcttatactgtgaagtcgggttatcatgtcgctgaagcaatggacagataaatgatacctcagcttcaacctctaaccgcaaatggtggaatcgtctttgggctctaaagcttccgaaaaaggtcaaaatttttgcttggagagtgattaatgatgctttgcctactgatgtcaatcttatgcatcggaaaatactcccaaatgctgcttgttctttgtgtaactgtcatagagaatccttgggccatgccatcttcttatgtactagagccaaacaggtttggtcaatagccaaggttcatatggctactgctattcctaatatataccagctgaacgggtttgacattttctcttctctggctgctgttcataccgatacagagttagagcgaatcctttgtattatgtggagtatttggaccgaaaggaacaaggaaatccatggaactaagccgaaatcggcttctattatttgttcttttgctgaccattatgttaatcaatatattaactccactttgcagctccagggattcgactcaaatggtctccctcatcctcaacctactggtgtgaactctatctctaccactcaaacagaaccgactaagtggactcctcctcctgctggttgcttgaaattgaatgtggatgctgcttttgatgaggatggatctgttataggcgtgggagcagtggtccgagactattttggggatgttgttggtgccttttccaaatcattgccaggttgttattcaccaaaagaaatggaggctatggggcttattcacagtttacaatggatccttagcaatcaaatgcacattgactatattgagacggattcactcattgttgctaatgccattaacaaacatccttctgtaggccaagtttctcttttttatgatcttattgatgacatttctcttttattatcctcttttcctagagtttcaatttcgcatgtaaaacgtgacgctaataaagcggcacatgggttagcgagatttgctcttcgattggataatacttgcttttggttgggggaaattccttctccaatccacactgttattgttatggattccattcagtaataataataatagtgtttacaaaaaaaaaaaaagttagacatatttacaaaagattagagaataatcgaaaactttaaactatatatcaaaattcagaagtatgtttcgacccggaataccgatattgtatagaaaggtcaggtcaggtttagtaatttttttgaaaatataaattataacgtacacgtttgcagatacttataataaacttatttatacaacttaactaattcagtgaatatattataagtaaagcgtcagtcattgttttaagtgaaggaatggttagatactcttatcatgatattccaaaacagttagacaatttcactacgaaaatttcaaacaataactaataagcatgtgattttctcacttcatcaatatgcaagcaataaagttcgtaccccttaagcgaatgatatattaaagaagggagcttgcagagtggtaagatactaatatttaaaggattcgtggtgacatggaaaggattattttctcccaaaatttaataaatccccaacttctgaatatcattatactaaaatagttgagttgttaacaaaaaaatgggacatccaaaagttgagatgcttgttcgatgaaaataaatggaagactttctcgtcaaggaagggataaatgagtctagattaaaaaaattagtgggcctttctcttgcaaatgggcttatcttgtacaagctttgcatagggtccctttgaagttgctcattctctttggaataggctttaaaacagcaaaattctaaagcgccataagatcctctggtggtgcattttctcgaatgccctcctaattcgatctgttattcataaaaagtatctatataaaaagtatctatggttttgaagaagaatatatctatggagcatactttcctcacgtgtaatgtggcttttcatttgtggcgatctttacctggagatatttttcctgtctcgaatacaggtattcgtatgtaggatttagtcaaattcatctaaaatcttaattctaaaggcgtaaatgcggatgagatttttttgtaggcttcaattgttgttgatattgtctcgatgattcaaaatgataaggtacataatattaatttggataatgtacagtgctatattgactatatttatcatacttatgcagattacagagcttccctcctccctaatcctactcccatcttggtggaagcttggcgtcccccctccctcaagattgatttaaactgaattgtgacgttaaattgggattgaaaatcatgcgtattgcggtggcagctagaaaccatgaaggcgaggtggcttgggtatgaacgacaaagttggaattttctaatgccctttacggcaaagcggctgcttattgtttggcccttgacatggccatggcgaaaggttacagattcatcattgtggagagcgacttaagggtaatgatcaattctctcaatgacaaggaggctccatgggaagttgagaattactcttctgtttgtaatagtctttctcctcattttttgggatgtttattttcttgtattagtagatgatgtaattttgttgcccataatatgataaagtagactttttacccactatcagtatggttggttttatgtatcctttatcccgaaaaatatcttgtgtaataaccgcgagatctaacttttttatcaatagacgtactagtttcttttcaaaaaaaaaaaacatatctaaaaagtacaattttatatagagaactacacattttaacacgtgtcaaaataagaacaagaagatcatataacttttcccaaataaacttcaaaactcatgaaaaacaatacgctaaatttaaatttagataagtaattaaatttataatgttgtaggtgtatatatgaaaattaatttactctttttttaattggatggatttaattttatctaatactagatctaaaatattagatggattcaatcttatttaaaaaaatagtaagtttaaaatattaaatcctacatatttaaaaagaattcatatatacactattcattcaaaacgtcaacctatatatataatgagttttcctttagtgaatacatatgaaactttttttttacattttcattttttttttcaaaaatctaagatatatatatatttttttttaatttttcttttcttcttcaatttggttaagtatttatagtacttttctaaagctatcatgactattagaaaatatataatgcattctttaaaaagaagcgcaccgatacactttatttggttgataaatttttgttttgattttactatttactataaaataatttttgtaaaaattttgt

SEQ ID NO: 188723 - DNA, 1997 bp, Cannabis indica
ctaagtttttgtgctgaatgctagtgatcattctcacttcagaaaggaattctgattctccttgttgggtattgttaagagataacttcttaacagcaatcaatctcccatcacccaactttccctataaaacatgaagcagtagggaggactttagtaagtgagttataaacccaagaatctgttcttgtgaacataagagatatactcttcaacaagtatgaaaaagacaaattgatattgtaatcgatacattggcccacaatcaaaaccaatgtctaaatagtatatatttccaagttctccagctttggaaacttgaacaagagaattatggaatatccaatgagtgtagtacctgtagctacatcattctgtctcataaagaattctttgccaactaagctttagattgtcaaggtagcacaagaaacaaaaatgcagatgtattataattgcaatacccaataatttataaatatttcagtttttggcattgggaattttgtagaaaatctattaacattccattcaaaattacatgcggaaaattgggaaggtttaaactttaggaaaacagaaagagtactccaatttaccagagaatataaaagtaaataaaacaaattctgcattagtacccgaaacacaggtccaaatccacctcttccaaggagatttccaggatgaaaatttttggttgctttcttcaatgtttggaaatcaaatatgctaattgttcggaggttcctggtaaacaaatctgtggacactgctaaacaagattgaatacataattagttgacatttcggtttcatcaaggtactaatcaaatttcaaaatttatacaatatcacaacctgggcgtcctttggctcgcttgacgaacttcttcaagtctgttggtttaataattctcaaaaagacaaatgccagaaaaagcactattataagcatgattattcctccaaggaaaaagaagaagatcgactgagaagcagggctcattatcttatcaaagggtgctgtactgatcactgcatccacaacagagctatggttggaactactgaaagatacaaaaaaatacaagagagagatccatcccaattgagaggcaagaacacattgatatagacatagttttctccgttttccagtgggttcctttgcacacaataaaaaactgaaattatctatcaactagttttccagtgaaatttatcaattgctctcaaagtccttaaatgtagtaacatggtgttccatcaataatgacttgttggtaagtagaagatttaccgttggagtttcagccgaggattttagtagtcactctgctgtgcaccactccaaatgtatgtgtttgatcaaatgtctgagagaaccatataaagaaaaaatgaaaaacttgatagtaattgatcataagaatggatgtataaattaacaagctacagcgttagtcacctttaccttgtagtggtcggcaagggattttaaggtggcagtggcggattaatgtgtactcttctacagttaaagcttgagcattaatggcagaggctatgaaagatgttgaagatgatccagagagatttgaagttgaaggagcaaaacatagaaagaatcgatgttcggaggtaacaataggagtaagtgacttcgttgaaatccacgaacagaagactccaaatgagtttgcattgcattatgagtctgcacaaacattctttcttccccactcatacagacagcacaaatatacttccaaaaatattttggattggttggaacttggcacactaatcattttgactttgtacaaatcaaataaaataatttataaattataaaaaaaaacaaaacaaaacaaaacaaaaaaccgtatttgtactaacagctaactggtgtagacacttttttttttctcagtttgaggcctacaattcaactgagagcattgattgaattttgtataaaattctaatttgat

SEQ ID NO: 188724 - DNA, 856 bp, Cannabis indica
tttttaagttttatgtctataaaattccagggatcgtcatagttgatgggtcagtgtgtgtggtgttggactgagaaagtgagcaaacgattactggattttggtttttgatacccttttcaagtttcatgctattcattataataggttaataggacaaacccaaaaaacagtcgttataccagtgagttctgctaatgcctaaaagtattcttctcatatacaatagaatgcaaatagtttactctagcgtatgataacttccttctactatgattttgtgtggcatattagaatggttctacttgctcatctagtcactggaaacgtaatatagttttaagtcctgctgttattcttgtttcagatgatgagtatacagtcatgcaatgccatgaagttcaagtacttgacattgcctaattgattttaaagatatatgagatagaacttctttataaaaattcaaatgtgcataaatgatgctttggtaaaggtaaattagtattgctttgctccaattatatatttttcttgacgtactgatatttgtttccaggtttctgagaccctacaaagatgatgaagtcttccgactcttcagaggagtttggaaagcatgcagactctgtgcatcatgtgagggaagacagtgaatatgttaggcttgttataaatgaaagaagaacagaaactgaaatgttgcaacctgaggcagaagcaaggaagtctttgctttggtgggtcaaagccttattgttttgtgttgttgtcactatatctattctccttctgttgaaatggggagttccatttgttttcgaaaaggtacttccaactcgtatctctctgtttt

SEQ ID NO: 188725 - DNA, 1935 bp, Cannabis indica
aagtattgaaatgaattaacccatggtaaacagtcacctgactaagataaacaatgatgacaagaaggaattctttttataaaatctaaacaaagctcactaggaaactacacagagaagagacaataaactattctatgagttgaaatgactgtagcaacacgttaaagaatatgatgaatgaaccatgttggataccaagactagttcatcaagtacatgaacttgatcgaagccaatcacaacaagagtactcaacaacccgaatcatatcaatctcatcatgtagattaattgttagaatgatatatgaaatatttaaatccccttggtattggaacagagatccatcctcagcatcctcacagagcaactatgaacaacctccctcgtgagcttcccaagcattattcatcacaggaaatccatttcttgttaaaagacataacaatgaattgaaacacaaaatcggaatagagaaaaaggtatacagcatagaccagaagaaatacatatttcacagttcaaaaaccacgaagaagcaggcaatcatagaccaaacagttaaatcatttattatctcacatgcagagaatggaaaacaaatcagtccatctagcagtgtcaatgcattgtatagactcaaaaaattgaataaattagatcaaactgagaaacattgaactaaaactacctttaaatacgagtacatgaggaatcaaaatcatcaggtgcaactctggcaatccagttactaagcgtcctcttaatatcggagtgattaacataagccaactcatacatactacacaaattcacaacaagagtctcattcaaagccaccgtaggtaccctttcaagcgcattctccaaaactttaatggagtcagacaaatcccttaagtacattaagcaaagagctttgttattgacagccactacgtcggtatgatccctctcaatgcactcatcgtactcccttacagccgagacataatctttcccaaccaaataaaccaatgctttgttcctattcacaagattcttaaactggatttcgctcaacgacccattacttttctcgatttccttcatcaaaccctccacctgattaaacgaattcttagcaccctccaaatccccaatttgcatctgaatgtaacctagcttcgaaaacaaaattgggtccgaaccatctcgtttaagcaaatctttgatcaatctcaaacacacggagaattctttgttgctaagatggagccccacgatggagttcgtcacaaaaaactccctcttcttccacacagtcgcagagacactcaaaccctccgcattctccttactcgcttaccttacgtccgtaccaaagtcaagtagaacgtagaggcggtccaacccatcttgacggcggcccaatttggcaggaacaatggcgtggagccaacggagggagaatgggaccatggatccagaccggtttgggtaaacattcgggtaagattcgtagcggttatggatccatcgagatcttcgacggtatcaagctcggtagaggcttcagagaaacgacgtagtttcataagggcgagtacgttgaaggagagataggtgaggtgatcatggggcttctgtaggagggagagggttcgggcacgaccgaccttgtctagtacagaccgccatgagccgcggagagcgaggtcttggagagaagcgagctcgtggctgagatcgttgagcgatccgaactggtcagttagtggatcagtagagagagttagggtttcgagatcggtagtcagaatttgggcatcgacggcctgagttggggggtcgggtgagtcgtactccatctctgaatcgccggggcttctaaaattcttgatcgggaatggttaagggaaaatgtatgtgtgaaaattccatttttttttt

SEQ ID NO: 188726 - DNA, 2278 bp, Cannabis indica
ataatatctctttctcattacaatcggttagagatattctctaaaagttattaccttaaattatatgcaacacgatacttaattgcaccaatagtaaacactgagaaaaatgctatgtatcactagtactgtcttttcgcatctctctaatttcagttatatttaaaactcagtatttgcatagatttcaatctatagcctcctaatagtttgtatcttgagcttattgttcgatacatatatttatatatatatatatatatatatatttatatatttgatataattttagtggaagatttatgattaagtgaaccctaattttaagcttgtttcgagatattcaaatatatataattaaccttcttcatatgtagccgtttgaaataatttactgtcaattgtcagtatatatacttaattaattaattaggataattaagtattaagtttctgtcttttatatatatagtagtgtctttggacacatttatataaatacacattaaaatatcatatatatatatatatatcaattagtattgacttaaagttcaactatattcagtgatagtttttcttatttatatataaaagatcctcttgtttttgtcagagaaaataaaatactaataattaatatataaaagagataaaattagcaaagtctttgatcaatttgtactaattaattttattattatagtactaaactactaattacttaggaacatgcatgcatgaacaataaatattaatctatataccaaaaaagataattaaaaggcaataatgtgtacgtactctgtcttaattagaggtattcttattttatttaattattttctgtatgtcacttatagatcgatcagatcttattataagtagtggtaataaattaaacacgatattattataataaagaaatcaaccttttacttgtgataatatgtataaatataaattaacacatttatgatatttatgtattatttagggttgtgatgcatctatactaattaattccacatcgagcaaaccctcagaaaaaacagcagggccaaacttgaccgtacgagggtatgagataattgatgaggctaagagaaggctcgaagctgtatgcccgtctacagtctcatgtgcagacattataaccctagccactagagactcagttgtcctcgctggcggaccaaactactttgttccgacgggtaggagagatggacttgtctcaaaccctaatgatgtcaacttgcctggttcaagccaatctgtcacctcggctgcccaatccttcatagccaaagggctaaccctaaaagaaatggtggttcttcttggtgcacacacagttggattcgctcattgcaatttcttttctagccggctttcaaactttcaagggacaggtaaacccgatcccaccatggatcctaagctagttaccaagttgagaggtatttgcgcaaatggtaataatccaaagacgtttttggatcaaaacactagtaatgtttttgataacgagttctacaatcaaatacgtttaaagagaggggttctgaagattgatcaggagctggctacagactctacttcttttcgtttggtttctaatttggcttcgaatccattacaattctctaggagttttgcaaatgctatggttaaaatgggaaagatcgaagttcttgtaggaaatgccggtgagattagaaaaaattgtggagcttttaaccctcccaaaagtactaaggctcctacaaaaactccaaaatctaagaagggaaagtctcctccggtaagcactcaaaactaaaaagaagggtccttattaaaataaaaaaattaaggtatagtttttgtccatattttattctttgtaagtgaataaataatttacgtgatgcaaaaatggtgttttatgcaatcatgaatgtgttgtaattgagagttgagttgtactataattaatatatataaaataaaatattattacttaccaactttgttttattaattacttctctattgcttaaaccaaatgggaaagggtgtcttcattgtattgctatatatattttagcacacttaaaaaaactattgttctaataatattctaaaaagtgtactaaatttagcatatactaaaaattataccgaattggcacaatgttatatcttatgttaaatttagcccacaataaatattaattttttatttacgataatgctactaattattaggatttacttttacaaaattttacat

SEQ ID NO: 188727 - DNA, 952 bp, Cannabis indica
aaaaaaaaaagaaaatatttgaaattactaaaccaaaagattatttggatcccacttcatcaatgtttcttgagttttctactctggccaccttcatgtaattaagtctaataaagtttttgtttttgctaattattctcatttttttaagcttgattgcaagtcattagaaatttaaatcttgcacgtgccaaaaagtattataaggaaatttattagagaaattatgagaagtacacttttcacaatctcaatttgcaaaaagactgtattttcaaaataaacatttaggtcatgtttactgtttagtgtggtacaaatgttgtcttgtattaatgtcataaatatgatatattgagcaattgttaaggaaaaaaaaagtactaaaaaaatggtttattttgtaaaagaacatatttgcaaaaattatgagaaattaattagcgggaagcaatagcaataaggtacttaatttaatctttatacctgtttttactttattcagaataataataataaaatctttacacctattaattaattctaataaacagtatatatttgtgagtaatttgaacaaaatgtatgtatgaagatttcaagttttagaacattaaaaaaatattgtgtcaaattgtggaagtgatgttgctaactcattgcttctctttattctctttctattattttcttcattataatgttagattttcataaatagacacaattgtaatacaaagtgtgacattatttagtgagaaatagtaaagggtaactatggtatctatatgtaatatcattattgatacaatttaatattaagttatatttattatatttaataaatattataaaaaaattattaacaatttataaagccccacctaataatgttgggcacattaatacctcataacagtaatcttatttattcatatgttttttttttttt

SEQ ID NO: 188728 - DNA, 903 bp, Cannabis indica
cattaatgctaccttcattcgtatatctcattggtgtacctttggcatgttgcatacaactacaatgtgccttctcgtacttagaaccataacatgtacggcaacatcttcatgcacaacaacattattttatccttctcaaataactaaaacaatatcaaaataacttcgtaatcaaagagatataacatttccttgagtttatgtcaagtaatctttaacaccctatcaagtaacacaacctttcattataagaaattcccataaagtaaaatgttttaaaaagaattatagtagtctattgcacctttctacatagaattagaaaaccacttctttatgctgccatttattaccccagaccaaaactaatttaggccaatgaagtatggaaacttagaaaaatagtctttcgaattattcaaatctcattggatactttaacaaactagagaaactttgggtgatattgctatgaaatgtcacaactgataacacgataaccgcaatacttaaacttgaaattagcacttgcttttctgaatgtgccatgacatacctatcaaaattcaaatcttactttacaaacacaaacgtgacacgcggcagaaacccaacagtccattgaattctccaaaagccggcaaaatgagtattataaaaacagagagagtcctcttcaaatgagacctttcaagtttactttttcattgtaatcttctcctaccactacgtgtttctcagtgaactgacctccagctctaacttacaattctcaccctctttctcaaattcaatcaagcttaatcagtccaccaaggacattttcgtaatcttcatccccctgaacatctcagccggcttagaattattatttgccgcctgcgccactctaatgatttt

SEQ ID NO: 188729 - DNA, 3518 bp, Cannabis indica
aatacttacttgccacatcagcattaattcattacactttgacttacagcccctttctttgaccttcgggaataaacccaagtaataggtggcctatcagttttctgtattctgtacctttttaagtattgtcaagaaacctgtcgaattatgttttatgtgtacaccaatgctttaatcataacaatatagtaatgaattatctagcaaaagtttatttcagttgtgggagcgagctggctagaatttaaggatttgaaactttttcctcaccagatttgatggtgttataagtgcactgtcaagtttggatattgtaatactaacaatttgaaagactaacatcactaacagtaaaataaattttatgaatgtgatggtggcattcttttctctggtttgttactgttggaataagacaaaaaagtatatgaatgcagcttcttgtttgaaacagctatatctatctgcaattagggttcctgtttacttaagtttttaacattttgcacactggttctcttttccatatggcctattcaaaatattactttttcactgacacagtctactgcggcaattggcttgcctagagagctccatcagggaaaaattatccaccaagcaaccagaagcatacgagtggttttggtctgaccaagttacaaaggcagttacatcctttgtgaactttattgaaggggacccacgctttactgctgcaacttctgtgtatgctataaaaccagttgctgtgttttttggcttacaaaatgaatgcagaactaatattattttaaattactatcagatctgggaaggttctgtctacggtttcagctgatgtatcaatgatcatgcttgcactgacatgcaatgctgcaataacaaaacttggtcccgcaaaagtttcttgcgcacaattttttagtacaattccagatataactggtagattgatggacatgctggttgatttcatgcctatatccgaggcttatcattctgtaaagggaattggcctggtcagagagtttcttgttcactttggtcctcgtgctgtagcatgtaggattaaaaatgaccgggattcagaggaggttgttttctgggtggatcttgttcagacacaattgcagcgggctattgatagggagaaaatttggtcaagactaactacatctgaaagcattgaggttagtcatttaaacttgtaaatgcttaactttaaaggtggtgcattttatttggaatttcaaacttagtattataacagtctggaatccatcatccttgatactattaatctgcactgcaatgaatcccgattcactaataaaactactataaatatgtatacatggtgaccagaatttctagtgtaggcattaacaaaagctttgaccagttgttatacccttcctcttctatgcaagtagttcataacagattcgtaatttgaaatcctggttatggtgggattagtagcaaagaatttggatgttgtaaattgtgttttgacactacaattaatttgagcacagtgatctagggagtatatgtatgtattgtatgtatgatgggttcagtatggcggaggcctaattttttttcgatgcagttgcatgtttcaataagattgatgccttattcaaatcaatactattttaatgcaggttttagaaagagatctagctatatttggattctttattgccttgggcagaagtacacaatcctatttatctgcaaatggttttgatgttataactggtccacttgaaggattcgtaaggtgcagataatgcaatttacttttttcctactttttgtttttttttttttttaaaattttttaattgttttaattgattttattttgttacttttttttaatgcagatttctcattggaggaagtgttttgtactatcctcagctgtcatcaataagttcctatcagttgtatgtagaggtcagcatttatcactctctgccaaatgtgcttcatggtataaattatagtatctaaaggtgttttccaattacataggtagtctgtgaagagttggactggcttccattttatccaggcattgttggtacttctaaagagtcccatggccacaaaagtaaatgggaaggtcctccaaacactgatgcgatactgcaagtattagatgtatgctctcattggatgcaaagttttatcaagtatagcaaatggctggagaacccttctaatgttaaggcagcaaagttcttgtccaaagggtaatcaaattgatgttttggtcgtcattaaacaataagagctgtatgcctgtatctaatttaatcatttttacaagatcttttctttctttaatgtctaggcataacaagttaatggagtgcgtggaagaactggagatgtcaaagtaagctactgaaaaatgttaatctcctccatcccccttcctccttcctctttccatgtttctcagattcaacactgtcagatacagaaatgcacagatcatgcaaatttttttgtacattagaaattttgtttggtaattttggaggacggaataggggagttaacttttatccatctttcggtcttaccatgatattttttttagtttttatcatatcaattcatcttgaaaagttaacttttaacatataatgcagggataaaagtaaggaaagcaaggtaaaaagttatgatgggagggttggaggtgtagagtattcgtcaattgagaaagacttggattcatttgacaaggttgatttgttattcgtcaattgggtttattcaaatttcagtatattttgtgattttttgatccaaatttcctcgtgtgattttttattttttaaaaatacttaactggactaaaagggttcatattacttattgatgtattttagttggatgtatttagtgttaccatttcattcttcatctagttattgtttgtactaatggtattcaaatgctagtggtgtagttaaacttgaaaactctgataccctagcatggcgaattatgggtatcatggcgaattattattacctaggtccatgactcgggtgactcaacatcttttgtaatccacacccaagagcgatagctcaaatggttaggcatgtggtatactcccacaaggtctgaggtttgagtcccacaagctcaattgctatagtttcctagtccccaaatattgtagtgttaggtagggatctagtttcaaaaaataaatcttttgtaattcactaatgtgcggagtatatactcatacagaatcacgatgttttggtctgccatgtttgtcatccagagttattgaaattttgtggtaaatttttcaaaacaagaaggtgctctgatactgtataattgtaagtttgtgtgtaactatctaactccttgggtatatttagttttttttttcgtggacttttgttgttcttctcatctaatttggaaacatttacttatcttctgatgcttttcaaaattcttgc

SEQ ID NO: 188730 - DNA, 3085 bp, Cannabis indica
taacgtgtatttgattctaaactgaaaagtctcaactacaaggagtaaaaagatagcagcaataataaaaccaacctactttctcacctttttcttcaaattaggagagataatcaagaaataattgagcataattctaatgtgggtttcattccagtataattcttttacaaagtaatacaacaataaatttttcgaaataatacagaaagagatgcacattttttgtggtgcttttagaatgaataatgagaaccaaaaaaaaggaaaaaaaaaaaaaaacaatcaaaccccacctgttgtttacatagattttgaaatttaaataccaaatggcaactaatctaattaagtgttgataaatctgcaatttttcctcacttctccattagcaaagctctctgaattggtaatgtttcccatcttgaccattgattcagaaaattgattgaagaaagctagtggatcagttgcatacaacttcacaagctctctagtttggatactaaacatacttgaatacatttcttgatcagagcttagtagtccttctcctttgagtagagtgtgatagaatgagttgtcaaaaatattaggtgtgacattgtccatagctgttatgttgttctcacctccatgaattggtgggcaaatggatctcaagctactaagatatgatgctgagataggattcaaccctgaagttgctcgaaaatcgccataaatccggtcccggaaattctcacaccttgccattccaattgtgtgagctcctgagaattatgtgtgcaaagaatcaattataccagtacataattggtcttaaactttactaatgtgattttttttaccaatagttattgccattatttgatattgttgagcttgtttgacatacttttaggaaggaaaagtatttatctatgatacctaagttattacttttatttggaataaaatttgactaataaatgaagagtgtcttgagtaaaaagttaccaagtaggaagggttagttgattaactgagacccacaaacctaccaaatccaaataattttgaggagaactatgtttaccctgtttaaataacaattaatactgctcttaatattcaataataataaataatgcccttgatactaggtaggtcctagcgtaaggcaccatcctactgattaatatcaatgttttttcttagataaattatttatatatgtaacagttttttcagttagttggtaaatttttttctatattaatatgcaaaaataacttgggacgtaaatcccttctactaggcttctactatatcattgattagcaaactaaataaaagcttaccaagttttgtgatctatataaattaaacattcttaaaattgacaactataaatgctctcaatatgttgttatttaatgatttatataaatttttgggttaagaggagcataatattattacctgcaagagctaccatatctttaacagagaggccttgatacataaatttgctaatgataggaataaggccctcatttgctgtgggaatatttgtgtctgcaagtgcataattagcagtgatggaatcctttcttccaactggaacatcccagtaaggtccaccaacctatgaaaaaatggcaagtgaaaaaaaaaagtgtcactagctaaatttttactatcataataataaacaaagaacaaactttacaccataataatattggcatagttaccagaatgacagcatctcttgctgcaatagtgagaatatccgcacatgagacaactccagggcactctgattcaaccatgttcttgatcccatcaatgagatcaaaacctttcaaagagtgtatgttaggagaagctgtcttctctccttttaaggtcactgtgtcatctaacaacactgaaccatcacatccctgctcggccaaaaaacacaacaacaaaaaaaaatgttagtttttaaagtcttttggtacaaaaaatattaaacaaatctgcatgaaatgtaaatatgggacctgaacaaaacagtcatgaaaatgtaatcgaactatcaaggccgcgcttcggggatcagaaagcacagcacactcagtctcttttcttataatttcaaaaacagtgggacaagtagaagcatagtagtcaagtgttaaataagagtcactacttgcatgaataatactagtgttcccaatagagaataccaaaatcatgaagagtagagaaaagggtccaaaagaaagtgaaagttccattggttaagttggttggttttgctttctgaaggtttttcttgaatgagtggagattgttgaagatgcatatggctgagacagtgaaatgtgcacatatatatacatatacaagattaaagataagcgtaattctgcacattttaattttgaatttttcaagtcttttgagtaaattgaatgaggatttctggagtcaagagaagatgcaacaactatttggcccggttggtgggttcttcaaaactaaaagttttttgtgccagagtttagaagtaaacttgtgtttttgcctaaaccatagtcattactaccaaaccataaaattattggatcaaaattaaccccttttgggctaagtaacaagctactttagtcttctctctctctctcttgaatgttaatatgctcatttagtctaacatcttacccttgaagcaattcatttaatataccaaaagcaaattgtttttgtttttttggtgtgaatttaattggtttatttgaattattaggttaaactacatccctttcataaaatcttactaaacttttatgctagttgtcaaagaaaactagcaagaagtgcaattagagctgacaatcaagattcaaagtctcttttgtacgtcatcccttaaaaactcaatcgttacaagcaaagatttgcatacacgaatttatcacattcttgctttatattctctggagcaaattgcaaaccagcaattctagaatacatgagaaaataagttagtcgtgatctctaaagtgtaagaagagcattagacagcctttttattattattattatt

SEQ ID NO: 188731 - DNA, 1777 bp, Cannabis indica
atttattatatttaataaatattataaaaaaattattaacaatttataaagccccacctaataatgttgggcacattaatacctcataacagtaatcttatttattcatatgtttttttttttttttggcaaagtacattatttattcatatatgctagttcaattgcattttattcttcaataaaaggacaaatatgtattgggattaaatatgtaattcaattttcatggttagtgatctgaaattagctaatggagattgaaataaaaatcttgttgaatctttgtttttagaggatgaaacttcatagattctatctattctgagatttaatcaacaacaatatctgatttggcacataatttttcagggggttatacgattaagagtgggtattggaatgccataaggttattaggattgggtcaaaacgattcctcttcgggctcatcttcttgatggaagtacttttggagtcttactattcatcctaaggtaaagatatttgtttggaaagctagtttagattggtttcctactaagtctaatcttgtctctcataaagttcccacaaatcttgcttattcagtttgtgggccgaaaaacaaagcttcattccatgcactttgaggttgtacaagtcttgcttccatagttaaggtggtagatttttctcttacatctaaagagttgcctcacgttaacattctctctttcttttgagaacatgaatttattcttcgtagagatgggatggagcggcttctagttcttctttggcacatttggtattgtcgaaactattgggtttatgaccaaaaactttttgatatcaaaggcatattgggctggtccttttcgtttgctcggacctatcaagaagctcatatgagaattggatttgtggcttctagtcatacttcaactgttagtccgactggtcggcccctagatgcaccatggtctcctccaactgaagggtggttcaaacttaatatttgggttgcgaccttctaactgttgtatgagttttggattggtcattcaagacttaataggatattgtgtggcatctgcagcaaccccgacgctgggtcttttagcttcgtctatcgctgaagttatggctatgctagttgagttgcaattatactttcgtcttggattttataatattgaggtggagagaagcatgtctggcatattatggtttaattttacaaggtatttatttaatttgtgataagcttaatgtttttaagtttttgttttgtaatcgttctgcgaattttataactcgtaatcttgtcaaactcgctctttttcctgatgaggcaagagtttggtggccaagcttgcctgagcttatttaaatttttggatttattttagcgttggcttaatgataattttctattatcaaaaaaagggggaataaataacacaaataaaattagataccttgtaattggtgatttatatataaatatttatattgcataatattttaaaaaaataaatgaaagtaaaagcaactcattcctaaaccaaaatcacaaaattaggacatttttcttcatagcatattggattgaaatgcacttaattataatgaaaaaagtgaatggttgacttgactatactaatctcacatttcattatacccacctttaaaaccatataataatactaattcttactcttagtctaacaattttggagaaaattacaaattttataggttttttgttttcaaaaatatagttttttttaaa

SEQ ID NO: 188732 - DNA, 2483 bp, Cannabis indica
ctgcaagctccttgatgtctcgtattgtatgttcttattatatactctgtttatcccgaggtggacatactgcctcgtcaattatatctgttaatagtttttattcttatttcgcatatgcttacgttgtcagcgagtttgaatatttctatcaactttaattaattgaaacgagttaattaaattgcaattaataatacaatttaattattatattctttaagctaatttatattccttttataggacacatcgggtataacaattactcttgcacaaagtacgggctacaatcttatgtaaattttagtgtttctatttaattttttaaatatatatatttcaaaaataaacaataaaatcggggaattattttttaggatatatatatttttttaaaatttacgatttaagttgctttaatggttattacggtggtttgaatgtgaattctccgttagttgctaagtgggttgatatgtgaatttttataaaaatataaaaataattgttttaaagtgtaaaaaaaaaaaattatatttttatttggagggaattgctaactaaaatctaaaatagtgtgtatattgagaaaaaagagagaggagttttacaagtcctaaaaaaaagcccaaactaactaagaagaaacaaatagagagagagagtttaacgaactaggcttttacacgcacaaaattccatttgggtttctttctttgtttctcccaaacctcaaaaccctttctttcttctctacaccttctctctctaccaccatggaagacgacgacgagttcggagatctctacaccgatgttcttcagccctttgcttcctcgtcgtcttcctctgttcagcagcctcaccacccttccgttgagccgcctcaacctttccgccctccgatcgatctcaatctcaatctcaagagcgatgtcgaagacactatgcttcgagctcccagcctcaattccgtcctacccgttaatgagacggacgaaaccctagttccaggtcctcctcccgccgtctcggttgattctgttactaataattcgatcattcccggtgaggtggtggttgtggatgatgcagtggctcggacgagggtttctttgtccggggatttgaaattgcgtgatggggttgtggaggattcaaattcgaatttgaacttgaactatggtgttggtgagtctgggaacgatgtttttatgaagcaatcgtgtggtgaagttgagaatttgatggagaaagatgtaacttttgatattgaagaaggtaatatggggatggaagatgttggttcggaaccgatgattccaggtctcgagagtagcgtacctattggtgggacgacgggggatattgataacgtggatgcttcaatgggagttagaagtttgggtggtgatggagttgatgaagatgatgccgctggcggtgatggtgatgattgggatagtgatagtgaggacgatttgcaaatagtccttaatgataacaatcatggacctttggctatggagagaggtggaatgggaggtggcgacgacgatgaagatgaagacgggctcgttattgtgactaatgacgatcctaatcaagtgatggaagaacaagaatggggagaggattctgcgcaggtggcggatggcgagaggaaggaggtgggtgaagctgggaaagttggtgccggcattgtggcgccacagaagattggttataacactcatggttatcatccatttcattctcagtttaaggtcagtgtcttcatatgctgctgattaagctaaggattatatttgtacatatggggtctgttttcccctcttgttggtgagaaattaaagcatagatatagtttgtaatgatttgtacaaaatgaatgaactgttttgcctccacatttattttctctgttatatgctaaatatatttatgaaatgacactacgaaatgcaaattttcttggtaactaattgacttacagtgagttttgcagatcaatgaaattttaagtatttgagctacacaaagatgcttacgtgagataattctctagtctcaggtttaagcttgttttgacatttctaaaaatgtcttcttgctgagagccaaagaaaattgttgaaatatcttcagtccaatgaaatgtatgatttgaaaatgaatgtttccaaaagctcaccctccctttactacatttaaactttagcgagaattcgataagatgcataacgtaaacacgtaaaagaatactaaagcttaatgaaatgcttcatagccaaaggcaatgatctgctgtactagtattattattattaggctcttcaactgctgttcaaaaatgtcgtacctcgatgaattggcatgttgcaacctgcatgtcttaattgatctctcacatgtcttttacagtggtgttgctgtggttagaggtgtgattatgaattacgattcttgtactctgtact

SEQ ID NO: 188733 - DNA, 1585 bp, Cannabis indica
atatagtgacagtataccatagcaccaggtaagaactacaagtacgtactgatgccaaattttcatttcctaattgtttgagaacaaatattaattaactgaatttatgtatatttctttattaattgtatatagtatataaattgttgtatcttttattgatattaataaatataatttactgtttttttttctttaaataataagcaagttgggttgttacttttggaagaccagaataaataattggagacaaaaagggagtatagtgtacgtatatctgtggagctgatgatatcaaaacaattaaattattgtacagtaatagattctattaattagtggaagttataaaatatttaactatatatattatttcacgaaattgcatgagtgcagcacttcataattattttgttaaaataaatataacacttaagtctgttagcacgtgcatattcatggattcattcatgatcatatataacatgttgatttggtgataagagttgtcattatatatataatatgtatcacatttaaataataactcttcaacatttactttcaaataaaatatacatttataatctatgaaaattgatttcaatttttttttttatatatatatatatatataaattataactactatacacatggtccgcattataacataatattactcagtgcataagtgcatatattgatctataaatatataaacgatgatatattaaaataacataggctatatataatatgattgaaagagataagagataaattaaaataaaaacgatcaagactataaaattaatattataagcaaagccaatgtggtttcgaagttggaattaatcatgtaatcatatatttaataaattcttaattcttaatttattcatgatatcacacatgcacacagacacatgtatatcagtatatatattaatgaattatatttccatcaaaataataataataattacgtacatgtatgtagaaatcatcataaaagtaaaatatattatcaattcattaacttacattatatatatataaatatatatatatatatatattctgatcattaaattaaaaaatgaaagtcatagacgtacaaaattgatctcatatttgaaagatatatatatatttgattatcttatatacgtcaaagaaaaaaaagcaaaaacaacttaagaaattatatatttcaatccccttaacattctacaaagagaaactactccacgtaatacccactcactagcttgcatgggaagtggccaattcatttttccacttactattaattcctttttattatgtatataattaccagcgtacttaattaatttgcatgtcgtttatagtccatgcaaatagtatcggacttactggttgattcattgtttatatatatttattagtgggataagttgataattctttttattatatgatacaattaccaattgtatcgcacaaaatataagagataaaaaactaatttcaacccaaaatatttttagcctaaatgataatagctctcttagcccatttgtgtgctaggcccaaa

SEQ ID NO: 188734 - DNA, 786 bp, Cannabis indica
agagtatttataggccaaccccccttcatgtgctggctggactgatcatattaagacgaaatttgaccgttgatttggtaggtggccgattcatcacatggtatctaaggttgtcagctggtatagtccggacatcatacacgtgttgcctcagggtcctcctttttgaattgcccttgttgatggctgttggatcattcaggaatgtacgattcggcgtgcgtgctctgtactagcgtgggggacaaatcttggcactatacctgaaaaagcctagcagccatgtctgcagaatgacccgtacgggatgagcttccccgtgatagtaaacaagattacaacacaactaaacttccttcttgacttatatggacgctttgtgacaagtccttatcctttgtgaaagcatattgtttcattccctgaaactagggaagatttctaatcgaataaactgccccctacccccccccccccccgacatcactaccttgcagggggagattttttcataaaggccctttccgtgagcgagggctcctatcttccaggaaccgttgtcaaaggtattgagcgactaattagcattgagccttcctcgatcagggtccacgtgtgaagcttaccaaatggataacattaaaacattgaaatataggtccatgatctccagtcacctctatgaaacactatagaggggaaggtttgacatttatcaaaatttgagaaataattaatttctatgagaataattcttaagggaaaagtagtaattttgtataaatt

SEQ ID NO: 188735 - DNA, 2409 bp, Cannabis indica
tattatttaatacaatacgatacgacctaccaaacgaagccttagttcttaaattagtgattgtgcctagtgttaaagttgctaatgtttatatacttgtaatagtatttggcaattatataaatttggttctacgtaattcaatcttgaaactgagattagcattgtttgtattgttgaaacattcttttggcaacaacaagagagtcaatggtgcaacagggggtaatactaccatacgctatccaagcagcaaccttaagaacagaaaggactttggattgttgaaattgagacagaaaggacataatggtaaagtttatggtttataattttgtagcttaatgggaaatttaatgatacaatttgctttccaattttaaatgttagtttaggggaatcagtcttaattcaatacaaactgaggttgttaatttgtaacaatactataacatagaatagatcagaatgagaaagattcaacaccaaacgaaagaagcataagccacataagtaacaaactgtaaattgggtacgagtcactcaaatacgaaaaagaagaaataaaataataattgtggcctcagatcagactggtcctcccctgctgctgctgctgctgctgctgcatcatcatacattgaaccaaccaaccaaccttgtctctcaatagttaattataatccattatttgttgactcacacacacgatgacacaaacaccttccattcattcctctcctcttctactcctgcacacacacacacacacacacacgcatttaacattacaaacaaatgagtaatctaatcttgtatatttctataatcaatcaaagtaaaaggaatgtgtttaactaagtgctaacctcatcatcgtcatcgtcgtcatcatcttcaccacgatcttccttgttcttcttaagacgggtagtaccaccctccttgacaatgggcaacttcattgctccaaagggtgtgtccacatcgatatgccctttgatggtgtaaccagtcccctttccacgaatcatgtcccacatagcagatccaaagtccttgggcctgaatgtgatggggacatcaatggtagtgatcccagtcttctccatcttggcagacttggagagctgggcacccccaatgctcacatcagacagccagacctcgtaatccagtttgttgaggcacagatcgaagtcattcttgttctccaatttgaggtggagtactgcaacagtctcctcgaaggagaatctctggaatcggatcttctcaacatcgacatcgggcttgtaaggaatggggatttctccggtcttctcaagcgggagagtcagccttccgaagacgggaacatcgacgatgagatcgaccttgatcctgtagggaatgatgcttccgggctgaatgtcgtcgtaggtgctcttgatgtcgtcgtagattagggttagagggatcttgacggtctcctctccgtgggcgtggatggtccctgcgtccggaatcagacctgagacgagcttcctgttatcgctgtcgatgaggtagttgatgtcgacgagagggatggggactgggttagggtttttgatgaggacgtccaccacgatgtcggccttctccagattgatgcaagggatgtgaattgcggttacatcggcggtgggtttaccgaatccgatggcttcctcgattttctcaccaatatcgtgaatgaagtctttcactttctcgatgaatccaccaccgccattaccggactcttgtttgtcttcgttgtctttatcattatgatgatgaagaattcctctatcagatacctctgctgcttctgctgctggcttatcttcaccagatgaagccataataactcctattttatatatatacaaacaagagtttggaattataaaataattaatttatatgaataattgatgggagagggaaactgaaaatggtgatgattagactgtgaacatagatgtagtaataggattcgattacgagatctgaacaaatatatattaaggcgatgaatttaattaagtaatataaaagatcataggaagaaaacataataatacgatgataacattaacatacctgaggttgaatttgagaatgagatcaaagattagagaagaaacagagacaaaggttggagtagatttattagagcgagtgatgatgagttgttgtgttgtgtggttttgatttgatttcttttgtttgatacatactaaaaagtaatactatgtatgaccctttctctctttccaatcaattatcacattaaataaatcaacgaaccattgactcccccatttcctatcataaatatgtatgaaataacatttttccattaaaaatatattatttaagacatggtaggaattttgctat

SEQ ID NO: 188736 - DNA, 4603 bp, Cannabis indica
ttgatttgttattgctgtaagttaattaaaattctttggtgcataggacttgaatggcgtggttatttgcatagttgcaagttcaagtatcattggcaaaaatgatacagatgcatttgtgcatagttttcgccagaccacagaatatacaaaggaaatattgatatccactatttatgaacccagtctggagcctgacctgattgtaacaacgattcttgtgattgggtaagactcatgtttagtatgataacacttattgaaaggtgaaagctgataaatgaacctgcttatggtgtagggtcaaggactctaattttgttgaatttctcttttggtcatttaagttactttctttaagataactttttctaaattgacatttttatgtttttgaatttgatttataaattatttttgcattaaaaattattaaaaacttgaaacctgatgttctcttttgttcttctcctccctaccatttttcttctttgttgtttctttctgcttcattctcattggctgtcatacaaagtggggctagcctgctaggagcctaggtctttctttgcattgttatatgctttgtgtttttagtaacaagtttgtgctcctcacttatttttggctatttaataattttgattagtttatgtaattcttgtacttgctgatgtttactttatgcaattaccaggtttactgaacaacaggtttctcaggaaactggtatattgactagacttgcccagcgttttccattcatctttaggcttctgaggagaaaccaatcaagtgaaacccaaggaaatagtttacctgagggagcattttcttctgatgagatagattcgccagaagtgatggaaaatgtagaggctgctgaaggttttgtaaggtactctgaaaacattcagaaaatattgagcaactacaatgagttttctttaatgcgtaactaattttctacatttgaattaatttatgatttatgcgtacaatcaatataaatgtgtttgtatttggcactgtaacagtgaatccgaacaagctgaggatgggttctctgaggcttgtatggattctttcagttattctgatccaccactcactgaaggtatctattaggttttctgttcaagtttaaaattactagttttcagttttatggagttgtaatttctttctcctagcttcatccttaaattcaaaaagtgaaaaatattttttttatttgactagaaattcccactttccaaagagaggagcttgttagttggaatgtggggacggggcatcaaattgcacaggagtgggccaaagaaagagcagctgaagcgggagctacttcaacgcttgataagctaagcatcttctgtcttccagttggtgtgaaaccagaagtgttgaaagatagatttgatatctcatcaaaaaacccaatgccaaatgctgagggtattctgaaatcaaatccaggtgccaattcaagtatagctccttggaatgagttgactgacacaggccttgaagcaatgaaggatttatataatacagcttcaacactcctaaaagggaattcttctgatcctcctaaaaaacaaagacttctttctgttcgtgcagcatctatgctggtactgcatgtcacctcctttctttaatttgctatgttgaagttgcatggtatacttgtcattttttgccggttagctgtctctttttatacatctattgctgaaattgaatggaaatactaggaaaatacacaaattgataaccctggttcttcagggggccagaggcctcctgagagctcaaatcttaccacaattcacgaacacctttcttgtccttcctctggtcccttctctatatttatataatactctaaccacccaattacccctgctaacaaaccagtcattctactcatgactgttgtcctataataacccattcctaaaataggattttttttcttgttattttgtagaataagaaagaaggccttatttggaataaaggcgtttccttagcttttgtcatgtcccattccttttactttatttagttttgaattgactaattaatgcagacagtactagactactagttaactaaagctgcagttcaccaaagcattaatgcttcttatgtgctgcagtttccaatgacattttatcgagtataagtagaggttgagtatgattcatataatttatctcctatcaaaaccattggagcattttccatttggttgtgccaaattcctaagtagaaatgtttaagggcaccagtgaggtgcctaggaccaccacgaggtatcataccaccattggtctaattaaatatcaagtgccacatattttaatgtaattattgaaaatccctaatctttctcaaggtgccagtttgtggtggtgatgggtactattgctgcctaatagcctaccctttcctattggtctccgcttttcaataattttatttgttttccatgatttttcaacttcagtattctatctctatgattctctattattaaaatctgtaattggctcatatttgggtgactgttcttgtatgtgttctgcctggttatataccttattaattacattttgtatcaacttaggcttttaaatgatatattggtttcttcgagtgcccagttgccagtagttgaggatttagttctcgttgttttgtttaaaacaggaagcagaacgtgattcaccaaaaaattggagtcctactgtgaagatgaaatatagaggaggaatttacagaggacgatgccaaggaggtattcctgaaggaaaggtacttttaattcataaccttagtaattaggcagactttgaatcctggatgtttctttcttatttttttttttccttttctgaaatttataaaaagaattaagagctgttctataaaatttatacagggccgtttggttcttgaagacggaagcatatatgatggaatgtggagatacggcaagaggtcaggttcgggcacattctactttagtaacggggatgtattccagggttcttggagagatgatgtcatgcatgggaaggtgtgtcttttttgatttagtttgaacttgaaaggccagcttgcatgatacctaattttacaaggcactgaggcagttatacttttgtttggccttacttaattatgaaattcatacatttgtatgagatctacagtttctttgtttgttctatttgctggttgatattgtttttgctgtgtttatatttatttcttaaaattatgtcagttgatctacgagacaaacctaccatacctcctgaaccatattttgtttccccatctgttgtcatttaggggtggttttatttccagtctggagatagatggtttgcaaacttctggaaggggaaggctaatggtgaaggccgcttctattccaagtccggtgaagtcctttttggtcatttccaggatggatggcgacatggcgagttcatttgtattgatgtggatggaagaaggttcgtaacacttcacccttctatttgtttctccaaggtgtagattgctgctcctgtcttgtttgataaggatagcttctattgtttctgttgaatatatgtttccacctcccagactctctatagcatcatcttaaggcaattaaaatcctatagacacgtttagatttgagtgattggctcgaaacaaagtttgacgttcgagtcctttctgaatacctacatagcaactgttatagtttcttgattattctaccttgatttattattatctttttcttgttacaggtgtattgaaaactgggatgaaggtattcttataagccgtagcccattggagtctcaaatctaatctggtgtcttaatatatatttatatatactatatgtgaatattcattattattggtgaaagcataggtagatagtgatgtatcatatcatgtatgtattgatttgaaaaccaaatccaaatcaaagctgtgtgtggtcctccctgtatctgcatccacaattaaagttgttcatcattatagtttatatatgtctataatattattttttactcttttatacgatgtagcaaaaaatattgtatggggttgagtgtgattggataaagtgttagaataaagtatgatttggtagggagatccaagaagagatggcagtggtggagatcttaacatggctaaatgtaatgtaatattattgtgtgaatggagattatcgagagcaatgttggagtgaagtttacgtaggctcaagccccctttattttctttgcattaactacactccttagaataaggagtgaatttttaaaaaataaacctgaacatacgaaaatggctccctatgatgaagaatggatagagtcgttttagtaggtcgtaaaagaattgtattgtactaaataataagaaaaaatatatttggttaaaactttgtattgtattgactattacgacaaaaaatttaagaggaattactccatatacttattttttttaacttttttttttttaaatttacgggttgtactttttaaagtggttgcagcgctag

SEQ ID NO: 188737 - DNA, 3949 bp, Cannabis indica
gtgacattgttaaggctgatgcctagttaattttaaagaaactcttttaataacaaaaaaaaaaaaaatatatatctaattaataaaagagtaaaattagatttaatatttaaatgtaatacttgagtcaccacccataagtgaactaagttattaccgcaataccgatgtcagcattgtacacaatttagaggataatattatgaaatctattttcgagtagtaacatatacaaaaatcaaaccttcatgaggttatgttgtaaatgtttggtacacatacttgtctatagacaatatcagaattagttttttttctttttttcctttctatatatattaaaatggaaaaatagtttatacggtcataataaaatgtgaacaagctagctaacaaagtagaaaatttattattttgatcaaattttcttgaaaagaaaaaaaaacattctgtatatcgaaactgggggccatgttaggttaggtgtgagatgaaccattgattatttatttatttactaattccagaaagtaatttttttagagagagagaaagagagttggagtctatattagaagtgtacaagcaaataaataaataaataaagaaaaatattttacaaaaggaaccgaaatgatgaaattactaattattcttttgaaaggaattagaattactatattttttttctttttaaatcaaattcattcattcaaaaacaaaacttacaaagaattaggcaaatctcgtcaaatagctagcgtgactcgcacgagggagattaatcccaatcaatatgatactaattttattaatcaaaacataatcgactaatacatgagttattatattaatttcttcaaacacaaaagatagaccttcaaattagcaaaagacaacaaatatttgatatgatcaagtaccccatttatgtctctgcagctgacctcttttcgttagctttaagacaatgatagctcagtaataaaatgagtattgttcgagtcaatacaaaactccacaagccaataagcttttacattcagcataaatcttttgaaattcattcttctgctatttatactaaggaataaaaacagagaaaataacagattgctagtgctcccgcgagttcctcagctcctctccattctaacaaactcttgcatccatcggggcttcacgcgcttgcgagttccacgcgttcccactctctctgcaatgttggtttgcccagtttctttccctttgttgccttcatcccgttcgttaagttgctggttctcctcttcggttattccctcctctaaccagccttttatgctgttctgggctttgtttgggtcaattaatattgggcctggcctaatactacacccctcctcgacaaagaccttgtcctcaaggtcatggagatcatacaattggcaaaactcatgaaaattctcccatgttgcatcttcaggtgcacttaaagtccactgtaccaagacttggagctccttgtcacttttggtgcctactgttcgttgagccaggattgcctgtggaatcatgacaggcttgttgttgatgctgacatctggtaaaggatagcattgtggagttgagtttccgtgaaatggtttcagcaatgaaacatggaaagttggatgtatacgactcccttccggtaactccaatgtataagccactggacccgctcgcgccttcactttgaatgggccaaaataccttctgcagagtttggagttgagacgttttgccactgtggactggcggtaaggttgtagtttaaccaaaaccaactcgccaagattaaattcccaatctcgcctttttttattcgcctgttgcctcattcggtgctgtgcttgtagaagattctgttttagttgctgtaaaatgcgatctctagcaagtaaatcttcctctactgcttggatactggtggagcctcttgtatatgctggaattgaaggaggatctcggccataaactgctctgaacggagtcataccgattgctgaatggtgacttgtgttataatggtattcggcccaagcaaggaacttactccactggcgaggattatctgctgtaaatgtccgcaaatactgctccaaatatctattagtgacctctgtttgaccatctgtttgtgggtgatatgccgaactcatcttcagggtagtgcccatcagctcaaataatttcttccagaacatgctggtgaaaattgggtcgcggtcggatacaatcgatctaggcagaccatgtaggcgtatgaccatgttagcaaataattctgctactttggtggctgtatagtgattcgccaatgctccaaaatgagcgtatttcgtaaatctatcgaccacaactagaatattagtaacaccacctgagtttggcatcccaacaataaaatccatagcgagatcttcccaaactctttctggtatttccaaaggctgcagcaatccaagagggggcgttggcgagtatttcactgtttgacaaacaatacaagattggacaaatttccgcacctctgccttcatattgggccagtaaaaatttgcacttaagcgcaacaaagtcctgtcaactcctgcgtgtccagcaactggtgatgaatgaaattcctgcataatttgttgtttcagattagagtgagggctgatataaagcttctgtttaaagtataataggccatcacgtgctgaaaattcagtaactccattaggttccactagaagctggttgtgtaagtctcgcatgtcggggccagtgatgttttctctctttaattcttctaaaaattcgaaacaagctgatgacacagctgctgccaacagagaaaaagaaccttcatgttgccgagaaagagcatcagctactgagttttctttgcccgccttatattcaattgaaaagtgaaatccgatgagtttccgaaggacttgttgctgctcgggtgtttgaatgacctgtgtaaggagctctttaagactcttatgatccgtgcgaatggtgaaatgtctacccaataaatattgtctccactttgtaacagcttctacaattgcccgtagttccctaaaatacgctgaagtaccagcgaacttgggtcccaatttcctactgaaaaaggcgatgggatgaccttgttgcatgagtaccgcccctattcccacacttgaggcatcagcctctataatgaactctttggaaaaatcgggcagcgagagaacgggagtctccgtcattgtttgcttgagatgatgaaaagcagcgtctgcttgaatggtccaatgaaaactatccttcttcagtaattctgttaaaggagctgcaatagaggcataatgtgcaacaaatctgcggtaataaccggtaagccccagaaatcccctcaattgtttgatgttacgtggttgtggccattccaacatggctgaaattttggaaggatctgcctgcacccctttagccgacactaaatggcccaaataatcaatggttggctgaaaaaatttacatttgttagctttagcaaagaaacaatgatcacgcagtatttgtaataccattctcaaatgttggcagtggtcctcccaagtgcggctgtagacaagaatgtcatcgaagaaactatcacacaacggcgcaaaagaggcttgaacacccgattcatggttgcttggaaggtggatggcgcatttgtaagtccaaatggcatgacggtgaattcgtagtgaccttcatgcgtgcgaaacgctgttttatggatatcttgcggagccatgcgaatttggtgataacccgctctcaaggtctagtttggaaaatacctgtcgcaccccccactcatccaacaatcgtcaaatgtgggtaatggaaaatcgatcctaagtgtatatatctagcgctcgataatccacac

SEQ ID NO: 188738 - DNA, 923 bp, Cannabis indica
gagagagagagagagagcaattaatactaatacatttaaaaccattcaaaaacttcacccctacacttctgaaacttcataaaaatcattattggtggtcccaaaaacaaaatatttattggctgattctgtttaatagcatcttgtcctggtcaatttgggggtcatctcatttagtataccaaagaccaaaagttacacactccttcccatttataagctaaggtaaagctacacatataagtagcttatattaggaaaaaataaaataaaataaattggctaaacaagactatcacgtcaggtccccacaccaagttaggtcatggcgtttggttggcatttgttaaaagaggttttctttctccatccttgtccgtcatccaaccaaggatggataccagacttataaataatagtaatgcatccccatcaaacatgtttggtctcatctcatagcccattatatctgtctccccaagggtaaaatagtcatttcccaaacccaaagtacaagtatagcccaagtctttttctttcctccaattttctgtttttgttattataggtaatcactatctctaaaaccgatatttatgtcacaaatgaagaagaacaaccaaacattaaaaagaaaataataaatattaaataggagtatcaataattttgaaaatgacaattctaacctcaaaagggacatttcaccgaaccccaacccccaatgtttccccaagaaaaatcccagaaaatgaaaagagatcaagtgcagtaaaaaaaactaatactgctacactgggagccactcatcaagcacttctcttggtacaaaagcaagcaagcactaattatcataaaagaaaaagaaaagaaaaataaggacccaagagaataataatcctattttatttttaatttttttt

SEQ ID NO: 188739 - DNA, 2114 bp, Cannabis indica
ataaagacaaaaaataataaaaaatttcacaaaattcgagtgtgagcttttatggagggcagaaggtaatcgaccacactcttcttcctcctcctcacaaatctcaaatcctcaatcgccgattccattatcacattcttcttcgccttcgattctcatcttcatcgcatctctggtactctttctctccttctctctaagtatttacttcaatttgcagtattatttatgtcagctcttgaatctttgttgattccaatggttaagaaacgatttgttgatgtgattgtgatgctgcatttcatgtttatgcattattaattacatgattcgaacgattatgaacataaatagatatgcacacatacatatgtaagagaaatcgatgctgtttttgtgatatatatatttatacatatactaacggtactttcttttaggtttttacaactttacattgaacggagaagttgttttgagtttggatatggaccaggttaggagttgatttctttccttttttttcttttcctttttcttttttcttaataatttatatatatatatatatatatgtatgtttaattttgatctgtttttgtattctgatcagtggtgtttgtgaatatattagtatgaaaaagttgagaagattggggaaggaacttatggtgtggtgtacaaggctcgtgaccgcgtaactaataagactatagctttgaagaagatccgtttggagcaagaagatgagggagtcccaagcacagctatcagagaaatttctctcttgaaggaaatgcagcatggaaacattgtgcggtatgtagtgtagattatagtatatatattcatatataatagtattcatgagatgtcaagtgtaggtatttttgaattagatacataagtggagaccagttatgatgagtataaaaggtttaatcgcatgagcaacaacagtaacaccaatactaataacaagaagtttggacaaacaattttctgctcaatagtcattttctatgatacttcatttgtaatggggtttctgcatacctatttgtatttagttgcatatcttgacctagtaaactaggggactgactactttgcatgctgtttgcgagaaaattaatgttggagctgttggtcaaaatgtacttaattgcatgtacggaaagatctaattggattagtgtgtaaccagtgtaaattcttaaattcagtatccctaaagatatatgagtgcttgtggaaatgggatatctctctgctttttacatctttattttaagggagtctctgtaatgatgttcttttctttgaaactattttctcttagttctctttttagcttctattttaagatatttggttgacaggttacaagatgtggtgcacagtgagaagcgttttgtatttggtttttcgaatacttagacctggtatctgaaaaagttcatggattcatctcccaatttttcaaaggatcttcagcagataagagtgagttttgtattttgtgttcgcccccttttcatttttttaatcttaaaaaacaaggattagatttgtaggtgtaaagaagattttctatatttcatggcttggttcagtgagctttatattttcttttagttaatgtattaatttcttttctctggtagtatttattagttaatgcaattttctattttgacagttgtttctctatcaaattctccggggcattgcttattgtcattctcatgagttcttcatcgagatctaaaaccccagaacttattaatagatcgtagcaataatgcacttaagctggcagattttggactggcgagagcatttggtattccagtcaggacttttactcacgaggtatgattatgcagtagattctcattttcttctgtgtttgtagttatttctcattagcttaatatataattggctctctaagctctatgatcaacttttctcttccctgtatttaggccgcaatatcctacctgtgagagtagaaacatgatttcctttttaaattgacaaattacttggtagagactgagaagtgatataattatatatatatgcatatacattatatatatagatat

SEQ ID NO: 188740 - DNA, 1355 bp, Cannabis indica
  modified_base (22)..(22): a, c, t, g, unknown or other
  modified_base (27)..(27): a, c, t, g, unknown or other
tcatcatcatgatcagtagacnctacncccgtgagagagtagagaaaagtaaagaaggaaaagaaaaaaaaaagagagataagataatattgaatgaatgcccataataaagttttcttcttcttattacttttgttcatctcaataatactcaaatatccacaaccatttctttaattctctcaatatttcttcttcttcttcttcttatcaaagaaactaaaatccaaacaccctttttctcttgccaatttctacttgggatttcaggtcaaacttctctacatatatatactctgtttaattttctttatttgtttattttccttccttccaaacactactcaattatcttaaattattaatatgtgcaggtgcatacgaagactaaatcaatcatggatttcagtggacaattcactaacaagatggagatgaaggttgagattccatcagaaacagaaatgatcatgggtggatctggacccgggtccggatccgggtcgggttcagggtcagggcttacaaggcaggcaagtgtgacaaagaacaattgcctatgttccccaacaactcatgcagggtcgttcaggtgcaggcttcatagagcaccaagtctccaaagaaccaaaagtattgacactaatgcaaaccttcgtgaatcaaagcccaatattactactgctacttccactactactaatgttcagtgaaaattacaacaaaattattcatcatcaattagtgcttgttatttatatcacaagcttttattatgtcttatcactatatctatatctatatgttatcatattatcagtgtgttttctgtagtttttttttacccttgtttaattttgtgtgtttattttgtaagcagggaagtggataattaatttgctataatataaattggtttctttttttttaaataaatgatcaatgctcattgaatagaatggtcaaaatacatggttgaataccatccaactaagtgtatttttagctattctaattttaaacttgttttaattagaccccatatttgccaactttggcttttgtacttattatgccttaataataatagtatttaaaccataaccaccccacatttggttgatctctccaacggttaagtactcaaagagaaaaatgctttagttaaggtgaaaagcagagaaaattaaataaaaagggaaaatatgttattcaaaagtgtacggctagaaatggactgggaacaaaggatctctacttgttgattttcttaatcatgcggaacaattgaaatgattgtgtccatcattatttcgttactggtttttcaagtttttaataataattaaaaaaaa

SEQ ID NO: 188741 - DNA, 965 bp, Cannabis indica
taataataattaaaaaaaaaagacaagggtgaaattttacagagacaatcaaaaacatatgtatagtaaaaaagtgaaatgataaggtaacataaaatccacgcatctgaattacaattatagttgttcattttcgaagataactatatatgatgatgaacaggagtaagtaaacaccaaagaccaccttccaaaactatacttagaataaaaaccaggcctagtgagatgtctatttcagactgtaagatcttactttctttctttttttatggctcagtgcataatgcatttagacaacaattgtaagtttacatcaaaattcagaacattgaaaatgaccttccattggtaacagtttctggatttatcaagtcaatgccaaatgtgggggaaaagtaagtgaatattatgtaatcattcatggctacaaattagtcaatctggtagatagtgcttttgataactatccttcctcaattatttcatcttactactcaatcaatatggtgttttcttatttttactaactcttttgttaggtaagatcttttttttatttacccctaaaacaaaacaaaacaaaagttggatctttaacccatcgatacttgttattgatggacattttactaacttgtacaactttttccaactttatattatttacttgttttctcttgaattgttattaatcaccatcaatatataacaggccataagatagtaagcagtttttcataataattactaaatttaaatatgtggaactaatataaaattacaccaataatataacaattcataataatattagacaatactagttacttttaacattttttttatttaacaaattcctaaaataatcttaacttaaacataaaataaagtggtattttgttagtggtaatgaaatgtaatggaatggaaatgaagtagtttttattccatttttttttttt

SEQ ID NO: 188742 - DNA, 5050 bp, Cannabis indica
tgagtataaaattttttgaaaagatgctcaaaatattatattaataaatatcgacataaatactcaaagttaagtggcataaaaaaattgtaaacatatccctatatacataacatagcatatacagtagaaacgcaataccaaaaaattgtaaacataaactaaggcttcttcattattattattatcattactttatttttttgcaactttggaactattacaaaccaaaccacatatgttaggaacataaacatgaacatgatcagcacaacattaacatcacttacatcataatagcaataattcccgttatgaaggaaaaggaatagggattttcttactacttttcttctttctccaaagtaacttcctaaacaaacccccaccactcccttgtttcttcgaaggaacaatagctaacatatcaactgcaacattattcttatcttgttctttgccattagggaaaataatgttttctaatggctctattaccttgtgagaacctaatttagtattcgtagtagtcgagttgttgtcgatttctttggtttcgggtgatttgaaattcttagttggagtgtcgtcttctgctagcattcgatctagtagagatgttcgatgattggtgttcttgttatcttctttcggggttggtgttttggtgttagtgacagttttatcagtgttacttggattaatgatgactttatcgaagagtacagcttctttcggtgtagccaacgattttaactgcttcccgaggtttatgattgtctcttggcactctgctaacttttctgtagcagctgttatctcttgatcctgcaaatgagacaattctaacttttatcaatgtcaaatcatattagccttgattaagctagagatttgaacaacacttacacttctaagttgcttttgttcctcgttaaagttggtgtcgtctgaggtttccttcttcagactgatgaataacacatgtcagataaaacaaactcaatgaatttctaagaatagtgtgtatcttgtattaattggtacctttcgagttgaagttgtaactcaacacatgtagtctgcaattcttcaaaagagtggtttttgttatcaagctcaacctctagagtcataaagttttggtgagcttcgattagttctcctctggccgcattcaactgtgtgtcgagatcttcattcatcatcttctgattttcaatttgatcctcaatcatctcctttgattttttaaaagcttgcaattctgcttgtaggctttcaataacctttcgagattcctgaagttgcttcgttaggttttctctcatatcggtagctgactgaagtctcccttccaattctttcttttcattcttcaatattatgctttcttcatttgaatgtaacaactgttgttgtctcggaatgtgtgctcggtctgcttctgcaaagtgaccgatacacccggcttctgcttcgctttcactccttgattcatcccaatcacattgctttataatggcatccctcatgcttgaaacatcttgaagagaaaagcagtgatttattatccactccagagacgaagttaatgcttcaacgaattttccaacatcagcctttccattcaatagatcataacaagcatgcaagtattgctgtagaacatcactgagttcagaagatttccactggaggacacggaccatgtagcctgtaggtgactcagaattcttcaactcagatggtataccgatcccttcaacaagctcaatcatcttgcagatgaatttactcatatctggctggagctgttgattgttcttatcttgtgagatgttcacatcagtccttccactagatgaatccatttctagtgatttttttgcatcagagagattagattcatcaaattcatttgagccttcccttgcaagagcaagttcaccaggctttggacgtgtgctatgcgccaaagctaatttaatatcctcaattatatcttcgaagtttcttcctgttgcacggttttgctccaataccagttttaaggcatcttgaagccaaacagggaccccattgaaagagtgcttaatttcttgatttgagtcactgaatccagattcactatcagaaactggaactatttgactgccccctacttctgaggaattctcaccagctggtttgttgacagaatctacagctagtttttccatttcaacaaagtcatccatcaaatttatgtctgaggctccaacactttttgatagagatcctttctgtttttcatttcggaagtgttccaattctgaaattaaagcagaagcccatgattcagcacagctagccttatcatcactgtcaacctcggacattgatgcaagggagagctcgtgtgaagcaaaactatttcttcttggctctgttaacgttgaacctttcaaagactcttcaatctgtgactcggcttgtgaaagttgggaagctttatgaggggacatgttttttgaggattggagttcgtttgtctttttaatgagcacatctcgaagagctttgttttcttcttccatagcacataactgctcagtaagtaggataatccttttgctgtgtgtatctaaggagctgtttcccatggagtttcttctcgtttcagtataatcccttcccagcaattcaacttcatttctcattttcaacacggcagcagggccaggcagtcgcttcctaaccaggagacgcagcctctgacactcagattccaacttcgcaattttcttcacgctctccaaatgctgcctgtgtgatgcgtcagcagttcgacgattgaattccctctcctcattacggatctcaagctctttctccagcactctaatctcatatttgtaggcagcattatctttttcagtggattctaatctattcattagtgagctgaaatctgcttccacctgactcaactgtctactcaattcctctatcaatttttccttcagcacaagagtcttgccacgatgagcattctcagcagctaccatggcaagccttttgtttgtttctgctaacttctcctctaaaaccttctgcgtcttctcgaattcccttgaagtctgcatcacagcatcatgaattctttgctgttgctcatcccgaacaaatctcagctgctgcatacattccttgagggctgcatctaaatgacttaacctttcttctctagcaactctctgctgcaaagcttcatccagttgtaacttcagagacgccgcaccttcttctgcattctcccagcctacacaaacatttgcaagaaaaacagtacatcaagacataatctttggaaattcccaaaagagccaaaacagaagactgttgaaagggttaatagtgaatcaaaatttacccttcatagcttctagggccacttttgcatgtttctctacaagttcatctttagagttgcattctgagagagcagatgaaagtttatcatttaaagttttcaagttcttctcaagttccactttctcatccagaagagcctgtatctaaaacaaattgagaaacaatgaatattagaactcgtccccttaaccaatataataaagctccaatcaaaattttgagcaaccttaattaagaccaatcaaaattcttaaatgaagcaacagattacttaggaaaacagttagaaaccagaaggaaccattaattaggctctaatttttgcactgtgctaataagaatcagattatcgtttcacctccgaaaaattataagaaaagacaatataagcaaatcattttaatgcattaagccacctcaatctcggtagaaaaaatcagactcagttccaatttaatattcctcttgctaattaattaccatctttttatgaatttcatttccttattatgtcatattattcaaacgtgatcatattaccattaactgcattgtatctatacattctaacccaaatgaaaacgaaattgaacttggaatcaacaaaaaaaacaagtcatgcatataattgtaagattagtcaatcatttatatattatcagctatataataatgtacgtaagtccaaaaacagaaaacgaatccaacaccaaaatagcgcaagaagaatctgaactcaaccaataaagagtattattacgtaaatatgcacgccttttactttattctaaaatcaaataaaatagaagtaaaagatatattaagttacctcatcttcgttccctttcaaaggtttatcaatcgcaacactattcttctctatcgatttctttctccaaagccatgccttgttcgtatccattgttacacgaagcttcaacactaacctaaccagaaaatctgcacacacaaaaaaaaatttactgcttcacactctgtattttcagctaatgccgatcatcatcatcgattacgaaaaaaaattcttcaatcagtgacaatgccatcaaacaacatatatattaaactagacacaatcttgcatgaacaatcggcacagcatgtgagaatactgatcatatatatacatatacataatgcatacaataccttaatgcggcaatctccgatctctccacgactcacacttgcagccagaaccagaaaattaccagaggtttttagagatgatgagaacagagtctcgtaagagagagagatagaaagagagaatagtgtttggtagtcgagaaaaagtgaaatgaaggaaaagtaaagttagaaagagaaagaggagagagagagagagagaatttggtgtagttgggatctgactgagtgggaaggagtgacagaaggaagtgaattagcaaagaagaggacggtgcgcgtagctaacacgcgtgagagtaggagagtgagacgttgacggtgttgacgggctcttgtcgcttttgcttagatcggacggtgagaaagagcggacgtcctagtcagattgtcagatgtaatctttagctaagcagtcttgatatcgtgtcccctttaaatacttaaaaaataaataaataaa

SEQ ID NO: 188743 - DNA, 1191 bp, Cannabis indica
gaatatgaaaggtaaggattacctgaaatgtcctaaaatcccagctacagccatagtcattccagcaaagtaagtataagtatctccaacaaaaaccgaagaaggatacctaaaaccatgaaaaatgtcatctttaagtacacatccatgcaagaagaacaaacaaaattccaagcagaatattgtagcagtttaccagttgtaagcgagcaaacccaacgaggttgccagtaacggttgaacaaggtaaatagagaatacatgagcctgcttatagtcaaaatctgtagaagccccgatttgcatgatattatgaatcacaatctgcatcataaattgctcggtaagcaacagttgtattttgtaaaccgcaaatgttttaaaaatcggttatacttacagcagctgagatgacgactgtctgcccgacttcaagaccatttataccagcatgatattgatcgagttcgtacaaaagaccgccaaaaggaacatgtatagtttatatatccaccctacacatcaaaacttgctcgtaaggattaagtaggtaaattaattatcaaaccagtgactaacaatccaaatacaaagatggaagatagtttgagatgttaatcatcatgtattagaaagaaagttgaaaataatggaatatttttacttccacatcaggaaacatacctagatgcataacctccagaccgatatatggaataaaaggcttcggaataacaatagttgtatgtccagcataggccataagcagaacaagagcagcaaatgatggtagtattagtttcctgctcttcacaatttccaggagaatcttacattaatacaaaaatataaaccgaaacaagacatgtcccgcaaaatgaaatgagcatacgaaaggtaattttttaatattatttataataaatactcacaccctccaaggtagatcgagaacatcatcgagaaatccaagaaagagcataaaacaaatggacgctaatgctgcattgtactcaaccacccactgcatgagccatggaagattatatcagcaaagaagatagaaagaaaaaaagttgttcagtcatcctcttttctatatccatctatctgttatacatttcatgttgatcacattcttcatcacattttgaaacctataatatccaacttctgcatggcaatgccatt

SEQ ID NO: 188744 - DNA, 1635 bp, Cannabis indica
catatattatatactatattcttcaagtactcgttattttcatatcttatatattcagtgtaatttgaggcatctaaaattaaaagatgaagaagaaagtagtacaactagatatataagatatgatattaattgataatttaataatctcacagtgatcatttttaatgaattgttttaattgatcagagggattccctaatttagctaacataataatgtaatgtaattaattagaagtgattttgtatggtagaagattggtgttggaattggggttggagttggagttggacttgtcaagaatagaccacatgacttggacatcttcataagcacatgccatgacttcaccctcaagctgatccatcaccaatattctattactctccctgctgttttcttcttcttcttctgcatatacaatccatacatacatcaatatcatcacactttcaataatatatatatatatatatatttatatgatagtcatatacaattatacatatataccttggagttggaggtcatgatgatgagatttgttattagtagtagtggattgttggtgattgaagaaagtgcgagctttcttgaagggagttgcaatggtcttcttccaagatgccatgtataaattcctatataggatatgatatggtatgttatatatgttctctctctccagtagtgtttataatataactcatctacaattaaaaagacttatatatacccattaattgtgtgtgtggttctacttttgctcatgagaataggaaagagagaggcaagatccgtgagatgaggtaattatttattaaaaaaaaatgagaagagaagactaatacatacatacatgatacatgtatatatataatagatggaatattattgcttgtgtgttccattccactccaccagcttcaactttcccacatgtgctacacgtgaattcattttcctaattaatttccttttctcactcctatccttcctatatatggcctactcctatgcctatccctattcatacatacactacactacactacacatatatgttatgtaggtaccattaaccatcattaccaaccaaccatacatataatagggaaattcggtaagagaaatttaaatttatatgcttacatattaaatttttttaacacaaacttattaaattaaaaaaagaaaaaaagaatactttaattaatacttataatatatttctcagctctactaatttcactatccatactttctattttcatttatattgacggtactctgatggaagtctaataatggtccgatggtagcctaatgatacttgtttttttatgtttgtatacttaaaaaatgatagcatcatactattatcggaccaccattagccactatcgaaccatattctacatttataaatgttaaactccattcattaagctcgtgaggaaggcattatgtcactatcggaccaccatcaaactaccatcgaaccatatcctacatttatcggtagcatcgagccaccatcagaccttcatcttcaacttttactcattttaacaatatgaaagcatcatgccaccatcgtacgactattgggcctggcagaaaaatcaattt

SEQ ID NO: 188745 - DNA, 3685 bp, Cannabis indica
ttagtcgtttttcttttttttttttttttatccccatttagttccttttattgagataaaaattcgtaatgagagaggattgcacttcctcctcttaatgatggttatctgatctccttgcagcttatgaaattaatccagagcccgagctttatcagaacgatgaatccaaggaaattaaccaggtagcaaagtagcatgatggttagatgatatacgctatcagccgtgcatttcgtaggagtaagaagatttaaaacttcacatatatacttgaccaatgtagtagtttgaataaagcaggttcaacagaatcaggggcccagaaacaagagaagaagaaaattaggcgccgttatcatggataatgaacaaactattgttccaggtcatgtataccaatcctggcttcaaaatccttcggatatcactttaaaaagaggaagaggaagaaatagaaaggtataccccttatatcttaactccatttatcagttcataattagagcagatcaaagctcaattggtgaactgacttcgaaggttagctgaaaattctacccagcttaatttaatagatggagaaattaacagtgtttggttcgtattgcccctgctcttaagcgttattatccttgcaaatataaagaataacacctccttgccttttattgaattcaatttatgaaattatacattatctatagcagtgtaacttttgacgatgtaagtttgaaagtggctctagctcaatacaaacaatagaatggcagatagtttattgtccgttctgttatgcagcgcaccggtttagtgtccaatatgaagatagctcatctcatggagcttcctcctacggtacttatggatgatttatttaggaccggaatcagagaggtctattatccgcgacctctgatggagatgtggataaaaagtgtccaaattcctcaaaaatcaccatctggtctgtgttatttgttgggaaattatttttcttaagatattttgtaatttaactaactcttgtagtttcgtcagtgaggacctcgccagctctgtctcctgaagcaagagtatctctaccacctgaaggaataaattttcaagatccaacaggatttgtaagccactcaacaagagaaattgtttatcaaaaacttaagcttatacctggtaatgagaataagagttaaaatgatataggagtttcaagattttcaaagtggagttggctctcgccagtcactaaattctttcgaaagacaacgagcggatactgtaattcttatggacgaactacgagctaatcttatgaagaatggatctgggaatactgaagcaaatttcatgcgcactcctgtatattcaggtagtataagcctccgttaatgattgtcatatacacgttagtttttaggtataatgatcttttatatcaataatgtttcagaaacccaacaaaaatacaataatgtttttgttatgtttacattcatgtgcttacaggcgatgacgtgagatccattccaagctcagtttctggacatacaattattttgaataatgtagaagtcaattcgggacggtgagtagtgctagtataatatatattctaatgtaagagaaaactttttacatatgaagctcaattcgaattttatgctatgtctaaatacggtgtaaagtattttgactatcaaaagttacaggtccaacaagaaaaggacttattcttcatccagaaacagcaacaatggacttgaacctgtagcggaagagaatgcatgggataacccagatcccaatttcaaattacaaagactgtctgagaataatggccccactccagattatggtatataacatcatattgttgtgaaagatgcagtagagattagatttcatcgtcaacatttttgctttgttgacagaattactggtggaaactggacctacacagacccagctaccagtaaacaatcaacggattgacagaataactgactgtataagcatgtatgcttttttttatttttttatttttttatatctatttatccatagattcattaaacttttcatcatggtaatttcactttacaggcaaatgaaggcacattttgatacaccaggcgcacctcaagtagaatccttgaacaatctagctactggaatgaaccccaaagaagcggctttgctcttctatcaaacttgtggtacaaacttcgcttcaagatctatatgctatattcttactatgcatactacttttatgcgcaccacataatcacttttgagcttttagaactttggacatactaaaatctaagaattagcaactatatctgcagttctagccagtaaggatgttctaagagtcgaacaaaaggttccgtacggagatattttcatttccaaaggaagaaaaatgtgaactgaggtgcagtgaatttagcacacggaaggttttacaacatattacctatgtcacagctaatactattgggagtaactagtttatatgttagatatattttgtccttttaatctactaagggtcatagatttcacgtaattctcctactcattatcagaacaggagaaagtaaaaagtgtccgtcttgcttgatattctctgtttataaattgttcttaattagaatcacagagcaagtttcttattagcctaatttgtttatagggtgcttgctattgttgttgtcaattacatataatattttccatcatgacgtatgaattctactactcttcatattatctatgtagcatcatgtaacaaactggctatataataccatcgtagaaagtttcatcaattgcttacctgactgtatgtgattatcaatttcttttcctttagtcttatgttgtttttttctttttttgacaaatgcctttttttttcctttgatattggacaacataaataaatgggaaaacatagtgtggatattatgaaatagagcgcccacatgaaagaaattcagtgcttatagaatcttaaaggaccaaaactggagacgacagatagaggccaccggggattagttgaagatatagtggttacacattgtgcacttatgaacaactcatatataatttccacaaggataacattattataataagggataataataatattaataattcaatatattgttgcacatgctttcacggttataaactagccattttatatttaaattctttataactgtcactatatctctctgtatatgcttcgtactcttttttgataaataatttcatacgaaggttctctggtcaatgcacttatttggtaagatatagttccttcttacgtttcgaagcaatactaaacgcaaatacagaacatctttcagtacaccacaaacgtgacaactgttactaataataaaaaaacaaattatcattcaagataaaatcattaaatttataatatccattcatgcgatattcatttaaaattcatatccttcctgtttgggtattttattttggtaaaagaaattaaaatacaatggaaataaaaaattctactccacaattgtatttactgttgtaaaatcattgttcgtcgaactagagaaaccaaaaaatcagtacttttgattctgtttgaccatatatactaatagggaaatttgacaatata

SEQ ID NO: 188746 - DNA, 2302 bp, Cannabis indica
ggctcaaatcccttttgttttccattctcaatcgccacaaatattactataataataataataatcataataatgacaatgaaaatcccttactcaccacaatctctcaccacctcgtgcccgctttcgagttccaattttattccaattatcccgaaaatgtccacgatctcgatactatgccaagtcctcgtttggtgtccacacacattccttacgcgtctcttcctgattctattaacaaactttccaagtctcgaattatttacatcagtcgaaaccctcttgatgtgatcgtgtctttctggcattttgcaaacggtcatccagagcgtctctcgcgcgagtggagtgttgaatattttgtggacatgttttgtaagggggacattacctttgggccttattgggagcatgttttagggtactggaaagcaagtttagtgaggcctgagaatgtgttgtttttgaagtacgaagacttgaaagaggacagtgttggtcaacttgaaagagtggcggagtttgtagggcttcctttttcccaagaggaagtgagtgatggagttgttgagcaaatattggagatgtgtagtttgagtaaattgaagaatttggatgtgaataagtatggtgaagtaaggccaaacattcataataaaattttctttagaaaaggtcaagttaaaaataacattaacaataatatgttttggttttttatattaatctataaattgatgaaaatgaaagaagacgagctcaacaacaacaattcgattactatatggtaaattcatcaacagcagcaagtgcaatattagtagaagaaaaatatcatttcaattccactttattcgacagtataacttttactaatatttcaataataataataataataataataataataataataatagtattacgctacagcaaacaacaataagcatcatcttcggagttcatgaatttactaagaatcaataatattaacaataataataatcaagattttggttcatctttattctactttcctctacaagaagaagagtccaataatgataataatatatgttgatatttgaccatatcaataataaccatctagttgggttgtcatcgcggctgccgccattgtcaccgcttcctcgtactccaccttcgtcgactgtaccctcgccaaattttgaacagtacaactctgacgacaccaaactcatccactctttcttccccgtcaaatgaagaacaaaaacaaaaactaagtaccgaatcactaagaggaaataatctaggagaccagctgagacagagcaatatatacataaaagataataataaacctaaaaataatatatatccctaaaatttttaaaatataaaaacctatagatatatatttttttaaaaaaaataacttacatgaaatgggttttggtgcgtgctgtccttgctggtgcgtagtggtactcggtggtggtggtggttgagaactcggtagtggtagtggtggtggtgttactcggtggtggtggtggtggagaagggttgagagagagggctgaagaaagttgaagagctgagagtaaaagtagggaaaataggtcggtggggccgggtattaattatagacttattagtggctgggtccaccgttaatgctccgccactaattggtatttaaaaatttttgaactgaataggcgagaatttttccatccacttattagcggcgggcccgccactaatagtataggcggcggacctccgccactaataattttttaaaaaataaaataaaaatggagtattagcggcggaccttcgccgctaataattttttttaaaaaaataataaaaatagattactagcggcggaatttagagtccgccgctaatattgccattattagcggtgggtcatctctgccgctaataattacgccgcaaatgaacaaaattattgttgtgatgctcttaaaagtattcattcgtattttcaagaagataaattattataattttattttaaaaaacttttaataaataatatattacaaatattaatttcgattattttttatttattcaattatatttttttattaatttattccgattttgaatattgtatagtaaatgtgccattaatatattcaattttcttttatataatattgaagcaaatttgcaaggcaaaagataactttaaattactaattgatagattgcaaacaaaagatagattgctcaaaattaaaattacatttgaaagtttatgtgtgatttgtgg

SEQ ID NO: 188747 - DNA, 2116 bp, Cannabis indica
gcacgacatgacacgacacaatctatatttttaaggcacgacacgacatacttagtcttttaaaaaatcaacacaaaaatataagtcggaccaagccaactcgatatgcacgattaaaggcactaatgagtaaggatagaacgaggcaggtaatacaaaataatgtcgttttatagaaaacgacataagaaagtcatattttggcagccatatataataatattaacataatttttaaaagaaaaaaaaaaaaaaaacaattcttcttggcctcacatatttggtgggtaaaggggtgaggtgagctctcttctctgagaagacatggaaatggcggtggtctcagttgggagacctcatcacttaccctcctcctttcatttttctaacactacaaccttaaacacctcaacaactctcaagattccgccattaaaccatctcaactttctctcttcttcttcttcttctactcgttgcagattagcttctgtcgtggaacaaggctcctcatctccttcctcagatgattccgccatggaagacgggaacaacacctccttaaggtacttcactgaaaacccatttctccaaaactgaaaaacagacacaaattctttactgggtttccattaatgatgaattttgatggtaaaaatcaaagctttatcaaatcttagtttaattgaagatagcacagccataattatttctagttttattatttcaatggtaaatattattgtggattttgtatttagtaaaacttaacaattaaaaatcaaagctttaaattgaagatagctaatagcattatcatcttcatataaaattataaattgattttttatttttagtttaattatttcagggtaaatataccattttgggtagtttgtttagtactaaaggttttcaataaaattgtttattttgttaaatgagaatttaactcttatgtttgatcaaaacaaaaacataataatatccttagggtttgtttgtgaggtataaaaatataggaataagaataaaaatagaatggaataaaatttaaaatttataaaaaagaaattgatagattagaattctttttcgaaataaaatgatcatttgaccaaaatattagaaaggttattctattagaatactttaatagcaatcaaacaaaggaaaaaaataaagattgtttccattctattctattttattactccaaccaaacgccacctttgctctttataatcgtttagatctgaattgtcatttaacaaaacatttttgtaaaagacaggtctaaaatagtacttactcttatttgcttctagtgaatttatttttgaatgtgtgaaccaattttgtggagtagtggttgtaaggcttgtgggagagaagaagtagagaagggttgcaatggtgaaggaagaattcaaggtggaattgctacatttccagggtttggttggtggccaataaaggcttatagaccttgtcctggttttgttgaatctggtggtaggtataaaagaactggtcaaagcttggatgaagttgcctttggaagaagccaaagagataagtcataaaggtaaaaaaacaacttacaatttaccattgcaaaaacaaagttggaatgatgaaacattgtattgttgatattgataggttttgtttttgccttaattctaatcttgtacacttgtattctcaatattctacttgaaatgatgattttttttaatattgtattgttgttagattaagttaggtaaatattattttgaattttgtgttttgtaaaaattactgattgaattttatgttttgttaaaaataaaattaaataatagctcgataaagatgcgttataacaaagctggttacgttttatatatcttttcgtgcttgaaattgttttcaagttttgttatatcaaaaaaaagtgtccaaaattgaatttaaggccttatttatactattttagaaaatacaagatctattttgttaacccaattaataacttttataaactataagatccaaaatattgttaacccattaatcaacaaaccttaactagaaatgttagtgcaaatattaataaagaaaacataaa

SEQ ID NO: 188748 - DNA, 1096 bp, Cannabis indica
aaaaaaaaaaaattcaatatagacgaatggtttgacctctcacattcccttttcaggtttccttttttatttatttactctcataataaaattacacgtaattaaaaaaattaatgaaaatttaaattcaataaacaaataatatgtcggtaaaaaagcacatgttgactgagatagaccattcctacgataagacacgtgtaatcaaactattggctaatgaaaacaaagcgagtgaaggcccaccgttatgtgaacagaaccgcgtacacaaaatcaaagcccatacgtatactcaattaaaactcttctctgtatatatatgtgtaaagatttagctggaaaagagagaaaaagggaaacaaaacgtcgtcgtttggagtttgggtggctctagtggcggtggtggttgtttctccgatcagtaatggctaactcttcttcttcttcaatcttgttctcttgttacccaattattctgatcctaattctcactttctcaggtatgttatgttatgttattttctttgttgtgtttggtttccgagaatgtgtgggaaaaagagaattttgtgtgattgagttgatgggaaggagaaaagactctttttttagacgaattttgttgtttcttactttgggtctttcgtgtttttgcaaaagaagaaccgaaaatttacttaactaaccgacttttcaactttgctctgttttacttcattttcttagtaaccaaactgagcattttcatgtatgagtttgttaagtttgttgtctttcaactttttctcagctagaaattttttatccacctatccaaacagatttcatctcagcttgaaacttattgatctagaaattttctcatattttctttgtgtaattactctgtttttcagcattttatttatgcatttttacgttaaatttttcgtctttcaactttcttagctcgaaacttattgatttagaaattttctcatattttctttgtgtaattcctctgtttttctcactaaccaaacggagcattcccatatatgagttttacgtaaagttttctctctcaactttctcagctcgaatttctttcttt

SEQ ID NO: 188749 - DNA, 4522 bp, Cannabis indica
ctgctcacaacttgacaatgacaaatgccgagatgggtctgtttcgaacgtgtagccggagatgagaatccttcggcctatcattgttttcacctaattgtttcgaattgtgtcaactcgatcgatgaggtctagtgctttgatcctgtctaagtcaaagtcgatgactggaacggaggacggtcttctaatggggaatggatctcttctactttcatttgttggagagtgattactactcttactcagtctatggtgtttgcttaacctcgtccttgctgtgtcaaattcttgactcttgcttatcccgggtgtcagttttcttttactcacatcacgaagcatctcttgatcctcaacagtcaacaaaggcgatggacagttgggcttgcccgaagagaagtgaatcgttttctggtttggagaacgtatcggagatttcacaggagacctaatgccaccatttgcagcccttgcttggctgaccaaatggtgaagccataccaccaaatcaagaatatatgcttcggttttctccttatctgcatgatgtagagtctcaatccttaacaagtcagtctgaccagcaggttttcggtttacatcagacctaaagaaattaaatcggataagcttggaaagtacaacaaaacaattataggacagaaattgtatgaaagcttaccctgtgtttgcccattctcccacccaaccgaagccatgatgagccctatttcgataaaattgcaatagaaatgctcacaggttaacttttaaacaattatactgaaaagacaaatcaaaacaatttaattactttgtcaccctctcttggatattaaaatacgagttcttttgcagtgaatataaggtgataaagcaaattatgaaatggggataccagacatcatcaacccaacaaaaatttactccaaaaaatagaatgaagctttacttggttgtattatttgcaatggggacaagccaacgcaatgttttctccatttcgcatttgatttgagggattgtaagctgcaagaaaatgcatgtggaaagattatgactaagacaattcatcccaatcaccgaatttctaagtacaaggactgttacaaaccatcatatttcagcgaaaaacaagttcattttggaagaaaataaagttacctcttccttgacctgaaatgagagtaacttcgaacgcaatgccgactttatactaggtggaagcccttgatataaggcatcccttgtattaggaggcacagaacttgaccgtgacacctgttaatatatagaagctaccatgagtttatgtcataaagcatcatatttcattcgctcgaaaacaacttagcattaaatccgtaaaattacttttcagtgtactattaagaaaaatgacacccccacattctaataatgaaatttatagaaagataataagtaatgataagaaatgaaatcgagatattaataagatggccacaaaaacagaacagagttccaaaattttgaaagaggatacaatcatctttccaatactacgatggttgtagttttattgtaaataaaaattcaaattgccaggaaaacattgttatggcaagattgtagcaaaaaatcctcaatttttttttcttgctctgaatttgatgatgcctaaacatgagtaacgtaatatgtcagcaaactaaaatatacaaatggatagacaaaatcttacaagagtatcgatttgcgtaataatatttgcataatgcaatgcgagaccagccgaacccaacttggtctgtgaaccttttattggtttatcaacatctgcaagtcacagagagaagatgatcatcacatcaataatgaatgtattattttgtaatgaataaaatgtaaaaataattaagctagaaaacaaagtatctcagcagcatctcataatccacacaaaagtaaatgactgacgataattagaaatttgatccagcattttgtttaatgcataccagcactaccaaaggcttcatgaatctccacatgtaagaaatgtactacatcgacaagcttctccattacctgtaaatacaaataaaaacttcaagagagaaccattgtctagaaaagtgaaataaaaaatatatttttaattataaagtgcctgcatttaaggagtttccagttaataatttctgtactccatagcatcagaaaaatataacaagttgtttcaaccatccatttttcaagatcacaatagatgaactatataaaagtaatgacttgttacctcttccagaatcttggaccagagggattttttcttcaagtttctcacgtgcttcctttgactttttaattctgctcttaaaatcgcaaggctgtctcctacatgccaagggagttggtaggtaagcaagaatgttatatttgaacaaaaaatgactaaaatgttatatctggcaccgcatttcgtattatgttatttgaagatcgaaactataaaataatattcagtaaatgcccaataaaatttataagaattgatttttaaataaatagataaattatattacaaagaagaaatttgatcagtcaactttaattagcattcttttaagagtatagcatttattgttgagtcaaacatggcacaattctaattttgattttttttttttggtcatattgtgataatatagcattgcaacacaatttgacattacattagataagctctaacctctttgagcagcatttgaattatcctcttcgtgttgtttacgtcgataatcttgttcaaatcggtccaaagcatgcagctcatgatataattcctgacccgaacaagaaaaaaatagcatcaatagtatccctcatttaaattcaaaatatcaaatgtccattaagttacattttcattatcatattgaagttataacatttcatcaaaattacatggatgcgccaaataaacaaatctgatttcagctaatcttttgaagacaaatgaaaactttaaagtaataatgtggaagaatattaccaaattggtcaaagcaaaaagagaatgagtagtccatataaacactaaaccaatatcaaagagtttggaaatgagacctatagactaatattcttctccaaagaccctagcatgttcaagaagtcctggaaagaatgtttatttccttctcttccaacaggcttaaagttattggattggaagcaaaaatacagcttaatattagagggagtaaggaaaaactaaaataatgtccagagttttcaaagcctttggagcacttaaaattttcagtttaaaactgaatatctttctagaacaattctattctagaaatcagatcttcagcagtctgaaacacaagatcacttgaacaagtttttttggatcttcagtgtaatgatgtggaatagacagaatgcaaaaaggaactaccacacaagataaaatttgacatgcaccctattcttttagtaggccaggctccaaggtgacgagaatatatgaaataaaaagcctctctaagccaaaacgtaaacagaacctcaaatgtatggtatttctataattcaaacatcacaataactaataagaaaaagatgggaagcaataaaattcagtagtatttgttataggataattgtgcttatacactcacagctgtatgatgaaccaaagtcatcaattgctccataagtgtttctgcgtcttccttcaattgcttctgtggtgtaagttcagaacccagcctatcaatagagagagagagcaaaagtcaaattaatcaccaaattgaagaaattcggttaaacacaataagaaataaaagcaaataaaggataatttgacaacaaaaagattacttctcaaaatatcgatccaaattgtgccactgaggatccttacaacgatttccaaaacgtaccacttctccagaaaatacatttaattcttctctgtagaaattgttgaaataaataaaaagaaaaggttaattcctctcctaatttaaaatatctcaaaaccaaaggatctaaggattcgatgaaaaactaaaaatgaataactggaatgacataacacaatttctctgaataacctcttgtcagatgcagcaattctcatgagttcatccatgtctcgcgatattaaattctccactccttcagatgtcaacacatccgcttttaaacgtttaatgttatctttagaaagggagtccattagattggaacctttaacaatggtattagcaacttcaaaagcgagtatagaaattttgtttcctttcgttgtcacccctgaagtaaaactgctactcagattcaaatttgtcatgctactaccaagtgtgtccaatacttcaactgccttcccaaagccaacagtaccagccctacccaaaagtgagctcacttctgaaacctatatcaaagaattaaacaaccccatcaaattagaaaatagctatggtatctcaatctctacattgcttaagaaaat

SEQ ID NO: 188750 - DNA, 3460 bp, Cannabis indica
aggatttcttcctgcaactggagctcttcatcactatcatcacgttccagtcacatcaacaggtttgtgacattacagtacccatgtcacttgtatatagtaatatcaacattttaaacccctatatcattgagttccaagcaatattatttcatagccgtgttttttttgttaactgatgttagtcctacgtttaattgtatgaattttagtcattttttcattatgatgtgttccttttattgatacgggttctgcagttcgagttgaaacaggagttcaagaaggtgacactgttagtatgcattatgatccaatgattgctaagcttgtagtatggggagaaaatagagcagctgcattggttaaattaaaagattgtttatcaaagtttcaggtatatcttttctacactagcaaagacatcatagttagtaagcttttttctccagtcagatattctgttatacttattggataaccccaaaaagctagctcaaatggtcatataagcggtttgctctcagattagggttaggtgggatcctagttttgaataaaaaagaatttataaatgtttggtgaatgctcaggtaaagttcgttttcagacatgtctagagtaggtttatacaatagttttcttttatacaagtaattatttatttttattttaaataaataatacctaatgattcctataattattatagataatacatgttggatcactgcgcattgatatttcatatttattttgtagttttgttcatcctctctgttcagtgtgatactattgacacatatttaaaaaggctgctgtattcagtgtcaaatttcatatgaaattaatggttattttctcccgcaggttgcaggcttaccaactaacattaattttcttcaaaaacttgccaatcattgggcatttgaagaaggaaaagtagaaacccattttattgaacactacaaagatgacctcttcattaattccagtgattcagttttagaaaaacaagcatatgatgctgcaagatttggtgcaactttggtagctgcatgtatagttgagaaggagcactctacacttaaagaaaaccttactggtaggtttgatctcaagctttgggttgcaatgcaagtccttttgtaagagactataagtacttacgtatgatgttacattcagggggaaatggtttactctctatatggtactcttctccaccttacagaatcaatcattgtgcaagtagtacaatggagcttgagtgggaaaatgagtatgatatcagcagctcaaggttattgacactttcacttacttgtaaaccagatggaaggtatctgattgaggtagacttcagcttcttattgtagtgaaaaagttatttaattggccattgttgtatctgttagttttcaattacaggtagcattttcatttgaacttttttttcttacaagtctctgctccatgatatacagacaaaaggaaacagtaatcctggtgtggaaatcaaagcaggaaaactgagtaaacatgaattcagagttgaagttgatggtgtaatcatggatgttcagttagcagtttacacaatggtatgccagcttttatgttatcctgtattattttttaggcctctccccacccactagaataatgaatagccttgtgtatgatttttatatgtcttgttcgttcagttgaaattgtaattcaactatttataattcaaatttggatcccaggaccagaccaagcatattcatatatggcacggttcacatcatcatcatttcaaacagaaactgggccttgaattgtctgacgaagatgaatctcaacataagaccaactttgaaacatcgtctcatccacaaggaactgctgtggcacccatggctggtttggtggttaaggtgcttgtaaaggatgggacaaaagtagagggagggcagccaatattagtgttagaggcaatgaagatggaggtttgtacaagatccaggattctagttgcgtttagctttagaatttcatttctctatacaggaatttaatgtctattttttcattttcttcttaaagcatgttgtaaaggcacctttaactgggtacgtccacgggcttcaagtaacagctgggcagcaggtttctgatggcagtgctctctttagaatcaaggttagttgttttgcaactcgccaaagatcaattgtggatttttgctttatatgaaaaactaggttgcatatttctccctatgatgcatgaaacttggcttggctgtgtattatatcatcatgtgcaattagtttctcttgaactttgaaaatagacacgatcaatatatgatttcctatgaagaaagagatgtgagaagattaagtctaatataacataacatgaattagcaggaggagcagcagcagagcacttgatgatcctcacagttgtagattcacttgaataaggaattgttcttgaataacgcaacgttgtctgaataaagctgtaaatcgcataaaaaatgggtaactcaactctaaaatgtaaagcatttactaattgtattttggtatatgtaacagaaactcatgtatattaatctgctggaattattaaaagataaataatacatatttttgtgttcgttagttacaagattaatgctgagcagttcggtattcttgacctaaaatagtcttgtttctttgagattttttgttccaaccaaaatatgggagaatttctcacacccaaaaaaggtggatatctcatttttttttcactagttcaattccatcccaattacacattacaggctgatggacctaactagggttcattgactagttagaggagtcttttatttgcctaattacgactgtttatacaatttggaatttgttgttctgatcctaatctattcagaccaaaccactggattaaccgagtagtttgactttttgattcaaccatagttttagaattctcactaacggactaatcaaactgcctattatatatcttactataaatgtatattgtaatggtatttcttaggttttaacagaattattatataaatgtctattgtaatggtatattttaggttttaacagaatttgttgtgcatgttaacagaatatgcttttcttatgatggaaactaatgtttgtttttatatctaacatacctatttgaaaagttagcaatgcttgtaatgaaattgaaaaggcatgaaagttagatcattcttaacaattttttaaactctacattgattcatcaactaatctttttaatacgaaaaagtgaaccagatgaaaacgtgcaaatctgcaaaccttgaagtataaaacatatgaaatttataatgttttataaaaaatattactgttctgccatttgtagtgttttttttttcccattctctttgatgttttttata

SEQ ID NO: 188751 - DNA, 2891 bp, Cannabis indica
acgcctcttttatactctagagcaaattttaatttcttgttatatgtacataatgtgaatctcaagtgatgatttggattgggatttggctctttaaaaaatcgaattaaactttgtgttattgggttgcaatccaaatgaatttattatatacttgtatgcttaattagttaacaactatcatatgtatttaattttcatgtttttcttttaatctggtttaagtctaagtttgtgatatgcggtaggcgctattgttctgttcactatttatctttatttatttgtcgttttgggtaagtaaggcggaaaaagaaaggaccgattgaatattacacatttctctggtgtgagtggcaacattctaaactgttgaagagaatatttttctccataatgatgagcatattaggagggaggtgaaaggctttatttggcataatcaattattagcagataattgaattgcgatgagcatagttagcatagtatgatctgttactcatgaaaataattaaatttattgtgagcacgatctcataatttctagcttagatacttatattttatttagcaaggtgtggataggtagatacacaagccacatattttgctcttgtgtctatgagagataagctactaattaatgtgactacaaatttaggcatgagcttgatagtgaagaaattcttaaattgtagtagtgttgatattggttctcatatataattaatatgttcttggaaagatctagtaattaatcacctaaaggaatgaatattttcaataaattcaacagtcacttatcttttgtcatacaactactaaaaatttatgaggggtttctcagagtatttaaacaggatttttttctctttctgcgacgttaaggtgttgtattgctttcatcagaagaggcctcttggaccagtacatgttgcataaaaaaggtaaaacaaaaacagaatattacaacagattgattgtgtaatcatcacactgagaccacaataattttccatgctacagagattgttatgacctcattcctttacaacaacccttgaatgagagggtgcctcttgtaccctgagtttggaagttagtaactcaaacctatcgtttgaaagcccttttgtgtgacagtttgcaacttggtctgtggatagaatgtatccaatactaagttctttcttcagcaccatcgattttgatgtgtttagtcttggcgtgatataaaaggtttgaagttagagctactacactaacattatcacaccatgtgatcgacttgttcaccatagaaaattgaagttctttgaggaatgttttaatccatgatatgtcggctgcaacgtgagctgaagctctgtattctagctcggtacttgatctagaaacaatgacctatttctttgatgaccatgacaccaatgaatctctgagataaatgttgtgccctgcaattgagacgtctatcaatagggcaacatgctcagtctgcatcgaaataccccactatttgtagctgatcatttgggctaatgtgtaaaccatgtcgtgatgttccttttagatatctcgagactcttttagtacaactctaatgtgtagttgtgggtttttgaaggaattggcttaacttgttagctgcaaatgcaatatccagtcgagtatggcaaaggtgttgaagttttccaataaagcttctataagtggaaggatgtttgagactttcaccatttgagagagacaaaaggttttctagcggccattggtgggacatggctttagattgattgtcttatatttgtacatcaattcctcaatatacttggtatgagtgaggtatagacctatttcatcccgaagaacctcaattccttggaaataattcaatgacccaagatcctttaatattattttcttgttcaagatgtctatgaactgtgggagcttgacaaaattgtttccagttacaatgatgtcatgacgcatataagcgctaaaataattactttttctctgtgtagatgaaatgaggaattttaatctttcaaatttttaaattcccattgttgcaacttttaacaattcgaaccaattaagctcttggagcttgtttgagtccataaaaggacttctggagcttacagacatggtttggtttgttcggattaatgaatccctcgagctggctcatgtaaacatcatccttcaaataaccaatcaaaaatgcgttattaaaaataggttttgtatgggccaattcttagccacgactatggtaagaactatttaaacattagaggctttaacaatcagactaaaggtctcattataatcaacaccgggtcgttgatggaatcccttggcaacatgggagctttgaacgttggaaggacccatctaagtttgttttggcattgaaaacccatttgtttccaactaaataaaagtgatgagagaatggaacaagggtccatgttttatttcttttaagagcatagaattcagtgtccatgtcttgtttccactcatcaatcaggagggcttcagcaatagattgaggaataacaaagtgagaagactaccgagattggccagtatagaccttcgacttaaagttgttaggctttgaacgagtcatcatggggtgagagggtcaaggaggaaacggtggaggacctggtgaagaaggatattaaacatgagaggggcgttctgcaaacatggtcaggtgagttatgatcaaaagatgaagaacttacctcataggatttggtggaggtaaggcaggacagggtaatgctataccaagagatggagaagtgttatatggaagatgagatgaatctaggtgtggtctatgacttgcctaatctgttgag

SEQ ID NO: 188752 - DNA, 1909 bp, Cannabis indica
tttttttcttttttctttttacacctgtcttttctttttgttttcctcattatttgatattgatctttctgggcattttgtcattactatttcaaattctctttctaacatttgctggctttttctttgcattttgcgaacatattttttattgtttgcagtatggccaaattgaactaatttgggttaaaagattcttgtcatcaaagacagacgagcttcttcttttactatatttaggaaacatatcctgtgtttgtactcaggttgtttaacaaaagtttttagcattttcttgattttgtcactattttttgcttacaaattgctgtttatgttggattctgtagacagaaaaggttgatttagagaatacagttgttgatgagagtcaaagacagtggaaggattgtggggtttcttctaggtcgaggcaggataaatttagtggtaagttatgagaacttgtagcaacatttttatgtaccgagtcactttatcatttctttggattgtggggtattgacttgtaataagagagcacaattcctcaaaagattttactcttcttctgtactgagtactaatttattgccttgattatatagtctttgtttgtggtactggaaaatttccaagttagtctattcaagatgaactgatattgcaaaatttaaatgttaaattcgaaagagagtgatttcaaaaattatagtgaatttatcaagtttaaaacttaaaatgatctattttactactagagcccatatattttaccagtttagcatttgacgccacatggcagtggaaaggtggctgaagattttaagtgtcaaatttatttttttaatttggtaagagagagatggtgtgagcacatgaaaggcgctgttatgaacacatgaatttccaatatctatattgcaacattaaaagaataaagagtgagttttaaaatggctgaaacttgaagctagtcaattctttttcacccggtcttcttcttttcttcctctttttgtaatatgtagcatttgattcttttcagttcttatttatctccatgttttataaatttgtaaaatgaagaaagtatttgtgacatttgatgaggttttgtctcccctgatattaaagttgctataactgatgtcaagttctttaggtattgatatcttatcttggtttagttttatgttatgttgtgatcttacctttgcgttcattctttttccagaaggaagtggaagtgagtctgatgatgataatgaaagagttgatgccgcagaggaagaaacagatgatgaagataatacattttttgatactcgcgattttctgtcgtcaagttctttcaaaagtaatgcctcagattataggatatcatcgttttcttctgatgatgatggcttttatgctgttgagtctgaagatgacattgatccagccattaggtatgttgggactagctatccccgtgttaagcggcgtaagaaattgccagatcccattgaaaaagagaagggtgttagtctttggtcgatgattaaggataacattggaaaggacctcactaaaatttgtcttcctgtatattttaacgaacctctttcctctctacaaaaatgttttgaagatttggagtattcttatctcattgaccgtgcttatgagtggggaaaaagggtaagtttctgtgaattagtagttaatatgtagttccattcataaatgtgtttgtgtttcatatgtcatgttttttttctctcctagtaattttgtaggtcactatgacaaataatggagtttcaaacttaatgtggtttaattttatccaaactcgaaacaccttaaatgttttgcattctgtttcatgtggttgttataatttgtatttcccaattttttt

SEQ ID NO: 188753 - DNA, 2724 bp, Cannabis indica
aaaacgttaacttaaaaaatcaatctttctttctttttcaaatctttaatggttgttcactcctattctgaatgaatagagaataacataccactagagatgctgccatggctgtcatcacagagagttaaagctctttccaaattagttacaatgtcagtcatggttggcctctcttttccttccaaattcacacaatgcattgcagtataggccactaactcaaccgcctctccttcgtttagctccggctgtcccaccctttggtccaaaattttcgccaattcaccggccttaatcactggcaccgcgaagtccaccacgctaattggcgtgccaccatcttctgcattcctgaatatggctctctttcctgtcaatatctccaaaagaaccaccccaagtccataaacatcactctttgccgtcaatacgtttaaaccatagtattctggatcaatgtaccccactgttccagcggccttcgtcggcctaaaatcccgacccgattcaggtcccaataatgacaatccaaaatcggaaactttagcagtccaattagaatcgatcagtatgtttgaggacttaatgtccctgtgaattataggcggaactgcatagttgtgtagatactcaatgccacgagccgcgtcgagagctatgttgatcctagttttccacgagttgaggaaactactgcttttctcgacattgttcttgttatgtaaatggtcgtagagagcaccatttttcatgtactcataaaccagaagcctctcttctttctcttcgcaatacccgacaagcttaaccaaatgtttatggtgaagccgagacaagaaagccaattccgaatcaaaagccatctctttctcctgatacttcttcatcttctgacctgtttctcctctcttaatagcgacctctctgccatcggagagcttgcctttgtagacgaccccgaagcttcctgcgccaatcttgttctctaaagaaaagtcgttggtggcggctgcaagctcggcgagggtgaattcctcggcccggtctgcgtgtttcgatgaagttccgctcctctggcgtctcatgattctggagccttggcgcctaatggttgaagacctagacggtgggctagtgttagatgtggtagggcctccgccattggagctggcagctctggtgatcgtgggctggacagagttgtggattttcttcttcccgaaacagactcctgtccataagcagtaaattactgtgcaaaccccgcaaaagctccaactgatcccactatagcgaatgctaataaacccttcctcaaacccctggagggagatgaagactgcggctgcaaaaccggcggcaatgactgttgctgtggcggtggtggggttgatgggatttgagaaaaatatgtcttacaaatatttccattaccggaacagagcttttgagataaaggatatatagtgcagtttccagaaatggtttgaacacaaggtcctggaagaatttctggtaagggaagctctgaatttggatccgtaacaaagccattattggaccatcctggtccccaacataagatagaaaagttcgtcgttgttaatccacaagtgaaattcaaacctgaaacaatagtttcgaacgatactccttgtattgcttccacagaaaatagcccaccaccaccccaacaaaccaccgagccatttcttctgattccgcaactatggttagctcctagagacaatcgataaaactcgaacggtgagccaataggagcatttaattgacccgaagagttgttacctgagcagaccaaaaacccagtactattcaacccacaaacatgtgattcaccggcactaatactcgccatagtcatattcccaaacccactctgtatatcattaacggttgaaacagatccccaacaccgaaccctgttattatctctcaaaataccacaagaaaaacccaacccagatgatattgaagagaatcgatcagacccagatggcggaaatttaaagctactgtcgttcctccaacatttcagagctccggtacctaccaccgtcgcgcaaatatggggatcgccaacggcgatactttccagtcgcacagtgttgttgaagtaaaccctctgcgtcctcacgggtaaggtggtgttctccatcaagagattgtcccagcaaagcatggtgtaaccaccagccctgatgccgcaaatggaattccggccaccggaaatggaggagaaggacacgttgggaaatacgtcgagtggttgttgtccttttctgtagcagatgattctctgccattgttcattggcgactatcccacagactattccggagtaggtgacggcgagagtgtcgccggagccgagggcataggttgaggggataatgaaagagatgaagataacaacgacaacgagagttacggcggcgaccgcggtggaggaggaagagggtattttcgtcatctaaaaggtaggggctttaggaagggagtggtgggtggtgacagtagtctggtgtgcttcattggggggagagtagagaggtcagaggtagaagaaagagaaaagagtgtgagatttcagagtgaaagagagaatatagagttagagaggttcttcttcttggtttttcagtttcagaaacgaggaaaaacctcaacaaaataccctctttctttgtgatacaaaaa

SEQ ID NO: 188754 - DNA, 3717 bp, Cannabis indica
ataagatataaacagaacaaataaacagcaaccaaaaaaaattattggcagactatgccacaaaaacctttatttgctttcccaatcacaaatgttacttgacacacagatcattaggttttccgttttccacagatcgtttcttttgcttccttccacactctaacaataatacaagttgggcatataaagaagacacattttggacaattatttatgcatagacgaccatcaaggcatcaacacaaaagttaaatgaaattagaacccaccaacaaatgcagatggttgtaatttgtattcagttcacagaagcagtctccatttgaccaggctcacctgcttgcaagaggtgaatacctccccaagtcatcgggttccgtatgatttgctgcaataccaacagtgccactttgacgtcgaaccagtagatcccattctgtagttgtctgagcatcggaattaaagacaggttcttttccagttccatgggtgtaattcagctgaggaactaattcgagcccactcatgttctggcaaagaacaaataaacaatttacaagaaagcatagcgacaagctaacaagaaaaaataaaataaaatgagaccgtactgaaggtgccaacactgcactgatggagtgagatggcgaaggtggggcaatatttgagttattgacatctgaccgccaaggggtcaattgatattgagattcctttagctttgactgacaacaatgtaagagttaaccatgacaattaatttagaaattaattaaacatgctccaaaaatcctagttaacctcaagaatttaaaaattcaagtattccatcgaacaatgtacttgcaatgcatacctcagtaaggaaaagcttctcctgcaaatgtttaaacagaacctgcaaaaagcagatgataccattaaaatgcaaacctataaacataactagttttgaactttagacagaagaaaacaactactctcacaagagcccatgcccttttaaataataaaaagataacaaatttgccttccacgtgcttaaaattccaaatctaggtcagtgtaccttccacattgctaccacaaccttctgtggctcgcacctcaatgaaaaaagtggataaaataagaagaaaaagaaaatgcacacagtttgataggtgaagaattttgtataacttaatgtttaactattactgttactagtaacatattcaaccgtggtcttctacacccaaaaaaccatagcatattaaaaaagtcatcattaagcaaatggttgattccaacgattgtcaataacaagatttctcgatacacatagaatgataagattaagtccaaaatataatgctaaaaacttccattttaacttctgataaactatttaaggctgaccttgacattgctgacattgattgggcatcaggaacaggtggctgcagagaatattccgctagaagaggcaacaatgatgaaacaaatgttgatctttcttgttgtgcatcctggcaaaagggaagaaatatagtcatcaaacaactaggctctgaaattaataaagcaataagaactcatttccctaagaaccatttatcgtcgcgcgcacacaaaacaaatgaaaattgaaaaccaggataaaaaataatacctgtaatgcatatgtaagacgtatgttttcctcaataatatcctgtctgtatgaaagagctttagaagcagcatcaacaaggtcttgttgctgctgatcaaaggcctaaagaagggtgataaaattgattaaaagatataatgtacaggggataaaggacggggctattgactgagagaaccaaaaggaataaggcattgaattccaatgtgaaaaaaaattgtgttctccctaccaggcgcatataagcaattctcttttccaaaacatgtttttcattgcgtatttgtgcctcctatcataaagtaagtcatgagtcaaaattaaagataagaatacaaagaatagaggacaggaaaaagtaggaacagaaataaatagccacttagatatctatggttatgctttacctttatcgaataatcagcaaggtgtttccgtaattgcataatctcttcttcatgctctcgaatcttagaagtaagatcctgtaagaattaagcgtttgctccataaaaaattatcttctacaataacaatttctatacccaaatgacaatacctgcttccagagactagtagaattagttacttcagccatcggcatcaaaacttgtccagacaaattgaaacggggatcataatctccttccatttggaacctgagatagatgactcattttcttaagtgttctatactccaacgtaaaaaaaatactattatctgcataagaagtcatataaccttcctgcagaaaatgatgttgtagatgaagcagagagtccagcattatccaccggtgggtgaccaccaggatgtaatttaactgtcccgttgatcttgctggcatcagagtgggcttctgtgtcactttgtgtagtaacatcattcttcggcttcacatcatgatgaacaaccaatgtgccaggtaggctaacagcagaagtgttgttcatgctcttatccctgtcttgttgacttttaacaaagggagctgatgggggagactcataagatccatggccatgcccagcaccagaatgagaactttgggacactgagtcatctagtttctgtcaaaaaccgtagtcaccacatgaaaatgacatagaagatacctactgaataccaccaaaaacccttaaaagaacaaaaattacattatctgaccacatgatctttctcttatttttattttcagctgttgtagcataaataatttactaatagttaagcaaattagttgtgccgagcaaaaccaatggaacttgaaatgaaagaagcatcctaaattcaaaatttgcctattttggaagacgatgcatgcaaagttactcacagttcttttcagtcagtagctacccaataaaatgtctatatatttatatgaatcacgtacagtgcttaagatagtttgggctaaatcctgcctgaaccgaaaactcacatatttctggaggaggagactcttatgttggagctccgcccttaatcggctattctcgtcgacctgttgcttgatggtggcttcggcagcttcaacggctttcatgacctgaaacaagctactatcgttgggattattgatgttatcatcggacgaaggatctccaatggaagagcccatccctaaccctaaccctaacttcaaacccgagaatttatcggccagtttcccatcatatccattctccatggctggatttcgcttggcctttatataattctcaaagtttttggggctttttctcgaaattggaagaaggaagcccttcttcttagatcataaaaatgggactatcggcatgatctcttctttctttactactacaaccaattactaattcttccgccttctattcgggactgaaaaatgaatataacgagacaaagaaataaagggattgtcaatatcattatgttatcgctattcaattatgtctgcgtgcgtgtaatttactaatacagtatttttatttttatttttgaaagggctaacagcatctccaaggagctcatcaaatttggtgttacactgatgttaaaaactatcttcact

SEQ ID NO: 188755 - DNA, 3768 bp, Cannabis indica
agaagaggatctaggcctccagtgcattcaatggcgatcacatcccctcatctcccagtgtctttctactcaaggtattatttctccttactcatttatttaaggttctgcgtttgtttttctgcttactcttttcctgtttcaacccctacatacaacctttccactgctgatcccccttactttaacatggctactttccctgattcccattccacccaactctactgctgaagaagcccttgtccatgatttcgaccatgtatccatccaccctgaaccccaatcccagtcctactgcttagtggttaagattttgtcttcaaaacccctgtaaagtcgattggattcagaaggctatgactgaagcctctgggttgcccattgcccccttctccttctctgaataccactcggggtcttttttctgggtgcaatttggctgtgacggggcgaccgtcgaacgagtcatggagggtcaaccatggcattttcgacagatccctcatgatcttttgcaattcctgatggattcgatacctatcctcccctctcaacttcgttacatccctctctgggtccaggttcaccacattccgttggttctcgatccatggcctagcccagtttgtggctgatacaattggtgacctcattgaggtccacttgatttctctgtatgattccgtcaccccgttcatgcgtgttagggttctgcttgacaccaccaagtccctacaccgtggcatgaatgtccatttcaggaagctgtccctcacaaaatggctgaaatttctctacgagggccttcaaactactgttaccattgtgggaagcttgatcactcttttaataagtgtggtaaatttctccaccattgtgatcaccaccctttcccccccagcctaagttataaagatgtcctccgcgcccctactaaatccatttacaagaaaagtatctttgaactatccacttctattcctttcgaggaacaacctaccctttccaacactgcccgtccttctatcgaggatcacactgagcactttaccgttcccaccatggctgtcccctcccccaccacagttattactcacccgctcactcccctttcctctccacccatggctactgctcctccgattacctcccctattacctcttcctctccatccccacccttgcatgctcctattcactgccccctccctgtccatcctttcacgactgccaccactaacccctctaccaacaaaggaaaagcccctatgtaccctgagaccaccctgccatttgtgagcagccctcctctttccagcctccgcatccatgatactccccctgcccctgactccaccaggaaacgatcctttgccaggcaacattgtcaagttggttcttcggttcgcagcatgctgaaaagagctcgtgcatctcactctgattttgcggtcgtcccttccatgtctgatcatgaggaaacggcgggtgttgctcagcaaccccgccgagaaaaatgaattttatcagttggaatgctcgtgggttagggagttcccgagcattccaaaatttctccctcctctgcaagcagcaccagcctcagctcttttttgttatggagactaaactttctatgtattctacttttgtttctagggccaagatattttttgctaatgtttttcaagttcctagaagtggcttagggggaggattgcttttgttctggaaggatgatattactgttaatattttgtctcactcccttaaccatatcgactgtataattactattaataatataagttttcatttgtcttgttattatggctccccgtatgttactgataaatctcattcatggaccttattgcatcgtctttttgatgttgcccctcttgcaccttggcttatagtaggagactttaacgattaccttggtttcaatgaccgcaattcccacagtttacctccaccccattccatgcattctttccaaaatttcataggtaaatactctctttctccgctttccttttctggaagtcgttttacttggaaacatggcaccaccttggagcgtttagattgggccattgtcaatcaaaaatggaccaacttattccccacggcttcccttcaacacttgggtttctttggctccgatcatagagctctgaaagtgttgctggagggcagccctaacctgtttgcccataaccccacttttcgttttgataatcactggttactcgagcctaacttccctgagctcctgaagaatagctgggttactgatccttccactaccaaccactctaaccctctctccaatttcatctcgaaacaaaataactgttccctttctctgtccacttggggtagaaataaaaaccaatttactcgcaacattaaaagcatccaatcggatatcgagcagcttctggcgggtccttttgtttctcagtccaacgctaaaaaagccaatgatcttcaacgtactctcgattccattttgcttaaacatgaaattttttggaaacaacgctctcgagtcaattggcttaaagctggtgacaagaacactcggtatttccacaactgtgcaaccacaaggaaacgcaccaactatattaagtccatcacctgggatgataattctcaaattaccaacctcaaggatatcatcaccactttcgttcagttctacactggtctttttgcctcccaaggtactaacttggaagctatgagttttgccacgcaaggtcttactaagcatctcaatcccattcagactgcgtttcttaactctcctttcacttttgaagaagtcaaaactgctcgtttccagcttgcgggagataaagcccctggccctgacggttttaatccgaatttcttcagaaaaaattgggattccgctggcactgatctttgccatgctgccttatcggctcttaccaccaatgctgacctagcccctattaatgaaaccattttggttctcatccccaaagttaaaaatgcctcccgagttaaggattttcgacccatcagtctttgttccactctttacaaggtcgtttccaaaaccattgccaaccgtctccgagctgttcttccagatcttatttctcacaaccagggcgcgttcctcagtgatcgtatcatctttgacaacattattatcgctaatgaggttattcatgcgatcaacagtcgtaaacatggcaaagtgggctgggctgctttaaagctggatatggaaaaggcttttgacaaagtcgaatgggcttatattcagcatatcctccagcattttggcttcccctatcctttcatttctctaattctaaattgtctctccactgtttcttttcgaattcgcattaataatactctttctcatcagtttttcccttctcgcggtatccgtcaaggtgaccctctctcaccttatctttttctccttgttgttgaaggcctttctgggattattaatgccaaggaaaattctcactcttttcacggaatatccatatcccgctctgctctgtctagttctcatctcctcttcgctgatgacactctgctcttcacccgggtttctccctcttcctctactgaaatcaaagatattctttccatttatcgccacgccactggacaatcagttaatttcaataaatcctccatccttttctcccctaataccacttcctctgattgccacatattcagaaacactctcaacttgga

SEQ ID NO: 188756 - DNA, 1337 bp, Cannabis indica
acatctatctttgatagtgtgttacaatatagtggtcgagttatttagaatataatggagttgttatttctttaatttttattggaatatcattggctgatagttattgatatataggtaaactctcatagattttcattttgttaatttagtatgctacacatttctttgatgcttaaccgtcagtgattcatttagacccttagtttgaagttgttgttagcattttcttccagtttaatgtaaacaacttggtcaggctattgttgatgatttttctctatgagttagatcttcatgtaatggattttgtctaatttacctattaatggacacttttcgtttttctctctaaaaaaaggactaataaaaaatatatttagatgtgtaaaaaataaacagtctacatatttaatattcaaattcagagaaaatagcttattagtcagatatatatttagattcaaaagtgtagatcttatataaaaaaaacagaagcaccataaaagtgtatgtactaatttgtacatatatatatatatttatctgtgcaattcaatatcaaatcacacttattttaatttaatacaagattataaagaaccgttaattaattataagatgtcaagtcataaaagtgtaagcacacgaatctttttaaaattaaattttaaaaagataaattaattatatctgttattattctaaatgaaactcttataataagcttataattgtttgtttttaatatcccaaacgtctggcatctataataaaaacatgctttggtggcattttaagtcattcaactacaatattgtggagcaaaaatatacatatattggtattagaagcaataaatcttttatatacaaaataatatacaaaaaatctttatacatagatttgtgtagctaatattattattatagggttatatatgctatttcttggtacgtacgtacatcacatgcatatttgcagtgtagacaaacaagcatacatgcctctgttatatatggtcaccatttatatcatttttgtttagaataataatcaactatattgtaataaatgattgactcacctctccaaatgaagtgaatatggaccgacattgtttgattaaaataatacaactatatcatcatacacttgtttttttatattattattattattttgtttaatgcagcattattctgatttttaatacttcgaaaagcacatcactcgtcgtaactcgttatcttaccttatatacataaatcaatatcaatccatcaatatatataaataaaggaaagtaaaatagtgatgacacgacagtttttatg

SEQ ID NO: 188757 - DNA, 5728 bp, Cannabis indica
ttttttttttttttaaagatacacttcaattcagccatttctacttgattgtctgtcttgaaaaaatgttaataatttggctatgggaagttatatggttgagtcttgtgtaaacataaagcatgtgattgtctgattatgacatgctcctgtctaattcccttgcattactattgtttttgttattgcagcttatggttctttcagccttgttgaagttttttcagataagctggtttcttggtatggaacttcatttttaaaccatggtttttctgtttgaagtaaaattattatacaaatataggacataatacgaagcaaacaatgatagggcacatatatcaatcagttttcctgcttctggtcttaatatattttctatcagaggtttgcttaaagaaaattgtcattgtagaaatgtaatttctttttcaagaaagcttatttccactgatgacaaatatccatggtgcacaagttgacattttaataaatggttagttttgacaatttgattgattcttgatatttcgtttccataatttgcagggtacccatgtactatcacctgaagtttgcatttcttgtctggcttcaacttccaacttgcaatgtatgtatttttattcttttctagcagttttctttgtagaattaataccataccccctctctgacataccacacacgaagcccttctagttctactatctccgatatcagattaaccccttctttgaccagggagctaagcagctgtacatgaaccacctgcgtccattcttcttgaggcatcaagccagaattgatcaagttttgggtcgtgcatatggtgaaatggtatgcccttctgtattggtgattccctagttaatcttaatatgttgtatacaggttaatatatactttacaagtactttccggtattgaatttttcaggtcaaactcttttgtgcccacaaagcagaattccaatatttcagaaccatcttcttgaagattataggatcaggtgaggacgagtactatatgatagaagtattcaactgtaccaatttatcaatgtggtcaagaatcatttttctaattagtttacacatgtttgatctcttaaaaacaaaacccagctgaccattttttgaaaggaggacctgaaccccatagaccacaacaaaatgcaaccgaagatgtccaaagtgaaacaacaacagtctcggcgatagagtctgatcatgaagattagtgcactcttctgctgatggacctgtgtcgttttaaacaccactttgccgtatgagtagtctggtttttgtacatagaaatatattatagctcctgcttttcgattgttttgaaaacataatgaggatactggaaattttctattgagagtaaaaaacatataaaagaagagacatagtaacatgaaattacaatatttgtttgtttgctgtcttttgttatatatctctcttttccctcacagataacaatcgcaaaacttaaaaatatgttcaaactcagttttgaatttaatttaaagttacagttacaaagatgggagttgttaaaaggttgtaaattagtagcgaaaaataagtgttctatgctcaattgaagccaggattatcactgttttccgtagttttaattaaatttctactctaatcatgatgacaattaaaggcaggacttcgtttccttttaactgttgctttcaccactacgagtttgatgatggtcgagatttgctataacttctgggccgcacaaccgcgataattcttcctgttatgatcacaaaaatcaaatttgtttattaaaatgataagtaaccatattgtgtaaatttcaaagcaggtgggctgtaatgctgctatggtgagtggaaattaaccttaatagaaccattctctgatgtaagtttttggcattcctctgaaagtttctgcagctcatctctgagtgaacgattttcgttgctcaaggtctccacccttgcttgtagctcttcacattcagcctggttacaaccaagaaatacaaacttacttacactgtctttaaaatgattaatttttactattttatctcataggaacaaatgcgataaggttggactcttttatggttttgttcatttaattcttgttagccacccccaccaaaccaaaaagacaaaaattgcaaagatatttgttacttatttaatctttctcaccttgaccaaaagttagttgggaagtggggacaaaatacaagtgaaactgtacctgctttcgtaatcttgacctcctagctgactccctattggattgcttcctcttctgtctttttagttcacgttcatcctgtcaaaaataagaggatattcatgaagccttcaccaataaaaagcagaaaataccaaggtctttcttgattggtttgaaggcatggaccccggctatggattaacaatgaaatattaagagtaaaactccatgagaaaaagagaaataaatacaaagaagccttgttcaaacatggatactaaaagttgagtaagagctcataagaattgcattgtaaactcaatagcatacctgaacccattggtcgggcatcacaccttcacgtccaatcatcgatgcagaagcagcagatgacgaggcacctgatggatttggtctcagctttgtggctccaccgccaccagaagatgcattccataagtccatcccaatgttcaggttggttgctggcatcgagccgacaggttttccagacactgaagcttgcaaaatggaaccagcagagttattctgagcattggctcctgataagttgttggttaatacaaaaaaataattctggaattataacataactaaagtttatgggtaaaatgtaccatctgcaagcatttggtcgaagcttcctttcttgctaccagacaactcctacaaatagattagacccatttttcactatactacaaataatccatctactcccagcaaaaaggaaaaattacatcaagtataaaaaccttttaattggtcaacagaaattttatatccttacaaaattatattaaaataaaaaactattccctgaacacatacctgttgattattctcatcactagcatctgatgaaccctctgatccactttcagcgctacaaacagtcaaatattataaaataacatcagaaaaagggaatggaagacagtcacagtagcagcagagaaacaacttgcagaataagattaataccaaagaaagacattcatctaaagcttgtcaagaggaaaatcctaaaaccaaatggtcgtgcacctttgtgaagcaccatcgtttcctgaacctgaagttgcttttccgctctccccaaccttagcaccagccgctcctgtactgccagagttaattttagacttcttggctgaagctcgctctttgccatctgcgctcttcccatccaagtcgggattcacctgcattgacacaggagtctgcaaaggaaatgcagcagagaaaaagatgagcaactttaccagataatttagatccaattccattttcagtgtgatgtgtaaagaaaatgtcttaagcagtacaaaatgaaaagcaaatagcagtaacagagaatcatacagtggccatgttaggatgggcataaactcccccaggtggatacatagccgggtaaggaactggggttccatatggtggcattagaggatgctgaacaatttgccaacacaagaacaaattaaaatccaccttcatgaggaatatgcatatactcaagtttaaatccaaaggaagtaaatataatcacctgacttccccacatataaggatgaggagtaggagaagcaactgttgaggcaaaaaagggcggtggagtagcaccagcagtataataagcctaaaattaaactatcttgtaagcaataactttatcaatcttaatataaaaattcaagcaaatttaacatatacacaaaaacaatgtttgtatacaaaccatggaattcgaccaatcaggatatgaaggtgcagttggaatttcctgtatagaaatgcaaaagtacttaaataactcgaaaaagttagaaagagggagaaggaaaaagggtttaatttattttttacctgagttgaagatgctggttttgaagccttagaagctgcgttctcttccccagttcccataatgcttaacaaaactcttgcttagttgaagaatctctaactgggtaacctttccaattgattaataatgatgatgcttatgatgtacctgatcctaacaaatctatatcagaccaatgatgaaattcaatgttacccaatcaaaatatgtaatctttcgaattagaattaactctacaaacctcaaattccatttggctttaaattaagtttaagtttcatcaacatttattactcaactctctatctttctctctctcccacacccacacccacacacaaacacaaatcatatccaaatatagaaagaataaattgtgatgatttggttcttggttgaatcagtattaaaaacggtattaactaatcaaacaaatatccaaagtaaaataaaaaaaactgagtctttattcaaaagaaaaccccaaaattatcaccgaaatcctaaaattaaccaacagaatttgaaataaacaacaaacaaaaaacgaaatcaaccccttataatttccaaataaagaaacaaaaattcaaaatcgaaaccataaattcacagaaagagagaactgacttgttggtttcatggggaaggaaagggcaatacagtaattccgagtctgagtcagatgaaaaaagtccaggtgggacgaaagaaggaaggaagaaacgatagtatttaattaagaaactgaaaatgaaatgaagggcgaagattaaggatcagaaagtaaatccaatctgagccgtcgaaataaaaagaggagttacagtgaaagtattactcactcaaaaaacacacaagtctcacaaccgaaccacttctgttgtttcactcattcatagatagtcatggctggtcatcttcttcttcttgttcttgttgttctcttctgtgttggagcgtgtaggtacgcgctcaactagcgtgggaggaagggagggagagtgtgatctggtgtggcggtgtccaatgagatggcttcttgtattgtagagaggaaagagagagaaagagagagagagaaaggtgtgtgtgtgtgtgggcgtttgggttgcgtgtgatgacacgtgcgaacaaacgagcgatgacaaatgaccacatataactggccaaatatcactggtgaattattacacaatcaccattttccaccaacttaataatttaaatttaaacttttttaatccaatggataaccttttttattattattattattatttatttaattatgggaattgcacgcgcctcataatcattcatcagccgttggattaagagattatgtaggataagagtttgataatctttttttttttttttttggctaattagccatttttctttccgaactttgacatatagtaaatcatgttctttgaatttttttggccgttaaaaatttcccatgaactattgagattgttaaatttaaggacttttgtctaatttcattcaattttattgtttcaggtactaaattatgctccctagattttgatatctaccaaatcatgcc

SEQ ID NO: 188758 - DNA, 4358 bp, Cannabis indica
tttgtgtatttttgaaataatccgtactttaaatacatgaccttgaggcctaattaaggcagggttctggcttgttgggttgaagcgtccgtatgatgggggggcctatgcgatctggacaggtgtcatgtgtgggagcagctacaatagacaagactgtcagagggacgtagttggacaaagggaatatacctctccttgtggtacgcgcactaccatgtcctgatttaggggacatctaatttagtaggcttaggcgtcaaaaagcagtcatgtcgccctataaggaattctggatgcacctctcaaacttcccattcggatgcacttcatcagtcgtacagaggatgtcgttcgctctatctcctggaaggctgaatgggcttccgggagtaagagggtcttacttttggaggcgaggctcctggagatgtgatgggttgagcccacctccgatttagatcaggctttcgcatactggaaggcttcgaccgggcatcacgcatattggttacatctataaaatgccacgtgttgcttcatgatctggaaacgtggataatatttacctccaagctttcgggacttgggagtgacaaaagcttatagtttcacctctggatgaccttgagcattttggacacgtagatcgttttgaaatagtggtatgttcatcttccatattgtgaaatgtgaaagattgaggacttttgagggttacaacttgcactacacacatgtcatcattttgttggttcgtgaatttcttcgcgttcttgagaagcacatgagattcagggtatcacaatgacagttattcgatgtcagcaggagccttattgatgatgaggaaacgcctcaagtactgtaaaaaaaatgtaaattatgatatcctagaaaatgttataaaactcatcattaatctttgagtaaacatcttgcttgagtatagccatgtgattttatattaatatagactaaaattaaatggatgaaatactattttagtaccttgtattttataaaaattactaattgaatctattttagtaaatgacaatgtgaattttctgtattttttaaaatagtacaaaatattacactaaactcaattttcatcacaatataacttaataataacatgagtaagatgtgttatgatcaaactggttacaattttttttatattatttgtccgtgctaaaaattgattttctgattggttatgttaaaaaaaattgacgaaaaattaaactcacaatacaattattatgtaccatgcattttgaaaaatacagaattcgatttgtcattttataaattacagagtcaaatcaataaattttacaaagtgcgcacatggtctaaaatgatacttatctaaattaaattattgcttaagtgttaatttgttttcttatatttaaaatcatgggaggagaggaatagaaaagggaaattaggatttagggatttgtctaacataagcaaaatatctttattttcttttgaagtacattacaatccgcttggtgggttgacctcgacctgttgaaataagtatggattcgagatgggtcggagcggggcgcaaatttgagaatccgcttactgagagtcgaaactgccccattgggtcaggatctaacccgcggttatgagggtatttttgccattccaatgcttatgctatgtaccttagatcacaatagaagttagcatatgcagcaccatcttcgcttaattacttgatcatattaaaatttacaaaaatttacaaagtaataaccacagcaacactaataataaaaatgatattaatatttaatgagaaaactcaccttattaaaaaacaaacaacctttatatatgtatgcgatataaatatatatatatatatttatttacatatttggtctacctgccacattaattagaaaacttcaaaatatatatctctatataatatatgaagtcttatcaatgaagatttaggtttaattacactataaaatataaattttggttgtctacaagtttgattaatgaaattattattagtgaataatgtgaggtataccccccaaatatataatatactaaagcaaaaccaaaaatatgacgggtacatctccttgcttcataatatgatacaaaaactcttaaatgaataattttaattttctttcatttcattcatcatttatgtaatagtattatatatttttactaactaaacaatactaacaattactagttaatctctgtactctttcatgtaacactccctaactttttaaaatcactttgtcctcaagatagtaagaaattgaaactaagaacaatacaaatataagaaaataaaaaactacttacaacccaattattttctattaatattgagaaaattacattgtatatctactttactttttacttattttaatttttatattctttaagatatacccacttttatagatgatgtcttcattatactctttaggttaatgtaaattatgtgctagacttaagtggagagtgagagtatattggacaaccaaacaacaaacgtaaatatattttaatagaaatataatataagaatatttttgattaataaatacaaaaaagagatatttctcaacttatcccgttaatatttggcctgaacccaagcccgagcccaagcccaaaagactttaaggtggctcttcttctctcacgtaatgtatcagtcgccaccttttccatttttttcttgatagcttcttcatcattcaacatccatgcttgtttcttcaccaaatgaactttcaatgtatttgcagctatcaatataccaaggcaagtcgtcgttcgcactagtgagcctccgcaatccggtgtgaccatgctttttgtcgcccctctttgctctgatttgggttacacccgtgctcttccataagtcgacatctgaaccaaactagtttggactgaaacaacatcaattgcgcattattgatgatggcgagtggatcagagggagtagctttgccacgattaaaacacatgtcctccaccaccagtaaattaaggcggccacaacttcacttgcgtacctgaggatgacgtcattttcctcacaaaggtgatcgatggtaagtacaaacattacaaagtcggcacatccagttgtgaggaactacgcgtcatctttgccttcgatccatggtgatgcaactggtgtgatccctctgaaggatccatggaacaagtatagattggagaatagagccatcgaaatctaggtgaatcaaaatagatgggagctttgctatactcttatcaaattaccatatatgcagaccaaggccccctcacgtcaatcctacgagcctcttatctattctcatttgatcacggtgggggagcaagtaaaaatacaaaaaactcaaattgggtttagggataatcatgctcgaactgataacttaccagtggcgagtggaactttggacgcttgtgtgtgtgaactcgttgagggctatataactgcagacggtctatagggcgctttgttttatttacttatgatattaaattaatgttgcaattatttttatttattattcattttatcttaagtacaaaaaaattggccagttgtgaacatttttaagtattaaataaaaatgtgacattatgattttttgcgtttaatgcttgtaaataaaattaatatttttataaaaatataggtgttacaatctcttttctattatttaataataaaagatgttaaaatatagtatttacatgaaggaataaaatagagaaattcacacgtatgtaaaaatttgaggtagaataaattaaaatttcttgagtaaactcattaggagaaatttgatatgactaaaaataaaaaataaaaaaattataatgaagtgatattatggtgatatattttgaaggatagttgaaatattactggcgaagagtgctctaagggggccatggtaccaactcctaaaattttggagaacaaaaattttttatagtaattttatattaaaatttttattttttaaaaaaatattatgtgttactttggtctcccccaatttgtttttattttttggtcccttgatcttaattagcttctgcttatgaatataccaataattaattatatatgattgtacattaatttatatatatttttttggtgtgaattagtttcatatcgttgacaatcttaatatatataataacataattatttacttcaaatataattaaaaatattatagtggacttttttcacgtaatacgttatagctaggcttgaggtggacgtttcataaggatga

SEQ ID NO: 188759 - DNA, 1558 bp, Cannabis indica
ttttttttcctacaggaaatccaaactttggtcaacagtgctgtggctttatcctggggtgtatgaggttggtccccatccaataatgattagatgacatatatatatataaaattttctgggttgattttatagaaaaaacttgcagtaataattgagttctcctggaagttcctatgcagtaagcatgttctgtcaaaagaaagaacgttcttctagtgatgttttctgttgatgcaaatttcatttttgtgcagattaaatttattattgatggccactggaagattgatccagatagagaaacaattacccagggcaacatatgtaacaacattctccgagttgaaggctgaaagatttttgcaggaagaaagcaaaattttcaatttgtctagtgcagaggtaacttggttaagtctaaacatagtggagatgtatgttatgccgttgatacgatcggttcaaaacccaggaaactacatttgatcatctttctgtccaattttattggtctatgcttttcgtgtcgatctaagttttgcttttcaagaagtattgatccgttcaagtacttttcttctacattttaagcattttttttaaccatcatgtctaagaattttgaactcaatacgttataaacattatttactcatcaaattatggtctgtgcaggtatataggtataggagtggtgacaaagtttgccatgttgtgtaagaatatcaaagctgaaggggcatcatgaacatgaaacatacaagagctgtgatcaagatcatgcagttgtgagctgtgatttcgttatttcgatttttctcgttgtattacactcgctaaagccgatttttatggcttcatcaagagctcctccctgaccaatgaccagtgatgactgaatggggaagaaaagctgctgttgtacataatgcttttctagagaagacctttttctttttacctcagtttgtagagatttgtttggcttgaataagcaggattcaataatagcaggtataacaagtgccaaaaaaattaacgagtcttcattgaagatgtagatttgcctgattactttctcaaattaattttggtttataatagtcgttttatttaagagccataaaatccaggcataagaaatcagttttactgatatttgcatggagggtttccaattgaagtatactaaatctcaaaataaaaattactcctaattcctctctctaatgaaaatataattattagaaaattgaagtaaaagttttcaaaaagtttatttgatggagataaatctctaaccacaaaaaataacgttaatagttcttaagctcaaaattcttgtaagtccgttggttcttattttgatagatgtgtcaattgctcttaaaaatatcacgttgatactaaattgctttcacattgctttcattttttttttaagctgttaataagtttcttttaggttgatgcttagttgatttgcgtattaaaataaaattattatttaattatttattctttcttatttaattttctaaataataataataat

SEQ ID NO: 188760 - DNA, 2425 bp, Cannabis indica
gtaggagaagatcagcagcagcccccgtgcagacttggcaaagtccaccaaggaattattcttcaggtattagtattacaaatgtttcaatgcattctgtaatgcaattgttgttatcagcttgtctatggttgtaaacttgataatatctatttcattttgcagacattgattgtgggcaggaacaagccaatagtttggtgccttctacttcttctagcccaaatggtcaagaagagtatgtgcactcttctgagctagatgaatattcacttgatgatggggtcagctggaatttggatcagatcattgttcctgtaagtgtaattcgtgtaaagctttctgcatttcataggtcttgatctttacagccactaaaagagtagattttaaggttcattgatgtcctatctttgaggtattttcttccattttgggaaggtttaaataatttcattttgattgtattttttatatcttcgaattgactgtttcggactctgggcatggcctcgttttttttcttcgaatcattatttattcatttattttttttcttgtaaaccctcttcttgaccagataactgtaagtgtacaaatgttatgggtgattcctatgaaatgcattgtcaagtcaattttgactacgtactattatgaattttactgtcaattgcaatatatctgttaccttggttgtgtgaattttatacgcgctaaatttaaaggttcttcttcatctagtttgcacagcatgttcctaggattaatggtgaaattccttcaattgatgaagcaacttcagaccatcaaagactcctggacaggtagtaatatttatgtgaatgtgatagtaatatttatatttcctatgaataatcaaattgacattctgaaccatgtaaattgtaaatatgctatatgaaaacacagttgctgtaatttctgtcttcattactgtttcatatggattttaactaggagattcttaattatgtttctagatttagtttgatgtgtaactaaaattgtgaagtaattgttttacatgattatagattgcaatcatttggatttattgagcataaagttcaaggagatggcaactgtcaggttagccttctctcttttgcatctatgattttcaatataatatccatttgcattgacttaacattttccaattcataattcaatttacattatttccttccagtttcgtgctctgtcagatcagttatatgacacgcctgataatcacaagaatgtgcgacgtcaagttgtaaatcaggttcaaacctaagaagtaaccttttattttacccacatcaatgcatctctttattttattttttcggttctcatccaaatgttattttatgtttgtttctaatcagctcaagtcccattcagagatttatgagggatatgttcctatggcatacgacgactatttggagaagatgtccaagtatcaactgaccttcatttctcttggttattttatttattattaataataatgttagctgtctacggtctctctctttctctctttttctactaactagctgtcattctgtatgaaaccaggagtggtgagtggggtgatcatgtcacattgcaagcggctgctgatgcggtatgaatgctgtcgtcttcttgcttaaagagttagtaatttgtgtttcattaatgactaattcatgtcaatacactcttgcagtatggcgtgaaaattattgtcatggcatctttcaaagatactaaattcatagagattcttcccaaatttcagactccaaaacgtggtatacattcttaaattttgactttttgttcaagtggagtgtgtaattagactgaaatactatttatgcttctggtcaatgggtgtttcgcaaatctgattatcagcaatataatattttttttcttggatataattgagtgtcaaattttgggatcaaagcatgattacccatgatcaaatagattatatgtaaagcaatgtgtctcacatttgcagtgatttatttgagcttttgggcggaggtacattacaactcaatttatcctcaacaaggtaattggttggttttatcttttacatgaatgtttctatctatataaatatatttgtatggatatactttacttgaatattgacttgttagcgaatttctgtgctttgattgtctccagatactccctcagacgagtttaaaaagaaaagaaagtggtggaaaaattggcaataaaaatgagtagaattggttgagggagcttccccgaatggaatacttactaccatttgctatatttctcatgtttgtcaatagttgttatcttcttcccgttgtaaaattaaagaacacattagcattaagtagttttatgtttcgcccttgtcttcctcttcttg

SEQ ID NO: 188761 - DNA, 1626 bp, Cannabis indica
tgagaaagtgttacactataaaatagtgtaggggcttagtagtaatttctacaaagtgtgaatcactataaatatgttattgtgtagctattatgggatatgaaatgagtaaatagaactttggttcatttgggagattggcacggtctcgaagagtgcattttagagattttgtcctgtctcgaagaggactattatctaacatgctgttcttcaatattttgttcagaggcatcctaatctgcaatatttggttgaggactcaagtgctcaagattaacagtagctgagtttgtgtgttcacttacctcttgctgactttgagtggcagatggtgttccaagggaaggtgtagatggattgttggagttgttatcagctatagaggtgacattaggttgggaaaatttagtgaagtggatgtttggaagcttactccaatgagtggtctagactatgatttttttttttttctggtgcatgagtattcaaaaaaaccagatttgaaaggaaattcactttcattaaacacaacattcctagatatatgtactctacctgttaaaaaaatttagacaaacaaattcttctaaatgcccaaataagtagagggtgcatcaatacatcccttttaattttaagagagtgcatcgtaaaatcatccaaatgtttttgggcatttaaccatgggagttgtaccttttaaggtacattttcacaaactgcaataaacttagcaaatgatttgtttcatgagagaacgaagcacattgatgataagttgcattttcttagagatattgtcactaaaggattgttgaaagaggtcaagattgcaattgagataaacccacctgatatgatgacaaaggtgatacttgttagcaagttcaatgctgcattggacttgcttggtatcaaagggtgatcccttggagcattgcaaggcaacatatatttttctcatctatagtaatatttgtgactttagcaaacttaaacccctcagatcgatctactcggattggagactcatttgttagtctaaaccagatataactaacacatcagtacaaagactcattcttttagaatctttatccttatcactcttctcttgtattccctataaatatccctaaacctgattaacttagagatgtaatcttaatgtaccaacaaccacagagtgagttgtagagagaaagagtcgtgaaacattcttgtaatcgagtaaaatgatgcttggagagactttgagggtgtagtcacttatgagacattagattgggctaaggccactgctgctgcattgccttggaataggaacaatcacattataattgtgtttgattgatctattgctttcctttttagttctttttggttttgtttttgtgtctgactgtgattacagggatcattcctcaacaccatccaataagtataaacttcacattaacattcatgaaactaccaaaccaagtctttgaaataaaactatggatacataaatcacttgtaagttgtagctattattgggagatatcaagtacttggtttttagtagttttagcaaaagaacaattatgttcccattacaaaaatattcatttaacatattta

SEQ ID NO: 188762 - DNA, 7090 bp, Cannabis indica
tttttattttatttttcttataaagaatatatctagtacgttgtttactaaaattatatgtgaaagaaataataataattttatcttgtttacaaacgaaatcaaaaaaaactaaattactttctttagtagaatataatataaggtagtcatatggtaaattatatattaaaagacaatcatcatttaataaattaaaattattaccattgatattctttaggaaattggagggagaaatatttccgtttttttttaacactttatttaactaattctctcattctttattttagtacatatcattctcattccaagtacgtactaagttaaacatgctaatgcataaagagaaaaataaaaataaaaataaaaaataatatagtccaactatttcagggtttcctttttcctggttgtgcgtacgccccattgccaacatttcaagctctaataatataacttaaattgttaattgagttggcatattagtacaacaaatattcatttttactaaaactaaaagcactgtacagtgagtgtacacttacttgcggagaaatgggaactaaccctatctcaactagtcaacttcctaatcaaatccatactctcttattgtcatacctaaggaaactttgcctggccattgacacacgccaaaatcattattactactggccatggacgcaggtcaaatcattattactactggccatggacgcaggtcaaatcattattactactggccatggacagaccaaatcactattactaagtaactaatcaatttaaattaaatcagtaattatctggcccccgaggcagagttaccacaggggctttgttagttttcctggatttgaaatcaaaattctaaacagcatctcagcatcgagaagaatttactttaggcatgttaatttgaccaagtgccgatattttctcaggagtcaacatcagcttaccattacttaagtagtgtcgatcaacccacctcctgttttaacacatcatgcaactacatcaattattgcacagggttgtagatagtgcaagtatatttattagaaagactagaggagaaaaaaaaacaatttgaaatcacaagtacacacctgcgtttccttggtttcacagagttctctgataagcgagaagcttctgatttcgaaatgcaacgcagtgaagaaagatactcataacatgctgcacctttcagtgtcatgaaagatttcgaaggaacaatggactgaactacatcaacaagacgtgatttgttttcactgcattgtaggcatttagtgttaataattatgttagttgtaaacatgcaaaatattcttgataacttaaagaggctttctgttctttcataataaaatataagatctaggctttatgcaggttttattcgaaaaagtcaaataccaggctccgaactaagtatggacatataggaaaaattgctttcagtgtacacatgaatttacttttgaaattaatttatatttttatgaggggaaaaaacatatatgtacatatatgtgtataatatattttattcttacaaataattaatcaatcaaatattgcaggtcatacatatttgatgtttttgaatttattttctattaatgctcattacatactatactggttaccacgcatgaatgtatagttaactaatgcgcctaaaagaaagtcaagtttgatacctttcaaaagaaacatcagtatctgggaggttcagttctgaatttcttcgagtcaatgtagttctactagctgacatatcctgctcagctaatttagccaaagctagctgaccagttgcacagcccagcattgaggtgaaatcaacagtgcagactgaacccattgttgatccaacagcagcaatatcttttgcaaacaagaaaaatccatgctgtgcagttgtggaagcgaaccgacttttattaagaaagctgtatgcatctgactcctcagatgtgatccatgatggttccaaagaatcctgaagtgttataaaaaattccatcattaattaaactgtataatttggatataaaggagtgcttttaattttcagctttaaagttaaatgatacttacacttgttagtagttcatggttgggtagcaaaacatctgtgtctgagattagattagtcattttatgagtgagctgtacaacttggagagcatgccgctcttctgaactcacatactgtgacaaatctgcatagcgcctacgaagttcgctccatgaatgttgtaccgaatcaggtgtcaaaaaggatttaggcttctcttcacattttaaagttctgctacagtccatttggctgcactgatccaaaatctgactgttctgatacactattccagcagcctctacatgctccttttgagaatcttccacctcttcttggaaaagtttggccattacattgcgattacttaacaaggtatgtgattctcttaatatttctggttttgtcatatcaacttcttcatcttcaactggtaacctgttgctcatcgaaacttcttccaatgtatccctaacaaaaccacaggatactgttacatcttgctccctaccattgttaaattccgtttctggaacaaatgatgactctgcaacacatgacacatcaactgacttgccttcatcatttactgggatgcagccaggagagtgtgaagggtgataaagtctttcatctatatttgctgtaattgaaccatgttgctccttaaacaataggctccttccaaataatggttcattgtgagtgtctccatctaaaaatatgggacacccattactcactaatgcatcttcagaatcagaagacactacatcatgttttttccgaacattctgccgtatgcatgaaaatggggtgtctaaattatcagaaacctcattaatatcaagttgacctctaaactcctcatagtcataaacagagcaactgaggttcaacattgcttccttgtttgcctctatagattctatttgaacattattactaaatggtatttcctgcttgtcctcaaatatatcctcaattatatacattaatttagaattttcttccctggaaaatgactcggcaatctctttctcaactagttccgataactcagaacgtaagtcccatgttattaattttggaaggatctgatggccagcctccaggttaaatagcagtgatccatctgcccttttatttttcttacctgtacagtcaaatgaacacaattattaaaaaagaaaagaaaccttcagtagagtggtagtaagcagatgacagagcacatgcaaggcagatatattcagccaagcaggccaattattacgtacaggcagtggttcgaatgctttaaacgaaaccctcttactcagtttcccatatcctataacccaagaacgggattaggtcaaagtcaccaaacttactaaatttatgttattaatcgaagaattagttctatataatggtcaataaattattacaaatgttttgctatcctgaaactaatatgagcagtagtgtcttaatttggtaattgtttttaccgtgaagcccctttaatatttcacattgaatcttaaatagaaaattaagaaaacgagacttcagtcaaagttagaggaaaatagtacattaactgacttgtagtatatataaatttaacgaataaattgctaattacttaaacaactatattatcaagcattttcgttttggtagcaagttgaacttctaaatcataatctcttgttgccatacatgatacattaaacagtgtaacctcaatgttctagctatgtgctctacaagcattaattgcagaatattagaaagtgacccaaccaaatgcatatgaacagttaatcctttgaatatctcttaaaaaattgaaacttgttaatccatttacaaccacagtacacgcaatgctacttacctttcttagagctattaccctggcaccagaactgaagatgcataatcattttacgtatatctccctgacaagaatcaattacttgctctatgacatgagggtggatgttggctctctctgcagcacaaacctgagacacagtagcaggttgaatttaaaatagatattcaagtacctacacatgaagggcaagttgaacagggaaaaagaactccaacacatacgctatatgcatggcaaagcagcatctccattgatggcggtgtaaaacagatctctaatctgtctaaattatctggcaggaaaggcttgtgacctagaagtttgcaccaatgatgattaattcaaagaaactacagagctgactcaaagtttgaagaatgagcaaaacaacttataaataaaactttcttactattgctagtcagtattatgggtcctttggcagtgttagcaatctgttgcactgcggcaataaaaccccgatcttcaaaaaaaatgatatccacatcctcaaaaagaattaaaggtttaatttcactcttataagagcaactttcagcctcctcgtgataaaaaattccagcatctccagtttctttatgaaaatcttcatctgataatgctatcacttcagcactgccaacgtcatattcttgacttgcagagccattagccagagctgcagaggatttcagaacatgatcatttgaagaaccatcagcatttttcagtgacctgtacaaattataaggaagtcaaaaaatagacgtatttctgttataaatgtagctagtcaatgcttaagaggctgatgccagccaatacacttgagaaaaacagttcctcaacagaggcgaattctaatcttaaaaatactgttgcaaagaatgtattgatatgattacaatggttacacatattaacatataagcagtaacaagaatagagattggaacaaattgattgccaccattgcccaccacagttatattactacagttattcacaaataatcacttattcccccaagtcatatagatcaaatcagaataatatccaagtcacaaggtccccccaattattcgccaataggctataaccatgttttttacaacagtacattttgaccaagcttaacaaggtttaatacatgactttgccccatatttagataccaatattgccaggcccaaaactaaataattgataaaaaactaaagatggtacaatacaagaaataaaactatcaaccactgcatcacctatgaattccattatatgcataaaagtataacatagtattattgggagggatcaatgctctcaaaagcttggaaccttattttatttgcgtacgttcatgacttactaaatgactggtaacagcaatcattttgtcttgttttctttctttatgtaaagaaatgatgactatcatctagtgtatttttatctttatatcccccatttctttaccactaagagacaaacctccttaaaagttacaacttcaaaatttgaaggaaataaaaaaatgtatttcagagtgttattatatgagaaaagagtctacttagtaaactatcaagtatggagagccacaaagatcacacagcttgaaaaagtaaaagaattatgactaactaccattaagaaaatatatgaaacgaaccttataactcggcgcgattgaagagcctctccaaacttctgcctcacaagagctccatttcgacattcagatgcattgacctgaaaagacatagccataaggtgaatgaaagaatgatttaaagcctcttctaagcatttctattcaaatccaaagcaataaaaaaaatgaaaaactcaatagccacataaaataagaatctggccactgcttgaagcaaacatgttgatgacgtctgctaacatcagtccataaacacattcatgagttgcttggatttgttagtggtggaactaccaaaaatttgtagtgggggcaaaacagtggggaaaatgagaataataataggaatgttgttgaaaaataatctttactatgccactgcatctgcaattaacttttattctacttgtattatttttttaataaaaagataataataattgtaagttcgtttttgcttttaaaattgttagcaaaattttcaagacaagtagtatccaaaaatttatatatataaaataaacaacgacataaagtttgtcaataacaatttccatagatatacacatttgtataaacgcataatcgaaaaattcatatatatcaatgaaataaagatttccaagcatgcttttcatttatgaaaactgagccaaaacaacctttttatttttatatttgaatttattgaaaccaaacataaaattcagtacaattaagccctcattattccatctatatacatatataaatagtacatacacacaggcacaccatagtacaaaaattaactgctgttaagtgttctactcatttacatgcatacctacattatattttcaagtaaaccgtatatattaaaggtcaatctaatacacatttcttcaaactcaagacaataaaattcaaatataactttaaatatgccaacataagtatcatcattttagtacctccaaaacctcatatccttgctcttgcgcacaagcataaatagcagcagattttccactctgcaatgtgttagactgtcttaatataggaaattgtaaaccatctaagagttgtatttcacagaaaaaagctattgaaattgcaaacactgaaaaaacttccccatcgcactaactataaagattaataagaaagtcagagctgtgtaaattaattgaatacttccaagtacttatttaatcagtttctaaaatgtatgatggtgcaagcatatctatatatatatatataataaaaatatatattatatttgtagatagtacaagcatatataaatacacgtgtttaaatgagaaagaacaaaaaatatgatagtgtactgaaatcatttgatggtaaaacctgtataaatggggttctacagatgaactgttttctgcactaccattaggaattcttttttattttttgg

SEQ ID NO: 188763 - DNA, 1423 bp, Cannabis indica
ttaatcttgcagttgggagtcatttttctatttttgctagttcttctctgttagcattgtcttcatttaattactaaaactacaaattgaaagggaaaagaaacacaaatatatacttctttgagaaaaaaaaaattgtgtgcgtagagacaaaattgataccagctaaagcaaaatgatttggtccatatccagattcatttcccaaggaccaagagataatacaggcatgatttttgtctctctcaaccatgcctacgactcggtccatcatagcagcagcccagctaggttctaaagtaggatgcttcacatgatcacaataatcaaaaccatgtgtctcaatgttggcttcatctatcatatacatgccaaatatatcacatagctcataccaacgacggtgttggggataatggctgtttctcacaccattgatgttgtactgcttcatcaaaactaaatcctgaattcaaaatattcaaatgtaagaacacataaaaggataacaatgggttataaaataaaattcgaaaagaactttatgttacttttataaataaaattcagttgttaccttaatcatgcaggactctatgttggtcttccccaggcgtggatggtgttcatgcctattcacacctcttatcacgattggctgcccatttacaagaagctgcttaggagcttttgatacttgtcgtatgcctaccaagcatgattcgcagtcaaccacattgccagaagcatctttgaggaggacaacaagagtgtacaaatcaggctgcacaaatacacaaaaggataaatattccatagagttacacatcaaatgatgcttaattgaacattccacaaaactacaacgttattcgtcttgtagaaatctcgaacatctaaaatggtagcctcttccgagttttcacatctctaatgattttaggtttagttttatcttttaaacacaattttaaaaaatttaatacgcaaaagaatttcaaaagcttcctcactttttctgcagaccaaagcttgggtttatctattttcccaccaatccaataaccctgaaagcctggacttgcaccagttttagtcttgagcttcatgttagccacattagaagaaagtagatcagcatctccatcacccttgtaccagctggtagtatcataaagggaagcttctatggtgaatctggaaagaagtgtgtctttaggcgttgcctgcgaattatctattttcacctcaacctggaaaacatgttagcaacaggttaaactgtttcccacatagacatagtgaaaatgattagttagcaatgtaatctcaacttattgcaattaattagttcttatcatcatgaaagtaaggaaaacaactaataccataataccaaccacattatatataaacatatata

SEQ ID NO: 188764 - DNA, 2279 bp, Cannabis indica
gaatctcattacttgagtgctcacgcaattcctagggttcaaacacttgacaaaatcttgtgtaaattcatagagcttttccaactttatcataataaaattaactcgtggattagaggtcattaattcttgaaccagataaaaactcttgtctccctcattatctttgttatatttatttagcctattatattttattagtttttaaaaatctcggtaaacacttatgatccaagaagaaaccagctatcactagtttagcaatcatcatctccactacaaatctcataaaagccttatcattgcatctgaccatttcttgttgagtctgtgtccctaagcacacctactttagcagcaaccagggagaaattagagtgattaaggcaagacgagggaagcccaagagcttgaatccaaaaaaagacagaaatcaaactcttcaacatcctaaattccatcttccagccattcctgaataatcaacaatttcctaaggatcatccaaggtctcccttgaaaaactttttgacaagatgaatcaaaatcaaatctcaatcctaaagttccttcaaagaccaagaatggtaagtatgccacacttaaattatataatcatttattattataattattatttatttttcaattacaaatagacaggtactagtactgatatatgctttgggcattatactttacattgtttacaactagtattacttaaattattaaaacaataattaatattattaacatgagtataggtctatcttttttggaaattaataaacttaattccataagcatatacaaagagaaagagtagagcccaaccaacatgggctatggcaacaaatggaagaaaatcatagtcaaaatccaacctttccttgatgaaaacattcactggaacactaaaacctaactcaagtatcttcatattactatcaatgtcccccaattgagaggatactagtccatgtatggtccaagacacaggagaagcccaatagtaccatctccaccagattgggatttgctgcaccacaaatattaccatacaagttaaagtgaatgcattttattatatattgatgtaaatcataccatactaaagattactactactaaaactaacctttctaggaataagaaatccacagaacaaaacccagaagctgaaaaaaaagtacaagaaaattgcaccaatttggtgaccaggtgtcaatgccacagccatcattccatacagtgtgaagtagactaagcacatgaatatgtagtagaagaaccaccatactttatatgctctccactcaaatccaatcattgagtataggataaacatataaactatagcttgaattgctgaatagattatctctatagtcacctgtaaataacatcatcatgtattgatcaattacaagtttcacaaagtgatctcttttgttccttaataatgaaaaaaaatgaatttatttcattcttattattacctgggaaattgcataaggtaatgctgaatacattccagctgctctttcgcggtagaaaactgttctctcaatgtccacaacaggctgcactgaagaagcattgcttgctccaaggaaaaatacagaagtaaacaaggctcccaaaagagtcattagatcttggtatgtacctctgtcattacacaataattgttattagatttagctcaaacaaatatgtgcttttttatattttttgttttgtaataaacacttacgtcttttgtcccctgtcccagaaaataagaccaaacaaaatacccatgattatggtcatgaagaatcgaatgccgttgtattgtggatttctccaataagaccaatgttgtttccataaaatagctttgcattggacaaagaatgattgagagtatttggtaggaaagtaaaggtccttagattcaggagatggggtactaagttctttgataagcttttcattgttcctgaaataatatcaagtttgagaattagaatcattgacataaagaaagagatcatatgttaggataattttttaaacttactggtaaagagaagacttgatataaatttcagcaaaatcaacttcaagttgagcctcaactagttgatttgtgacctcaagcatccatgttgcaggattactaccatccttaatctttggaactcctggaatgtcctgtagtgagcttaacatgttagtctattattccatttaagccaataatttcagcagttaatatatggacaataata

SEQ ID NO: 188765 - DNA, 2812 bp, Cannabis indica
ctagctggtgtggaagtccccattatcggcagcgactccgttaaatggatcgaccttgagcttcctcctcctccttctgctgctgccattgccattgccgattcggaagctaattttgattttcaaactacctgtgccccgctggctgacgatttcgcgtcttcctctgccatcggcgatcctcccacttatatcatatggtttctctttctttccctcgccttttttgaattttgtcttgtgattatggaattggtctatgaatctttgtttgaaaagagtatggagttgtggttcactttgagcatttggttcttattttattgcaggagaatccacaagtctctaccaactgctctggagctacttgagctgtctgctgataaagaatttcccaaaattggattgcgaattgcttttccggatgcgctctctgctttcgctttcgtctgcaaaaatgaggtgcttttaactatgtttttagtgtgttgataatcttggaaatttcgtgttgagaattgaaagagaaaataaagaaattgatgaagaaagtgcgatatcgttaagatttcatcatgttgcgtttgcattcaggttgatttaaattcaaggaaccacccttacctgctttatgcgttgactgtgtcgggaactgcttatcttttgagaataaaaaacatctcggcatacaaatcctacttcattttgccagcggaggatgtgatcagagtgtttgacatgcgtagttatggccatataacaagtgtagcagcaatgccctctggatgtcttatagctggaaggaccgatggatctactggttgttttcaactaggcatgcgcgaccctagtgctcctggtattgcggcttcatgttgattcctctttttagtgtgtcttcaactcaatggctgaaggattttggcttggacagtataacatctgctgctaatgtttttcttgtccttttagcttctgtgcttgagcttcgggatgattcaggatttggtcgtttgtggagtcttgtgtcaaggtactaatatgatatctcattgctagaacattaaaaataataataaaaaaatgcatgctcaagggcatctgtcatatagtatactgtatatggtagttctagttctttcttcacagcagactcggattttgtcaatctatttggtttattggaagtcctttggtacatgagtggttaagcatttgattgcaaatctgtacatatttactcttctcgaaagtctttattctttttcttaataatgattaccttaaatatttaaaaatgcaaaatgaaagaaagtaagcaaattcttcttggttagctaacaatggaattcgttgtatggctattgatataatcaccatatactaaacatattatgcagaggtagaacaatagaggctgtacaagatttggtggtagcaaaagtttgtggaaaacaacttttatttgtgcttcattcagatgggacacttcgaatttgggatctttcaagtcataccaagatcagtagccataatatgaatcatccgacatcgtcaggcaaatttctcttactttttcattaaatttcattcacttttatggctatgaatggacatctataatctcttgtcaagtgcaataagtaaataataatattaaaaaaaccaggagagagatctttccttttgtagctagctattcctactttaagtacaaagtagcaattaattacccaaagtcttgtttatctatcaagtagacatggaattcaagttggaatattgactgcctatgaaagttgtttgcaaatagatattaagacagtggatatccctttcacgtaaggggaagagatgaaggcttaaagtgaagaaggtttttaacaatcttgttttctttcacattgagtatctcaacttgaaataaggctcttcatggtcatctagttcccttgagcatatgatgacattgacacttatcattctataggctgttacttgcatgtactcctcagccattgaggtcacattagctcgggaaagcgtcttatttcctttacatgaaataggcagagacatatgctacatctcatgtgcgttctgatgagatgtgcattggccttttattttgctataaataaatttcacaacatgtttctagttggtaccttcaatgtgtatatgtctcctaggggtcatgtattgctttgggtttgcttttatcgtagttggtggagcattgtagtctttctatatttggatgtctttaagtgctcataaaaaattgatgttttcctactttgtacacccaggagctgcattggtaaggttatggattggtgaagctggtcaagattcaagtggtgtgtatttggctgtcttgtctagacatacttcggtatgtaaattagactcaagaatattcttacatattttatttatcctattttctagaattttgttgtgagaaaaaagaaagctataattttgttgaaagaaacaagtactgtgtttgatagatagaaagaacaatatgctgtaagtgtcagggtttgtgaaacttttgtgttgatttaaggtcttggatgttgagagttgaagcctattattggcacatgatttgttctaactttaaccctcatttttttcaactcaaccttcaattttcatgtcttcttgaaatctataaaaggcttgtactcaatctacatgatgtctttatttaattattttaaatttgaaggttgtcacttgtcattgtgatgcgtaagatattgaatacatgccttgcaactttttttgaaaggtaagg

SEQ ID NO: 188766 - DNA, 2064 bp, Cannabis indica
gatgctgatgataatgaaaaagatgaagatgacaccaattactataataataataataatggtgatcataatcagaacgatgaggacgatgatacatatgatgatgatcaagactacgatgaagaagaaaatgttgttcctgagtacaagcagctaattgctatccatgcagggaaacccaaaggtgaactaaacacttggttggctgatcttaactcttctgttaagatcaaacggcttagcttgagcgagcaagagcttgagaatgcaataaagcatcacggagctgatattgtcaggtaattaaaattataaaaaaatttgacttaatatatttgtatatatttattgagtataattaattatgggttaattaattaggtttactcagaggaattttttgagagtgtacccaaagggtacgcgtttcgattcttctaattataatcctatgctagcatggatgcacggagctcaaatggttgcatttaacatgcaggtaaaaattcatcaataaatatactctatttaagaacattattcctattgcgcctactagtgcttagcaccttctaaacgtagtcgtcttgcgattggttaactttctaaaaattattacattaaattatatgggacccgatacttaatttaaccaatagcaatattgacacgtagtagagtgtcagacaccaatagtatcttttagcatttctctttatttagttagcaccccttaccaattttagtcgtgtaatgcactatatagctatagagagtgaaatatattagaaatgtataaagtgctgtagtgtagcatattgtacagcttgaaccttatatgatgatcattcacttataatgatttatttaacctaaaatagtatatcatgtgtagttataattttggaaaaatcttacaaagtgatttccggtgggttattaaattttaatacataaatggatggtactgtgacattaatgtataacttgatgagtgcataatactgaatccatgaaaggggtacggaaagcacttatgggtgatgcaaggaatgttcaactccaacggagggtgtggctatgtgaaaaagccagacttcttattgtcatctactattcctcatcatattattgatcctcacaatccaaccgtaaagatgattctaaaggtatgtccgtacgtacatctcacagtagtactattactcaatcttaccaaataaagtttcattgtcattaatattacctaacataaacaggtaaaggtttatatgggtgaagggtggcattcagattttcgacacactcacttcgatcaatattctccacctgacttttttgcaagggtatatatacatatgatatatggccttctctctctctgttttccattatttgtataaggaagaattatatatatatatataatttattaaatgggcaggtgggaatagctggagtgccaattgaccgctcaaaaatgatgcaaactaaagcagttgaggatgaatgggctccagtttgggaccacgaattcgaattctcactgagtgttccagaattagctgtgcttagagtggaagtccaagaatatgacacttcaggcaacaacgactttggaggtcaagcagcctttcctgttctagagctcaaatctgggattcgagctgttcctttgtacaacaaaaagggtgacatgtataaaaacgttagacttcttatcaagttcgaagcaatattattaaactagtaatgtactgcgcccacctaccttatatatatgtagataccttttataactatttgtacatgatgtatgactgtgacctataatatttattgtgtaaataataaatatgcactactgtacctcctctaattaattaaacatataagtgcttgacgtcgtaccctaacaaattagaagaaacactatattctgattaaaatttgcattgtatttaatggtaccatcataaattttaggagttttttcatatttatacttaaaacttttttttttttttttttttatttttagttgcttaatttacgttaatttac

SEQ ID NO: 188767 - DNA, 2278 bp, Cannabis indica
agatcctgattatgcttatatttcataaatatacaaaaaaaataataaaaaaattacaaaaatacgattattttatttacagaaaaatacagtcttctgatatatttttatgttacactcttattaaatttttgttattggtatgttattttttatttttattttgatgatgtttgaatattattttcctattaatttttttgttgttttataaaacatacagagagagtattagagtgtccgagtgaggtcatgagatcgaatcgcagcaatataataaatcaatgttctctttcattcatttccaaaaacttttcttcaatggtgaaaaaaatgaatatgaatcaccaataatctctacaagtacaaactccattttcaaatctatgaaatctattgttatctctcacaatgataactcttcctgaacacttggaaatgaactttatagcagtatgacaatcaccacaaactctcaagtttttcataatccttataggcctttcatgtgggaaagtaatgagcccgaaagctatggctaatctttcgctatgataccgaattgtctcgttcttctcttcaccatcaacccttttaagcacaaaactagtgtctgcaacataccctgctctctccatttcatctcctaactcatcaagtttcttgtaaatctcttcggttttaaaatgagttctatcgcccgaagcaaatgtgtgaactttgtttccatcttcaatccaactcaatccagtttccttcttcaatccttgatctcttaacatcttccttgctttggctgcttcatcccattttccagcagcagcataagcattagacaaaagtacaagaagccccgagcctacattgcccccgagttcagagatcttatgatccacaaaggctgccaattcagcattgccatggattctacatccagtcagtaaagctcctaaaattgattcagtcggttttattggcatcccttttaccatcgaaactgcttcttcgagttttcctgctcgcccgagcaaatcaaccatagaagcatagtgttgagctcctggctcaatcctatactccttcatcatctcaaagtaatactttcctttctcaaccaaacccgaatgactacaagcatagagcaagcacaaaaaggaaatgaaattcggttttattcccacacttctcatttcaccaaacaattcaaaagctttatctggctgagcatgttgagcacaggctataagcattgcattccataaaccaagattcttagcagttatctcattaaaaacccgaaaagcacattcgataactccacaccgcgaatagagagacaccaacgagctcccaacgaaactcgaagaatcatagctagttttgaagcacaaaccatgtatctgccttcccaactctaacagagttgaatttccacaaacccgaaccacactcgaaaatgtgaaatcattaacatccaaattctcaaccaaagcttgtttaaacaacctcaaagcctcttcatcatcacccaataaaacatacccagatatcattccactccaagaaacaacattcttctcaggcatttcatcaaacactttccttgcatatttaatctcaccacatttagcatacatatcaaccatagaactaccaacgaaaacatcaaattcaaaaccagtcttcacaacaagtccatgaacactctccccaatatcacacctacccaaaatagcacatgacttagtagcactagggattatatgatcatcaggacaaaccccattctcaagcattttcctaaagaactgaatggcatgtgagggaagctcattctgggcaagtgaggcaatgacagagctccaagtggtggcagatttgtatggggattcattgaaaacatggcaagagtaaatggggaactgggttttggagtagaagttgatgaggttgtgggatatgagtggaatggtttgaagacccaatttgatgatttgggcatggagttgaagaccctttgggagtgatcttgaacgagttagtgagagaagaagatctgatgtgtgcttgtagttgtagctgtgttcatcagctgtgactctgagcataatagaagcctagaaagtttgacccattactaacaatttttctaagtcttatataattacaaaaacaaaactgttttcactttttattttttaaaaattaagaattaatttttttaaaaataaatgaaaaaaaggtcattgttaaaatttatttaaaaagtttttttttt

SEQ ID NO: 188768 - DNA, 2695 bp, Cannabis indica
cacaccaaaaactttcatgtttgcaatatttcttcaataagcaggtaacccatggtctctccatgttggttgcaagacaccacgccggcttagtgagtaacgccctgttcatgtcttcgcatcttctcaaacccaggcctcccattgttttcggagtacagatcttatcccaagctttaaaggccataaatctatccttttcagcgcttcctatccaccagtattttctcataagagcatcaagatttcggcaagaagagataggtaccttgttggtggacatagcatagatcggaatagacgaagcaactgacttgattagagttagacgcccagcataggacaaagatttcatcttccatccttctagcttcattcgcatgctttccttaagtctgttgtaatcttccacttttcttcttttgaaaatgaatgggttccccaagtgtttttcttcaccactaacttgattaatactcagtatactcagaatatttctcttcgactcagcacttgtgttcttagaaaacagaatacccgactttggtttgctacatgactgccccgaacaattctcataggtcgttagaatcttgagtagattccttccatttgattcgtttgctctagcaaaaagaatcgtgtcgtctgcgaacatgaggtgagatatcgaagggcaagaatgagcaattttgacaccatgcatgagcctcttctcttctgcgcgagtgataagtctggacaaaacatcttggcaaaggagaaagaggaacggagagagcgggtccccttgtctcaatcctcgttgaggaaaaatcttcttaagaggacagccattcagaagcaccaagtacgacacactagtcgcacacgccattaaaagcctacagctcttgccaataaaaccacttttgcaaaggactttttcaagaaaactccattccatcttgtcgtaggccttatgcatatcaagcttaatagccataaggcctcccctaccctttttacctttgatcttatggattagttcttgagtgaggatagaggactcggcaatccatctaccgggaatgaaagccgattggaacggggagaccaattcttccatgagatgtctcatcctattcgacaggatcttagcaataatcttgtaggaaaaattgcataagctgatcgggcgatactgctctactcccatcgcaaactctactttaggaataagacagacaaatgtattgttaatccttggatcaatattccctgaaagaaaagcttcctggacagtagcacagaggcacgggccaactatgtcccaatattttctgaagaaacaccccgagaaaccatccgggcccggagctttgagaggatggagactaaaaactgcctttttaatctcttcgacagtaggaatgtgaaccagaacttcgttctgtgatggagaaatgcactttacctctaacttttccaactcatcgtcaaggatcggagtagtagtagtatagaggtcagtaaagtggagattaatgaccctagcaatattcttcttatccttccatattcttccatctttatctttaatagaccagatactattccttcttcttcttaagttggtcgatgtgtgaaagaatttagtgttccgatctcctagagctagccaagtttcccttgacctttgcctccacatactttcttgtttagaccaagagataatcaattgatcttgaatcagtgcctcttccttttgtaaatcggcagagataggctgttgttgtatccattcaagtcttctctccattcctttgatttctttctcagagactccttgaagctttttcttccaaacttggagggcctttcttgtgttactgacattcctaaccaaggcctttgaggcttcattactctggtagttccaagctttgacaacttcctccctacaagagctttcccacgtccaagcttcaaagaatcgaaaagggataaaccctttggcagcaaacaaatgtgtatccaatataataggtgcatggtccgatatggaaataggaagattaagaactcccaaaaattcatagttattcatccaatctccagagcacaaagctctatccaacctttctctaattaaccccccattaaatctcttgttctgccaagtaaatttgtttccaatataacgaagatccacacaacccgtattgtcctgaaaatttctcaaccatctcaagtcagacattgtcactttagagcctccaatattttcttccttgctcccaatgcagttcaagtcacctattaccacccatggtaactggaataggttgatttctgcctccaaacagttccaaaaaagttctttttctctagcataaggagtcccataaactgccaccaacttccactgaaactgagagttagagtcccacaccgtagcttcatagtacccttcagtcgcaaaatttatatgcaggttgatgttgctattccacaataagcaagaaccacccgccaacccttgtgaacctatacaaacgcatcctgaaaaacccagggcacgccccaaattctccatcttttccttacaaactttcgtctccattagaaaaatacaatctacattgtattttctcacccaaacctttaaggcttgggctgtcgggtccctagcgaggccccgacagttccacga

SEQ ID NO: 188769 - DNA, 3338 bp, Cannabis indica
taattgcaatttaataataaagaaataaatagagatatttgcagcaataatactcaaatcttttcgattgttgcagtttaatatccaatatttttttagcaatgataatacaaaaagttagatattttgttgcaattaggtagaaacagttaaattttgttgttaaaacaaagatgtggcatcatagatttagataatgttgccacatcatcatttaataataaaaattaacggttggtaccaaattgcaaaatactaactttttgtattattaccacacacaaaaacaaaagatttgggcattaaagtgtaacaattgagtattattaccgcaaataacccaaatgtgcaacctaccatgtcttgtttgttattgtttctattggcaattcttcctctccaacggcattgagatatggctgaagctcttctaagattccgataatctgagaaagctttataacgacgccacgaggcctgcagaacaatggctgcattagattgccttctagatctaaactcatcacgagaaaccattgcccgtaaaccagtttgcaaaacaattgcagatgacttgatttgcttatagtcttttctggcaagggttcttcgtaaattcttctgaattttgactgcagcaacctccctttttttagtcttgtatgaattgcgcgccattttacctataaaatggacggttttactatccattctaacatttccaacaaaaaagaatcctttatatgcaaactcacctctccaaaaggattgtagatcaattgaagccttttgcatagaaagaaatcttctacgagctattcttgttctaacttgcagttgtataatcttagcagagttcccgagtatttctgtcctgcgtgcatctagttctgccatctgcccggctcttaagaaaacctttgttttgcctatctgcaaaaaccactcggttcagtgctccattaaacatcagcaagtctaaagacactgatggctttattacctgataaccagtgagtcccatcttttccagaatctgttcgcacgcaaccttctcatcacagctaggtaaagttttcgtattaatcgtaagcaataacaagtgaaagaagtgaaaaaagaagaaaaaaaacatgcctacgggaggtaatgaaatggaatagagcagaaagtaattaattttcattccattcctttgtttggtggaatgactattctgtgtttaaatggaagtaaataccattccaatgcaaaatggttaaagaaatttttttatcatgtattctcaaattgattctattctatttatattctattcttattcattttcctatgatttcattctttccaactaaactcacctaagactttcaagatgacaaagtgaataaaataaagttcgatacttactttcctttaaacctctggtgccaagatgccaaatcgacttagaaattcaaagaaagtcctgtaagtagggtaacccgaacattttatccttactgcttccaaaacgccctgtaacaataacgataaaagtgaatgaacaagcatcactcaataacaataataatagaacacaaatttggcctgattacttacacccgaacgtaattgttgtatgatgctcgtattatcgaaaatcgagggtttcaaaagatcatttggcttaacacatctaatatagtgaggctctgtagactttaatatttccataagttgttgtagttgaagctacatgtatgtatataacaaagtcagatataaaatttcacctaagtggtaaatctgctaattaaataagatgatagttaattaagtaaccttaaaacgcgaaccgatagaagagaacttggaagatttagctgactcatcggaaagcgaaggaaataaaccagatacaaaagaacatcttgaagaacttaacaaatcttgatgttcgggaacaacataatatttgttcttgtcaagaaattgatcggattgatattgaacctagagaaagagcactgaaatgcataaataattcaatagcagaaaatcgaagaaaacagtttataattgcagaaactaaagtcacctctcctgcataatgcaataggctaaaatccgatcgagccaattttggcttcacgaagcgttgtgatcctgtaagtctgataaagcttttgtgcaaacgtttcataagttgactttggaaacatactgtgaaaaaaaaaatgttgccatataagaaaatatgaatattaaagaaagtgcacaataccactatttgatttggattgtcaaaaaaattaatagcagaatcaatttgattttgtatccatgacaacaaatatgctaaattgtcatccttgaactccacattgaagtttaacaagaaaaacagtttgtcaatttacaagcaaatgattattaaggtccagttaacaataactaggtgaatgatatttaaaaagaaaacattggcaaagaaagcacaactgaataatgaaaacaacttaattttaatgttaaaaattactccatacagaaattaaacgagtaaaaaagtatagatagcatagccatgtgtatatgcatatcacaatcagaacaaatagcattgacaaacaaggagatcataccaggcttcatcgagcaaagcgataattccacctggtttctgcaaaaatgaaaatgaataaaagggatagggtaaaataaagcaaataactcagtagttcacttgttgatcattacttatatgacacaataatctgaaaaatgatccaaatgattatatagatatgcaatattcatcaagaattctagtcaagtacaaatataaaaaactctgccacacttgacttcaaagaatcaaacaaaaagaccatgaagccaatatgatttttcatagggatgaaacagagtgtgccgccaatattttgtcttgaggaaatgacaacggggccctcgtgaaggagttcttgagagctaagttatgtaattttatacgataatgcttgtctcagtaggagctacaagtagatttttttttctgctatacataacgaaaaacaaagaaacaacaaaggaaaaaaagagcagataaggacaccttttcaatgagatccaacacgtcttgattatcaacatatcctatgtagctccagttgatttgctcttttatgtattcctcttgctccatcttgaacacatgctgtattacacaataacatcaagaatgtacattcgaaaaaagagttacagctatggttgtcaagcgactaacctcgtacctggttgaaatgttgttgcagcttctcatttgtaaaattaatacagaactgctcaaa

SEQ ID NO: 188770 - DNA, 4989 bp, Cannabis indica
tttgtaccattttagaaagtacaggacccgatttttcatttaacaaaacagagtgtccactcaataacttttgtaaaatacagagtctaaaatcgtatttattttaagtgaagttactttcaacaatgaatgaatgatgatgaaatttctttgtctataacatttttattttaatttgatcagatagaaatgtcaactggatctgtcatcccggctagtttcgatacaacctcaagatgtcctgatgaaattgtcaggagaatccgtgttacttcatcttatgaacatcacaaatgggatgggaagttgttggaaacatataatactctaaccgatagattcgaaatcgccccatgtcgctggtagaagttcaacttcctgtaccttaaaaaaataaaaatggcagctttgttttacttctgaaattacatattgtacagtttatgtgttaagttaatgtgtctattgttacatacactcatgaatcatttgctcatttttgactaatataggacttggcgtcaagaaagaattgctaggagattgagagacctgtctgattctgaggtcctccatttgtgttctacttcaccttctgctgaggctccagattttgttgcaaacgaaagaaggtaggtaaaaaacttacattagatttagcttggtttgaagtttgaacatacatgaacatgttagttattaatctcaatgtgtagtgtagtgtccaaacataatatcgtattaaataatactaatacaatacaatacaatatagcgtatcaattgagtctaaaaatgaaacttgtctgtaggtgtaggccaaataaaatcagaaattgtctgtttcagctctttggtgtaagaagaaatgatagttatgtcttgggctgttattgtggtctgtttaagaaagtgttagtacttatattcatggagctctcagtttggatagtggtataggctggttgcgactgttatcagtttaaatatgttatgcaataagtggaggaattttttttatattcattatctattctaaaaccatgcaatagtactctaaaaaaactagataataatctaataagtcttaagataaataataaaagggtaattgggtaatttaggtctcgtctctctcgaatacccagtaaacttgttctcatatcactccaatgtttgaaaatatcataaatactttaatattagaaaaagaaaatctctaacttgtaattttctgtcccaccaatctacatagtaaacttttattatctatgtaatccttgttgtgttcaaacatgaatagttggaaagtagtgcataatatacttgtgatctcatttcaggaagtgggagtacttgattcaacacccgaattggaatgaaacatttcctatggaacagcctcgagtatttaagaggactgctgatggagattggagaaggtgctaataataatcaccatttttctctctattttctactctcatattcactttttatatatttgtattgtttggttgtttgactcagttgaacatgtaatttttgttgagaataagaagaatgttacccaaacaatcatgttcacaatccgaggtttgagtcttcttgggtaccaacataacaatctctatacttacttgcttgttaaacaaaaaaggccaggtgcccaataatttaaagaagatgataagttatggtatttgattacgaaaatgatcttaaattacaacaaaggtttctaatcatttgtttaaggtagcaaaagatttaacttttcctacaagtcatcaccctaaaaatttgattgttctttcttttagcttcctttcattagtttacttttcgtcatgctgacatgataatgagacaacacccacaatgctcataccaagtagaagggttggtggtctttgcaatctttgttatgtttatagagaatgtaccaatatcagtaaatgggcaagagttttcatgaaaagaatgataggaaccaaaccatgatgagatcaatcagtctctaagacatgatatttttctctttttctctttatctactttctctcgagctagtacatatacacatatgaataagaaagtgccacaaaattagatagatatgttatatttgaacaaccaaactattcattcatatagaaccacacccatcaaagcagtccatacaaattgtgcctcttcttttgttttgggtcatatatttcagttctcactagagaaaaaactagtaaagaggggcaataaacagcacaatttaaatacacaaacaataagatgatattataactttagatttatttttactatgtcagctacagtgaccaccctctctaatagcgcaaaattttgttcactatacttgaaacaaaaaaaaaacatgaaaaaatggatcggggcgaccccggattgctccgctatgaagtgctattatcaacctgttccttccttttaattcaaattcaatgatgagtgagtaccctagctggaagtttatcaaaacttgtttaactcaacttggaaaagcaatatgcattcacgccgtcatttttacttggatttgtcgatgaacatgtactagaaagtcgacataggacgggccagttggatgttgttggtcttctacaatataagagaagaacaacattcctgcaaccacaagttaacaaattgtacagtcagtatcagaatttcatatcaataaaaactcgattaatcgattaataattgaccacttgacccgaaaaaggttaatttatacattgtgcaatgaaatgtcagaaccatattaataaaaattttatgattttgaaagtactgacctgatggatctcctttcttgcacaatctcaagctgcaaaaattaaatgagacaagattaagaagttattacggaaagattaagagaaatattgctagaaatgaaactgcagagatcagccagtcataccgtaggtaagaacatctttggcgccgtatttcattcataacttcattcagcctctttgatagtggattgtcatactgctgcaacacaaactacgcaacaaaatatttacatgttacacaaactcccaataatgtttttctattattaatagttttcaagaggaataaaataaaaggatctagcacccaactcgggattccagatttaaatgaaggatatatcgattataaggtaagatgttcgaatccctcgattataagttcttctaacataatatataagtgaatatgtaaataaaagcaatatttaaaaaatccctacctgtggggtaacttcgtcaacagaagaaataccgaaaagttgtttcagtaatgctggatctgctgtgctaccaatgtaaattaaacaatcttgaccattctcgagaagatagattccattgtcactaatatgctcactagaaagtgcaacgaatggaggaagaacagtatcatcattctcctgtcaacagaaaatagcataatgtaaatatatatatagcatattttatctgtaatatagtccacattaaaagaataaaaaggaaaaagttaaagacattattcataccttcaaatcaagatcatgaatagctatcatccttgggtataccagtggaattgcgagaggagtagagatggaggaaacataattgatccaatacgaacggtcatccatcctcccatcatttcgcaggccagtacttttgattaatgctgcaaaaagaaaaatggaaaatatgtgagttcgtgtgcgggtgggacgtttaggtggttctaaaggaaacattatatgaactttgaaaaagagcttaaccggagcatgaaaaatgctaatatattctcgtgcaggaaaagggaacatacccagggtgtacaaaggcagaagcttaagtgcctctggaaggataagctggccagatgatgatggtgtagcacaaaatttacggtaagcaagcaggctgttgatgcatagattcgtcacttgttcccgaactcgtgagagtggattgaaaggaatttcatttgccgctacaaaggataggaaaagaacacattaattgttatttttcttacaattgaaagttctaacaaaaagttaccaatatctccaaaattctgcattgtaattaatattgaacatgatgaggcaagtaaaaaatacaattgtaatgagagacaatattatattcacactctacagtcataagacatattgatgatgtattatttctcaaaatccatttataatttaatatgcaatgttttacagaagatttcctattaatctattacacaatgtaaatgagaaaaatgacttagaattgaaaaataatgtcaaattaaagaggtagctaaaaccaggaaggaaggtaaggaaaaatgacagaagaaatttaaaacatatcacataccttgcttcaagaaacatgtgaattgagagtccaagtcagctgcacgaaacaaatagcttagcatatttgtgcacggcagtgacaaggttgtaactcgaattctccgttgaccatatacagttgtgtaaagaagggcacactgcataataaatagaaggaataggatcattcatcttcttagcagaaaataatttgcttcaaatggggagaaagaaaaaagatgatacagattgagttcacattagcttttacctgaaaagcacattctgagccatcctgtagtttatcatcgtgttttaaggtcaccaaaatagttttgtcacagtcaatctgcaaaatgaaggaagatataaattatatatttccaccaaacagttcacagagcagaccacaccaagtgaaaataaaagggagtaacacaatgcaatgaaacagaggtattaaaaccagaattaaaaaacttataaaaaattgtttgaacatgatatactaaccccaggtagatcaacatctgttggaatccgcttgcagaagtttccagagtagtcttgaacttgaatgccctatacat

SEQ ID NO: 188771 - DNA, 864 bp, Cannabis indica
tgtacaaatgtgcactcatcattagtgcattgctatatgatacttagtactgtttaatattacgaaatcttaatattagtacaattgtgaatcttatatatttcactttaaattaaagtatttgagattttatattacattacattaattggtaaaatgttgattaggtaccactaatatttttagtaatatttattattttgttatatgttatgacaagctatatatatatatattttttttatatgttgaatacaattttatgttagttccttaatttagttagtttttcacagtttttacatgtaagttgaatgtcaatacgagattggctagatggttacattttatgttaaatttaattttcaatgtattaggagaatcaagatttgaacttgagatttcctcttttgtaagaaagtacgaaactaatagattatgcttatgttaaatttagttaaaaagaaaaaagaataagctagctcaatactatattgattaacatgcacaaaatgtgatgacatttactgatgagttttggtgttgtttttgcaagctaataataaccactaaaatacgaatattttaaacattgtttttgatttgtcgcctaaattatttattattaatattttgtatcaaggctaacaaatgacacacaaatttgttaaaagtttgtcagcattttaatttgtaatataaatcgtctatgcaaatttattgaacatataaacatataaacatataaacatgtataacttaaggtggcattggattgcttttagctaaatatgcctctcaaagtaacctctaatattgtttgtgtgtaaatgagtgcactcttaatgggtattacccatgaat

SEQ ID NO: 188772 - DNA, 1278 bp, Cannabis indica
gcagtgaaagaggagccagtaaccgaggctgcaatgaaagaggagccaataactgaggctgcagtgcaaaaggagctagtaaccgaggctgtgatgaaagaggaaccagtaactgaggctgcagtgaaagaggagccagtaactgaggctgcattgaaagatgaaccagtagatgaggctgcattgaaagtaccagttgttgtgaaagaggaaccagtaactgaagccttattgaaagaagagccagttgttgaggctgcagtgaaagaagaactcgtagctgaggctgtagtgaaagaagaactagtagctgaggctgcggtgaaagaagatccagcggaagtaaaagaggaaccaataactgaggttgtagtgaaagaagaaccagtaactgaggctatagtaaaagaagaactaaaggaagaacaaattgagattttagagaaagagttagacgagccatcgaagatgattaatgttcctgaattgtcgaatgaagcaatagaggaaccaaaggagatagtgaatgttgaacctgtcaaagaatcagaaccaatagtgaaagaagttgaaaaatctactgaagaacctaaagtggaggaaaacctggcaaaacaaatcaaagtcactgaacaagttgaagaaaagtcttctgtgattgagcctaaggaaagtgtgaagattgaaacattagtaaatgaagagtctctgtctgataagattgagcactcagtaaaaactgatcataaagatgatgagtccagtttggtcgaagcatcagaagaagttttgattggtgacacagagaaggttggtgctgaggaagaaaaaaggatctaagtgaagttcaagaggctgagaaggagacatcaaaggttgaagaagagtctgctgaaaagaaagtggaaattcatgagagccaaaaaagcgaaatagtaactgaagatttaactcaaccacctaaagaagaggctgtcacggttagcacgattgaggaaagtgttgtagaaacagttgttgcagaggaagaaaagaaggatttaaacaagattgatattgtggccaacataccgaaagagggaggacttgacatagagaaggatggaggagaagagtctgtggaaaagaaagtagaaactcaagaagaaaaggaaaagaagagtgaggtgccaactgaagtagctaaagaacaagatgctagcatttcaacttctatagccaaagatagcgagaattcatttcaggttgctgatagaaatattgagttggtggaggaga

SEQ ID NO: 188773 - DNA, 3887 bp, Cannabis indica
acaacaatttcagttttttatcaatcacgggaaaatattatcatttgttcatatttttcccatttctcaacctcatatttgaataagatgtcagagcatatatttaagctaaaaattaattaattagtataattatctgctttttataggagataatagtacattttaacacttaccaggggaaaaaaaacgatgaaatgagtaatttttttatttgaatgttacatgaccccattttaggctgtaaattatatcattattcattagtttttgtgttgctatacaaacgacttgtcgctgaaaacattgcttggattttaaacagcttttatttttatatttttttgttctacccttctttctttcctaaataagtagagaatgacatcttttaaaaagttaaagacagaattaagagacaatatgatctagatagtacaaggattatccatataattattttgacaacgcaacgcttattattaaaacaaatatttgatcaattacctattcttgggaataacatgggaagctataattagtttattcatgccactttatcatgtgaaagctttaaacaaactcaatgaattcatattagttacttgtacaacaagaaaaagagtttaatggtatttgtttaggaaaaacaagagatagttaatccactatttggtaggtcaaacactattatcaggaacaaaaatttcgaatctatgtgtgggcaaaagtatattacatttttgagatatttgcggtgaaatcctctttacatttacaattgtcacacatatgactaataaaaaatggcggcaaaaatatcttactttacagttttgttgcagttgtattattttttggctatcaagtgtcaatttagaaatacgtggcgatatatttttagattacgtattaaataaattaaagatatatgtcgtcacgtgtttccgaattggcacttaacggatttacttaatatttaacaatcaaaaaataatgcgattataacaaaattgtaaaataaattacttttgccgctactttttttttattatagtcatatgtaaaataattacaaatgttaaaaaatttttgccgcaaatacccctacatatttttatcagttattatgtcagtatcaaacctagtttattttaaaaccatcaatatttatttcaactttataaattaccaggtaagacctgctctttggagtaacaggcctttacaagaatacaaggtgccaatcagtttttctttttccattaatgtgtaagtatatatatatatataaatgtatgtatgtataatgtatgtatgtttataattgctgttttaagttaacattaataatcattatcattattgttgttaacataatcatgagatagattgcttaccaaggcacgcactcgtgcaccttttgtttctactcgattaaatgattacatccatagtccattattgtgtttgatcaattttatatatgtaatataattgtttctattaataaaacagacaacagagtaccacccactctttgcatcctaagccattgtatgggactcaaatcttttgagaaagctgtgaacaaaatcatgtgagaatgaaaggtgggcatttattttaagaaatattataagctttaaacacattgattattgtagtatattgtattatacatagattagggctttgtaaagcgcgtttgtttcaccaaatcccatgtctatcttctatcctaaacatggtctttacaataatttaatgatatggatttgtggtatgcaacttggctttgttctttgacttgttccttatccataatgagtctcagctagctctcttgtcgtgttgagagcttattgcttcaaactttgacaaaaaaagaaaaagaagaaaggttaatttttgaaaagtgaccaagtacacaaatggatgagaaagtaaggtaacactaacatatggtcaaagtgaatcaacttattgtgattctattctacactttgatatgtgtgagactcaataattgaacatgagtcatgaacacatatatgtatttatagtaagaatatgtaaaatcataataacagtcaattacttatttaccatggtaaataaattagtacaacttagaaagaaaaatgagcatgtgcacatgatattaacaacacaccaacaatgccatctcatagaactataatagaaaattggaatcatataagttgagatttatgcttcttggtagcatgaccaccgtctgtttggttttttagagggtcaataacctaacaatttagaaagaaatggaattaagatgattaagtggacggtttgtcaaattcaatcatttatttattattattaatgagcaaagaaaattttaaaattatattaaatatttagagcagagtgggggaaatgaatatagatggagaacatggtctgcatattattttattcgaaaaacccatgttagggagcaaaagcatgacacaagtaatcgagcctttttgtcttatgtagtatcataattaattaaataaattaaaatcaaaccttccttgattgagatccataattgggattatggtgggatacaataaaattatttcttgaaaaccattgtttatttgtctgaaaaacatcaaatgaaacctcattggctttcctataagaagtagttaagttaaaggataagcatgaatattattggacaatagaattgtttgataacagccaagaaccgaattaattaaagataatagtaacatcataattatatattatattgtcaattgagcaagcctcttgtaattggttgagggttaaagtgattagaacaacaaaatgcccagagtaaatctaataatattgactttgaaaactactgaaactttatttcaacctttttaacaaggtgatgtattatgacctagcttatacaatacaataagaataagaaagattgtattaaaggcctgaaggggtattattacacaaaagaaatcattagtgttattattattattaattaataaaataaaaacactgaattaattgaatatttattttttgtagacattaaagcttgtctcacgcaaggaggcaatccttctggcatgtcattaattgagatcatcaaattcaacaattattatctatttttattaaaaccaggaaggaaagaacttatagctatttatttctgttgggattgaagataatgtaatcaaactctttagtggcctagtggaatccatatatacatatttgtagctagatttgcgccatccttttgtattgaaagtttttcaccatttatatgaaatgatcacttaaaataaagtgaatacataaagaaaaaaaaacatgcatgtgtcagataattaaaaaaaaaagttaaatgggagaaaatatctgtcaatataaatttctatgcttaaaataatgaaaaaaaataataataaaaatcttaggagaaatactaaagtattcaataatatattttatttaaatcttacaattattattgttataaatgttttgcttctaaaaaattattactatattatttaaaaaaaactataaatagtataaatatttgataattattgatatatacaaaaaaaaaaaatataaatataattatttcacatatttatacttgatatataaatagattggattttatatgttttattagtttttgattacactttctctaattttagtatgaaaatgaaaattaaagatcaccaatatatacttaaatagcacaaacaagaattgatcactaatgatttctaatataattgtgtaaaatatcatgtaaaatgtatgcaagctagtgaattaaaagagaataataataataataataataa

SEQ ID NO: 188774 - DNA, 2164 bp, Cannabis indica
tttattttacgtgggatgtaatctaatcccacgatttcaagaaattattgttgtaaaatattagtcaaatctgtaattaattgccctcctatgtaattataaataggagcagttcatactgaaaaagggatgaaaaaatcattagagaaaaagccctagaaatgtaccaaaaatctaataagattgactcgtggactatgtagagttttaactgcaaaaccacataaaaacctcagtgttcttattttttctttactgcttttgttttctatgcaaatctatcacaattgaggctcaaatatagttaacgaaaatctgcgttaacacctgtcataaaggcttctacagttcgtattattctcataattgttgtaactaagtcatgggaaattcgacaactcgacatcaataatgcctttctcaatgggcacttggaggaggatgtctacatgtatcaacctcaagggtttgaagatccaaatcaacccaatgttgtatgcaagttaacaaagtctctatatggcctaaagcaggcacctcgagcctggtttgacagactcaagacaaccttaatcaactaggattttgtgaactctaaggcagactcttctctcttcttttacaagtctgctgatctaattattttagtgttaatatatgtggatgacataataattacagggaaccatactgccaaactgaatcatttcatccacaaactcaacaccatgtttgcattaaaagacttgggacccctgcacttcttcttaggtattgaagtgcatcgtgatgacacaggactcttcctaaaccaagggaaatatgtgaaagaattactcactcgaataggcatgatgcatttaaaatcgtgttgtactcctatggaaattgggaaaaagctgtccaaaacagatggtgaacttcttgccaatcacactgactataggagtaacataaggggattacaataccttacttacacaaggcctgacctatcgttcttatcgaaaaactgagccagtttcttcaagctcccacaacaacacattggagtgcagcaaagagagttctaaggtatctaaagagtatttcctaccatgagcttcacattaagcactcagacagacttgatatcataggttactccaactccgatcgggcttgttgccctgatgacagacagagtgttggtggttactgtgtttatcttggagatactttggtgtcgtggtcctccaaaaaacaaaccatggtatcaagatcgagtacagaatccgagtatcgctctcttgcacaagttgctgctgaaatctcgtggatttagagtttgttaaaggagttcaagtttcctcttagtcacacactagtaacatggtgtgacaatatgagggcaagtgctcttgccatgaatcctgtctatcatgcacacacgaagcatattgaattggacattcattttgtgagagataaggtcattaacaaaatgcttgaaatcagatgtgtttcttcgagtgatcaagttgctgactgtctaaccaaaagcctaagcaatcacatatttcatttcttagtggacaaacttggtgcagtgagacaccaccaagtttgagagaggctgtgaagaaatgaatttcactctgttttggttaggcagtatgaggtggcatttcaacacgtggtggtcctaattttgtataacaaactttgttcgttttttgtaccgttagaatattctttattgtgtaaaaggtgtgattgattgtgtaatgattgtacatgattttctagtgtaatgattggcttataaatacaattagccagcctcatatttagatgagctaagtatttttattttcgggtttgattaattttctaagtttggaatctcattctactaagatttttagtggttccaaaagatctagctacaagatatataactaggaatagagagctttccccctttttcgggttctattcataaaaaaagagttgcatgcgttttgagaagccacatacataaatttgattgaagatgtcaatcactttcatgagtcattgagtgatcatggttaatttgtttaattaattaaatacaaagtcctttttggagactctttgtaattataacggttatttgcagcataaatacctattttgttca

SEQ ID NO: 188775 - DNA, 2180 bp, Cannabis indica
cagagagtttcgatgccgatttcttggctcaaggagcttgaagaggaggaggaaaaagagacttgggtctccgtttggatgattctgttgagctcttgcttcgatgccttcccgacgtaaggaacattttgatcttttgttaattactttatcttattgctgaactgtatggtagagaatcttattagcaatgcatgtttactcctttttcatataatcttataactggtcaaatattggttgaatacatgataaagtttcatgagaattatatcttttgttacatgcagctaattataagaattttgatggtttggtttgtctgcatgtatacataagataaagtaataaacaaagattctctaccaatacatttgatctttgggaattataactgagttttgcactcttttttttatttatatacataaatcattttctgttgtttttaatatcaaagtggtgtcattatctgtctttttttttttattgtagaactgatgatattattgatgttcttatttcatcattgattatgtaaatctatttgttgcaactacttttatctggttttgtactctcgattcttgagttagtatttagattgagaaagccttttttaactattgaaatgtttagttaatattagttttttaaaatcttgcttatccttacttccttcgcttataatttatctgaaatttaggtttattttaatgtcttgagttggttacgatcatcttcatcacattaaaacatgttataagctgttacgtgctcttcacttttggttttcgagtttagtattcttttgacatagatactatcctgttagttaatagagatacatgcactgtgctcctcgtggaatgtcttaaaggtagtactgaccctacccaagcaaatatttgtttcaaagagcagggttttcgtctttctagctcttaaattataatttaaatccctgttggcttactggtgattgtatgtaaactttatctccaatgcacaaaggttcctacataaccctgtagtatttcaggatcaggaggctatcgaaatttctatcgagatacttataagggacttgaaaaccccataggctttgggtgcacaaactatttttcttcacactgtactgacattttttctgtttcttaatattgcagattcttcatctcacatgatcgggaatttcatgtggcgtcacttccatacaaaccagactttaaagttatgccagaaggttgggatggtactaccagagatttagatgaagtccattatgagatctcacaaaaagaagatgagatgctttatgaagaattcgtccagaaaatgaacttcaacaaaaagaaagtaagttcttcctgaccgttccttgacaaattaagtaaatgtcaaatttaaacatatcattacagtaatgattcatttttcttttgaactccattttctgaagagagcacaaacatgaacaatttcgagttgggtatttttaatttctagctgcattcggttttcaaaaaatgatgaatggcacagccaattccagcacagcatttctttatgcttctttgtttgatgtgattgctgcatttgtacacacacagatggcaggtgaggtcttccgacacaagtacagccgtcgtcgtccttcaaatggctggaatttcacagtggagaaaatggggtcacgtggtaagcgtggaggtggtggcgggtggaagtttgttagcatagccgatggttccagtcgacctctaaacgaaatggagaaaatgtacgtaaggcgagaaaccccaagacgaagacgcaaaatccttccttgatgatgactcacttaagggtttccttggtatttgaataaatttgtttcatagattttgttcttaattttctgtgctgttagttttatactgccaattctggtctttgctttgctgcaaaactataatatggattagaatgtatactcttttagagttatattattgtattgtattgatttgtttttcatgcacattaattttggtgaaaaatgaaaatctttggtaataagaatattttcttacgtacagttcaaatttatcgaagaccaaataaaattaatcagagtaaaattgtaaaagaagggtcaaacttaaaactacactatcaagtcattctctgttggtatg

SEQ ID NO: 188776 - DNA, 580 bp, Cannabis indica
ccccgtttgttgtaaaagaaactgttaagaaaattgttgtgagaaataaagtcaaaattacctaaaatatatggaatataagtgattttacatttacaacctttacacaaatttatttattttttattgattaactataatactatagttttgatccttaaaatgaagaaagctattaagattaaagattataagcctattaatttatgttctactttttataaagttgttgctaaaattatttttaataggattaaattaattttgagtactttaatctttagtaactaaagtgctatcttgtgtgatagaatatttttttataatatttttattactaatgaagttgttcatgctattaatcacaaaaaatgtgataaggtggggtgaactgttcttacgcttgatatgagaagacttttgatatcattttagctagtttccctactaggtttgtcactttaattattgagtgtatctcttttatgtccttcaagttgcttattaatggtcatttttctagtagtttttggtcctctaagggaattaaacaaggggaccatttatccctttatttttt

SEQ ID NO: 188777 - DNA, 679 bp, Cannabis indica
tgtctgagggtctttcaacgactagttatttgtataaaagagttcactaaatagtttaagggtatctttgtttataggtccgctcctgttattactcacttgctttttgtggatgttagtcttttgttcaatactgttactcatcagtcttgtattgctattaaggatatcttagaactttataacaaggcaacacaccaatcagtaaatcttgacaaatctttcgatagggattttttttttcctaatactagttctttggataaggattttttctttaataatctaagtttacttgataaagggtttcatcaataggtatttaggagttcctcaatgtttgagtaggtctagaaaacttttattatcttcttcagagtgtatctttcaagattaatgtttggaatggtaagttgttctccagaactggtaaagaggttcttctcaaagcggtggtccaagcaattctttcttatgctatatcgtgttttcggctcccaatgtccacttgtaagaatttagaaagtcttatatggctaagttctagtggggttctacaactaataagtataaaatctattaaaaaattagtctaaattttacgattcaaaattctttaggggcttcggttttatatttattgtccaaaggaagagagagcatggagagagagagagag

SEQ ID NO: 188778 - DNA, 867 bp, Cannabis indica
tcatacatttcatcattgtatagctcacaattgttttgatttaataaaaaataaaaatccccaacgtgattcaattctaatttttataggttagagaaataaaataacagaaaaatgtggaaaaagatgaatttgtgcaataggaaaaggaggaaaaagcaaagaaacacagaagggaggagaaatagggtcttttatcttctcactgtatatctgaatctcatttgttcttcccaatgtagaactgtgaaacagtctcaaatattccaaatttaatgccaaaattgcctgctggactctctctcccaaatccccaaatcaatcactcggcaaaaattaaactacagatttattcttggatataatttctacaagggttacgaaagggccaagagcataaggtaaaatgagatgcaatatataagcttatagatttaaaagttgaggaacatcaacacaaagggccactaaaaattaattgtagatgaaaagatctaagtcgagtgtttgtgtaaaaacaacttgaaagatcttatgtcttcagatgacagaagtaaatgcccataagcgcataacacatgaaaataaattggtagattcatcaacatgttttgggttccccgcaaatggtgcgaaccactctatgcaccacttacttccaccatttcttgttctacagctcctgcagttactgggtagtaatgatagtgaagctccccaacatcatcaccagacagcttcttccatccatttggtcccacgtaataaactggtaagaaaaaagttcccgggtgcacacgcattaattatagaatttttactttttggactatttacaggtacgtgcacagagagagagagagagag

SEQ ID NO: 188779 - DNA, 3217 bp, Cannabis indica
aagttctagctctagccttgactcatccaggagctcagctttccccaactgtttacagacctactacttcttgtctcgcccctacgcagacccatttttctgggtacggggcgacatagattaaatggagtatagctcctgaataagcaaaaattgaggccccaaagtatactataagccattccttgaacaagagaggggataaaagccataatcacaatgactcttcaaataagccaaggaagaactatgatccaaaatacacctagtatacaagtttggtagacactcaagaaaacgtctataaagaaacctacaacatggtccattacaagaagtctccctaaatgtcacatggagaaagtaatagaagtgatcaaaacaaataacgtgagcatcacggggagaaggatcacaccacgaatgagtgaaattatttgaaagatgagattgaaacgttggtcggagcggaacatttgggacaatgggtccaaattctgatcatctatcctagacaaggggttgtacacagacacatgatcgtttctagacagcagaatgttgtaaatcctccgtaggtggtaggaaattctcaagctccaggaacatcattgccttcactccttgctcagctagcctcggctgggattgcattacttgcaccaggaccgtgaaccccatatcctcccgaactcgctccacctctggtggacggacccgtgaccacaattttaggtggaacccatctccccaaactcagactaaagtacctaaaagatgtagaagaaagggaagtgtacgcgctggtgcaatctcctacacaacaccgcataatgatgaatttgcccatcacctgattaattagctcttttctaaaaaacaaaatcactgagatcttatgttttttattattcattttatttcctttgagtaacaaaattatgaaataacatataaaaataaaaataaattgatttatttttgttttgaaatgcaaatgtatatatatttgtacataaaaaatttagtgagtagttttatgttacaattaaaacttgtaaaaaaaaattaagattttattttatttagaaaatatacattaatttgatatataacatggaaataaatgaataatgaaaaagaagaaggtaagaaaagaaacacatgtgagtatatgtcatatattcaaattatatctaataaaaatctttaggagtgaccattattggtgattatgttgcccctaaaagttaaaaattgaaacttgacaaattttttttaaggatattaggggcaacattatcacctctaaaaataaaattcagaaatttctgtattatttttaggaacgattttgtcgcctttaatttcagatgattttttgtcgtccttaatagtatatttaggcgcgaattattaaatgcgattttttaagagtgacatatcgtccctaatcagtattaggggcgaaattctatagctttagagttacccccgaatactcataattgttgcaccactcacccactccaaacggtcagccttacatttttctttctccaacaaaaaagttaatgtatccagtcgacttcatttgagaggcccggtaactagtcatatgcgaaataatatgttaaagcactaagaaatgagagggactaatcaagatcaagtactgttactactgtatattaatcaagtggcctttaaataaagggttgggtcccatacgacaatctaaatatatataggcacgtaatataaataaaggcgatatttatgtaggaaggaaataaaggagtgagtccaactttaagataaggtccaagagggatcggaagagagcatatgagagagagcgatctaataagaataagcgcaggtcacataacacgtagtaggttagcatagaaagccatttttatatggcaaattaagggtcgtaagtggtcctatagtatcaactagtaggagtactagagtactagagtactagagtactggtggtggctatatatatattgatatacatatgtatgtatatgccatgacgtgagactaatcctcaaagatgccttaattggccttctatttgtagaaaatgaaagacctagctaggtagctaccactgtccaaacacaccatcccacttgtctcgttaatggacatcatttcatccatgcatattacatgtattgtccttgggaaacttgattttttatatgaatttattaggtataaattgatacattaaatttaagtgtatcaatagggttaaaataaaataagccaattttttattaaacccaaaattaccctttctatttaaaaactactaaaacacatagtgaaatggacttttaaaatgcataaaaataaatctaacagtatctcttggcatgacgatagtttttactattcgaagattaaataaaaatttgcggaatacaaattatttgacaaggtaaatgaatcccctttaaaacaattctttgagagagagccactacactttttaggtgcattgatcaatcaattattcatgcacaagagtaaatctgagaaggaagacaaagtgcactattatattgcaaagaagagatacaaattcattcgaactaaattttccttggtgatagggttgagcttgttacccggacctatggtgcaagaaatagaagagaacgtaaattccaatcggttgcttatagagtacttcaaaggtgatcaatctatcacatttggctaattgcgcaaagttttcgagggttgcacagaagctgatgatgtttacaagttgggaatgaccttatttgttatggatattctcattggtaaataggagaaaaccatcattcctccttttgtgataagaatggctcacaacttagagttgttctatgagtacccgtgggaaaagatttcttataacaagttgatagaaaattgaaataaatactttatataagtgaatagtcgtatgaaaaaaaaaaagattgaaagggggaattattagaaggaggaaaagttctcagcatacaactatactatagcgttacagtattgggcatatgtgttcatattggagctagctaaagaatctggagtgaagacgtcacatcgctttcttagagtgctcaactaagagagtaaagacaaggtgacactcgacaaggagaaagtaataaaattatttgctaaaagtgtaagatttttt

SEQ ID NO: 188780 - DNA, 2463 bp, Cannabis indica
ttatgctatatgtgaactaagtaactaattaaggttgattcctgtttttacatgcagtgttgatgccaatttgaataataattcatcatcacccacgaatgaaacttcatcatcatcttcactatgttactggtgcagaaagaacaagtttgcggctcccttattttcaacaattggtcttctatattttttactatagccaaatagtattgctcaccatctatctcttgtactgtttttccttcatttttttttttcagaataataataataattatttgcttatgtggtaaattaaataataagaataggcaaaaaaataaaaaacaaacagagagaacagagcataaggctggccatgagaaagtggaagccattatagtaaaattgcgggtcagtgtcaccaccaatagaaatatattatttttttactttgttttttttttttgggaggtatgaaatttctttacttcacattactatttagataatgatacttttcaaagtgcatataaataatgttacttttcttaagaagaaaagaaaaacttaatatttttataagtagagggccggccgaagacaattattagctgaccaaaattttaggaattatttcataaatacacaccaataatgaaaaaattataaaaaaaaaacggttttatggaatttataatatttttacgatttttttgaatttatttacaaaaaatatggtctctcttggtaatttgttgttgattttatattatctgaatattattttatatattatgaaaaatcgtaaaaatataaaaaaaaaaatctttaaatgtgaaaatataatttttttccagaaaaattgtatgaggcactattttttgtttttgttgtttttgtttgtgtatatagaattctcttttattattattatttgaaaagtaaataataaaattctctttagaaaaagaataatcgtatcaaaattgagttacaccagtcaatgacaacgaccaacctttaattcttattttattaacactccttcaagaaaaccaggatttaattactattttagatttgttcatagaaaaagaaaaatagtagttgattatttcctccaaaaaggaaaatatagtaggtgattgttgattgattgttacactttttaacttattcatattcaattggtacatattacatgccagaatatgacattttaatatataaaataggtatataaaatagcctcgtaattaaacatcagtgttatctagcaatatttttaaaagatatttttttaaaattatatgagatattaatatgacacttgtcttttagcaattctcatttgaagttcgttaacacgtacccaaacgagaaggccgattttagttttcacctatttagtaacaaaatgagaaaatttaatgatcatttgattttttgagataaacagtaatgatttagatctttagcatgggatgaaactattgtttaaaatgttgagtctaacaagttacaccgaacgaacagtatagttggtggagtattgtaacgatgtgcactaattttataatacaaactgcccatacaaaacaatattaaaactactaacaagagtgtaaaacaaaatgataataatactaaccacatcaaaagctgaaaattagatcattagttattttatcaaaatagtatatacttcataaaacaagagatgtataaggaaaaaaaataaacaataactaagctctgttgatgaccacttaatcatgagcatctattctaatagtgattaagatttctatcaataatgtagaaattgtaaggtgcctgatttggaaatttcgggaaagaaaatactagataaagtgaaacctgtttgtgtacctcttcaaacaaactttcaaaacaaaataaattaaaaaagttcattgttgttaaaagaatgtgtaaattacgttagtaagttcatatatgtaacatcacaggaaatggtcatggatgtacggttgacttttaagatcagaccaagtcatctccaaaaaaaacagaggaatgtacgtaattgacttgtgttgatcaaacatttaccatttctcatttaggtaggtgtgttatcatcatttcattcagatttaagagccaatcattctggaaaagaagaaaaaaaaaaaaagaataatctgttttgggatcgagcactcaaaaatggctaatctcttctttttcttgacaatattgaaagctgctatagttctcacaattgttacagctgaccaatcaggttttttttaatactgttttattcaattttattactagtgttacaatcaattaacatgttctatgatcccttctattctgtagatttcataagcatagattgtggtgctacagaagactataatgatcaaataacaggaattaagtactctacagatgttaattacatagacactggagaaataataaaca

SEQ ID NO: 188781 - DNA, 1561 bp, Cannabis indica
cagcagcatatatttcataacaacaagtaaattggtttaaatgacacactttttaaaaataaaaaaaaaaaaaaatgcttgcatccatcttatacaggattacatagacagtatggaaggagcaacattgtctggcagacaagcttccgcgtacatatgtaacgctggtgaagaattggtcgcactgcggaagaagctctccattgattttgacgatctccttgaagaagcttccaacactactgacgaacttagtcttgtttaaatcatcatatgagtgattattcattaactttgagcattacgccaaacccacccacctcatattgtcaaagattaggtgtggttatatggcaacagagttacaatacattcgttcatcttgtatgtattattttgtaacatagcaaaaaaatgtaagttttagagtctcattcgagtcatggaaccattctatgatatatccttcttaatcagaagatcaaatatagtacaacaaaatgcacacgcaccagatgttattcaaagacaaataacttgtttattcatccaaaatactcataataacttgtttatttattatacattatacaacatcagcttcatcaaaatactcaaaaaccctttaaagaaacaaactttaaaacccttaaaagaaaccaacttatacttacagacttatagtagcatatttggattgttttatttggacccgtccgttttcagattctttttcaatagctttctttgcagtctcaagatcttcatcgaagaacatgtcccaatggccatcccacttgatgaaaaactcagtctcttcgtgatactggactctatgaacatccccagcaggagtgaacaagtaatccccaatggtcagatcaaacctttccttctttgtcaaattccacacagtcttctttccttcggtcaccaccaaatcgtgcccaaaggtgtggtggtgagcaggctcaacgctcccggctttgaacctcactatcgccgaagtaggagtttctcttaagatcttcatcgacccaccgggtatcatgtcgatcggcccaaggacccgactcttcaccaaattacaaatagagcaagtggaatcttcaattttagggagttcagcaccgatttttggcatctccgtcagggaattttcaaaaaaagttttaatctcctccggccagggctcgttcccggaggcagggcacggcgatgcgaagggagtcttgagccacgtgtcaaggatttcgatagcggattccggagaagtcgacatgccggagacagctaggacattggagttgttgattgatcgggcgttaagagcctctgaaggcgtgaggcaagtggcggcgataacgcctgggaacttgttggcgaagatggcgacgccgacaccggtgccgcatgcgagaaggccacgagtctcgacagctttggaatcatcggaagacgcagtaacggcggaggagatacggcggccgacgtcagcggcgacggagtagtaggaagaagtgccgaggtccgtcaacttggatgttgagggattggaggt

SEQ ID NO: 188782 - DNA, 1167 bp, Cannabis indica
ttctcccaaaggaaagattatttcaacaacaacaacaacaagttctaccatacattattatagcatcattaaagagaaagataaagtttcattaccactatctttctttattcatatcattaccctttccctgaagagatttaagaggtagagctagaagaaagattggttgttgtgggcaaatttccatcataactacatttcagtacatctggtttcctcactacccggggccctatgggtactttacttgcttttggacgaatatcctacaagagacaacaacataatcaacatgagcttcaaatgtagtgaccaactgttcttataagcctttgtaatatttgtcagaaaagataatatctattgcaatatggttggttttccagcaagaagtgatcaactaaagtttcaacatgagcttcttgtgcattttagagaatgatcaatgacattatcaacaggtaaaccaaaaaaaaaagaagtgtgaaataattacctgatcaaatatagctgttggaattgccaaggtagccatagcatttggggcatctactattccagaaattctcccttcacatgggcaacaagacaagagaaggtaggcctgaattatatccagttattctgtggtcagttaggcttattaaacatggtatggtatggtattggcacatacataagatgaattatatgaaacctgttctttgctgtatccaaatttggagaggtagtcaatagcattgagaactgcacgcttgtaagccacagttgcgtcgagataatgctgtctcccactctcatcaacacttataccctcaaagacaagccattctgagaatcttggttcaacagggcctatctcaaatattgggtttacatgaagaggagttggccccattggtgtcaaatactctttcattccaccccttataatttcacacctgataaagaaattaaacccaagtgagaaatggaagatgtatctagttttgttcattgtttactacaaatggtaagagattaaagtattgaactagtacttaagatcaagaaagccactcatctcaattgccccacaaaatgagacttcaccatctccctgagaaaaatgcatgtcaccagtacttagattggctccttctacgaatacaggtaggtagatct

SEQ ID NO: 188783 - DNA, 2752 bp, Cannabis indica
tgtttatccaatcaaatttatactattactcattataagcaagagtctatgttaatagttaattcaagtaaaataataattgaaagaatttaactataaaaaatctaatatatttatatataggtgcactcttaatgggtattatccattcaaagatagtattataaaattttaagttttatgcttaatttttttatctaattaagaaaaatctgaatacctattaaaaaaatgttctatatataaatataactgtatttttaatataaggaaaagagccatgatgttaacaaaagtataatctttcaaagtacaattcttattatgcattgtgcccttttttgggtctgtggaagttatggatttttaactgttttctctttttaactgtttttcctttttcaaaaatcctttgaagataactgctcccaccttccttgctcttcttgcccttcgccggcgtcctccttctctgtcactatcccaccacttccttcactcccatgcactctgttatggacaacatcaactctgctctttctctcactgatgaggaaagttctattctcacattgtctgacgttgctactctaggctcaacaacatcgcagcctgtttttgctcttttagcaagggtcttaaccacacagaatgtctataaaccgggctgcatagatcaaatgtcggggcactggcagggacgataccccgtcacgatcactgaatataaaaatgaagaaggtctctttcatattcgctttgcctgtgagggtgataaacaacgagttctcaacaaagaactatggcactttcaaaaccacttgattatccttttggggccagatgttctgcaaaatgtcacaatggaaaatatggttcatactcctttttgggtgcaaatatgtcgcttacctttcctaagtaagtcacggttccttgctgaagcactagggaatatcattggagaatttttggaagttcatgatgattctactaatgagggatggggtcctttcctgcagatccgagtcaaacttctagtcactaaaccacttatgagaggccaaatgatcaaacttccaaaagttaaggatgaattttgggtcgactttcgatatgagcagctgcctgaattttgtttcgaatgtggctgtcttggccatccttttgaacgatgtgtggcattcatggaacgaatgcggtaatgatgatgattttcagtacgggccatggatgaaagggtcaaagcttccaacaaatggttatgacagatatcgtacagacttttccaaagccaatgcttggccacttctcactcggttggctagaaactccatttcaccctcactaccgacaactcgaacccgtggccaacctcagccaagaattcttcttcatggggagtcttcatcctcacctttttctctagactcacgttcatctcaccccacttcccaccatgaccaaactgtgtcatcaccaacaaacaccttattacactcatctggttcgggaccccatgttactagtataaatgaattccatccttcacctaagcagtccccatcctaccctcatactcatgcttcaacccaatcatccattgcctctactgctcctatgatctccactccaactactcaatcaatcaaccaaacaattccttcctctacacaaacacaacaaatcaacccctccctatctacaacagatctctccaatatatatatgcctaatattgattacaactcctttccacatttttcttccgccaatgtctttgctacctacccaccaacacactcctttcactcaaattcaccagtcatttcccaactccactctcatatctccaccacaccagcctacaccactacaaccccaaatgtcacgacctctcttggccaagaaaatatctcgccaaattgcattccgaagcgaccaaatgagactatgtctgttaggaaaatgctcaaacgaagccgatttctgaatggttcgtcatcaactgctctaggaggtgatgactttgtgactgatgtttctgcaaatgcggattctacaaccacctttacttcaacaacggaggttgctatgcaaccatgcccatctccatgaaaatcttaagttggaatgctcggagtttggagaacccgaacgcattcagacatttacgatttcttgttcaacaacaatcgccccatgttttgtttcttatggagacaaaactcggttctaattcggctactcgatttcataatagtcttcattttttgaatggtttagaggccccaagagttggattgagtggcggtttaatgttattatggaaagataatgtcagtgtcaagctctcccattttggagacactttttttgattgttctttggctttcgaagatggcccttctttccacgtcacgactttttacggcgcccctgctactcatgacagagtagcttcttagaccctcttgaggaggcttgctgataattctcctcaccagccatggcttgtaattggtgacttcaacgagattctatctaatgctgataaagaaggaggcccactgcgaaatgaacgcttgatgaatgacttccctgcttgtcttgaccattgcaatttaaatgacacaccatatgagggtgattctttcacctggattaaaaaccgcactgctgccacaaccttaaaagaatgcctcgactggtgttttattaataatctatgggacaatgtgtttggggtacc

SEQ ID NO: 188784 - DNA, 1682 bp, Cannabis indica
agaacataagaatctcatccaaatgaatttgaagccattttttgttgttgttactatattaaagaatggtgtacttactttctttaccatgtgattgcagtaattctttaccattcagtgtttcacaagaagtgtctaccacagaaaggctatgtccgtgcttgccttaaaagtaatgtatgctttaacttgggaatgggaatgtatccattctattatattataccatatatactacaagatatggttatggaacatcttcatctttttcaagaattagtttgtgaatgaagtctattcattcagtatataatagtggttgaataactaacttaagcaccttaatatgactagaaactgtaatgacacataatttcttcctgaactgtctttggattattttgctagagatgtatggttggtcataattcattcaagaatacctattgtacaaatatgcaggtggaggatttgttataacacctgtgaaccaagggaaacaatcacttgtaaaacacatgctttctattgattggaagtattggaagttatacttgcgtccatcatctgcaagatcaataaccatccgtatggttgaaagactcgccggtactaataatctttacattattccttaatatgattgtgcatctatccaattccaatgctgatcatatgtgtgtgtttgttctcacaatttacagcactaagagagctgtttagagtccaatctaaagattcctctaaactcttagctgaagaattgaaaagagagaatggactgccaagaagtactgaaaaggaagaactcaagagtgaagatactaggaagacggatgaggcttcttcggtggaagatgagatggataaagtagtttctggccgtaaaagcttgatggatttgaatgatgcagcagatgagttttttgatgttcctgaacctgaaccaacagaatatgaccaatatgagaatgaatggcaatcagagctgagtggaggagagaactctccggtacttactgataataaaatatgaaccctcaacttccaagaggctgatgcatatacttatgtttgcataacatgatacagtgtttaatgttattgttaaattcctacaaggaatttagtgtaatatccaaatataggatgctttagtatactttcatattggacaataatgcaatacacttaacatgaaatattctatggagtttttattttgtaatgtaaagcatactaggatgttgtgagtggaactgtagttcagtatgtgttgacatgtattggtttcctcattgattatgtacagaacataattcagcccaaactctcatcagctgctgtttttgtgaaaaaatttcaagacctcagaggtaagtctagttttgtccaccaaattcttgaaatgatattgtatgattttagagtagttgacatgggtttcttttattgctgcagctcagaagaagggttatatggatttacaagaagtagctagggaagacagcatatcatgtttttatggagctactcttctcaaggacccaacttgcgctttacctggaagttgggcagaaggtgatccttcattgtttctaatacgtggaccaaattatttacaagaccatcaaaaggtaaataaataccttgttttgctattcatatagtttcccatataa

SEQ ID NO: 188785 - DNA, 1297 bp, Cannabis indica
  modified_base (1272)..(1272): a, c, t, g, unknown or other
ttttttttttgtgtatttttacagtatttcacgtgtaaacccctatagcaactaacagagcaacatcaatcgcaactaaaattcacataacaacccacataaaatcacacgagaaaccaccggagtaacccaaactgtaaattttttttcaaaaaagttaaaagatagtattttttaaattgaatttgttaaatataaattaatttattaaaataatgaaaaagtaataatgtttttgattaagataatatttaaaaacgagaaatgctaaaaggcactataagtgcttatgcattctcttatgtgttaacattgttattggtccaactaagtatcgagtcttatatagtttaatataatagtttttagagaatatcgttagcgcgacatgtctagaggtgctagctccactgatgcccaatagcaatctatctattctctattataagaatatcattttttttagactcccttcctattttagtgaaaaatgtatttaaaaaacataattacactcataatacactaattactaattaaataataataataataataataataataatagttaggtacgtaccttctttttaactggacaatttggtgcaaaagagcatttaaaataagctctaggagaagggttatctcttgtaactttttgaccatatttcctccattgatatccatccttcaccgtctacatgaaaatatatatccaaattataaaataatacatatacataattaagcctatataatataatattaatgtaatgtaaatgtatgtattacttacggggctagtattgtctttatcacacgatgagttgtgatctgttttgactgatacctttgtcgtagtagtcttattattattattattagtagtaatactattaatattattcaactgatcatcatgatattgatgatgatgatggctattattattactactgatcatcgtccttagccctcttgatagaataatcaaagcttgatcttttgtagaaatggtcttccaacattttgtatttgctgctcgttacttcaaccatcattctcaatcttttgttctcttttctcaaactttccaattctgtttccagcgattccacctaataacatgatgataccatattaataattaataataaactctataagatggagatgaaagaaaaaactatgatcaattatacagtaataataagtattttacctgttcttgtgagaagtgtgagcatccataactgaatcagtttctcnctttcaatatatatatatagagaga

SEQ ID NO: 188786 - DNA, 880 bp, Cannabis indica
agccaagaaggaacgagaagaagagtgaattaaagaagctaataccatttgatatgctattcaattctatgattgatttcataatgttttatctattatcaacattaatccttattaagacgtttttttgtttcttaattaattctctattccttttattgtttgtaaaccatgcgcacaacttattgcaggaattattataaaggatatctttttcttcttaaaatgaatatacatctgatttacatttaaaaaaaaaaagttatattttttaatttggactaattattttcttatgtagaaaattattcttattcttatattaactaaaataaaagaaaatgaagaattttttagccaggtacgtagttttctcttgattgaggccatttatcaatgatatttcttcaagcacatggctcttactaagtattactaacattataccatatattcatgctattgctatttagtagcaagattcacatatatttcttatttaaatgacactaatatgaacttattttcttcttatgaatgataaaagatttaagtgagactataagactcatagttggttatcaattaagatgctcaacaattagtccaaaaaatcattttaatgggagcccttgaacacgtggtaatactaatcaatgcacgtggttgttgaacttgaacatgtgctatattttcatctatattttcttgttgcctttgcttttaagaaattactttgagtgatgagacctttatcaatacaaaaatatataatctctcatatagtctttttttctctctgtgtgaagaaaattatggagtcattccaaatggccaaagacaacactccactttcactaacacaaaatttcattgtccc

SEQ ID NO: 188787 - DNA, 1814 bp, Cannabis indica
aaaaaattaaaaaaaaaataatgctttaataatgaataattattattattatttaacaaagagcttccccaagttattaacatttgcatgcatgcatgcaaataggcgcccacgtggcaccttgattagctgatagtgttgattattattattattatttatgagagagagagagtgagagagacgcatattgattcatacgatctggctctctctctctagctcgtgccttggaaaagaggaaccgagcccaaatgggtcccaccaaatccaacgagccacataacaccatgattaaacaccgtgtgaattgatattattcatattaatttttatttatgtattttgagttatgattaagcaaatcccagagttccattaaaaaggagaataaacgggatcctcattattaattgtgactctaatttaaatatgaattagaccgaggtactccaaccaatggagcgtgaacttcaaactctatgtattaaagaggaaagtgaaaaacacatattatgaaagcgcgtgtagtatatggggattataaccctattgcatgtggtaaaatattaaataaaatttaatttaattagtgtattgtttgtttgttgggctaatctctaaaattttctctctcgtagtttacaaaacaaagagagagagcatcttttggaaagcggtggtcgtcccatttgtcgaacagtgtggtctcatcaatctctagacgatccgattctcttcactgttttttttttttatttatttgaatctttgatcaaatggggtcgagtttgttttggcttgagccatgatgatgtgggtcacacacactaagttttattcatttaataccaacacttttctttatttttattttttctctctttgactaacttcttattcttctcattttctctctcttattttttatgagcacacaaaaataaacaagtgttggttgctttgatgattgcatactatacctttatcaagttaactcacaaaacaaacactattcactacgcacacatacaaatacgtatctctctttagctttttctctctgtctgatcaaaatctcaggatcttctattattaccaatgactattattacacgtccttctctctctttgaaaacacaacaaaatcaaaaaaagctactattgtgtgttgatggattcggaagaggggggttgaggtgtttatgatgacgaaattggcttttgttattgggttcacgtgataccattgtacggtacacacacacttttatatatactaagctcaaaatcataaaaactgactgtagagtgttttgtttgttgtttgttcccggagattttgacggatttgactatcttttacaacaactaataacggaggtaataataactagtatagactatgtagagagataagagatagaagatgatttaaagagctagtacataaacccaatctctcacattgtgcgcgtgaccaaaatatgcataatagtgacaataatatgggtagctagctatatagatatagctagctatagctggtaatgtatataatagagaattcaatccaagtagtatatcatgatatagacttatagtagtgttattgtgtgtacgtaactatgttcatgtgttatgttttttaaaagtaagtacgagtttgatgtttcatttaaaagaacgggatatatatgatatagtaacctgagaatattcgatcaagaattaatccacattcaaatagtttggtaggtagaatagaagtgtatttgaaaataataatagtacccctttcaaaaaaaaaaaaa

SEQ ID NO: 188788 - DNA, 7023 bp, Cannabis indica
tcacattagtcatacactcataagatacattagttagtacgacattattacatgtacaaataatcaaacattgatctttgaaaaatcccacacaactataatattaatcttaaccactctctctccccattcccttttgaacaaattagagactcaacgacgcttataaatattattacattcccaacacaaaaacaaaaaaatatatacactaatactaaaaaatggagaagaagagtgattccaccacttcttctttgggtgggccaggaggcctcgacttatcagaggccttctttaggcccatccaaaacgctacacccccttctaccaccaaaagcaacatcaaaatctcaattattggagctggcaatgttggcatggccatagcccaaaccatccttacccaagacctagccgacgagcttgtcttggttgacaccaatccagacaagctccgaggtgagatgctagacctgcagcacgctgcagccttcctacctcgaaccaagattctctcttcaaccgactactccatcacaagcggctctgatctttgcatagtcactgcaggcgctcgccagatccctgacgagtctagattgaatctactccataggaacatatctttgttccgacacatcatacatccgctcgccaaattctcacccgaaacaatcctcctaatcgtctccaaccccgtcgatgttctaacatacgcctcttggaaattatcagggttcccaccaaatcgcgtgattggttcgggcacgaatctcgactcatcaagattcagattcctcatagctgatcatctagatgttaacgctcaagatgtacaggtgatgagattaatttgtttatcttttgatcaaaaatgtcccacatcgaaaacatgtgttgatacttctttcttgtaggcttatataataggagagcatggagatggctctgttgcattgtggtcgagcataagcgtaggaggagtaccaattttgaagctcttagaaaaggagcaaattagttacgaaaaggaaactttagagaatattcacaaacaagtgattgaaagtgcttatgaggttataaatcttaaagagtacacttcttgggcaataggatactctgtggctaatcttgctcgaaccatagtaagagaacagaggaaaattcaccctgtttcggtgctcgccacggggctccacggcattgggaaagaattgttcttgagcttgccggctttgttgggcagaggtggggtgttgggtgtcactaatgtgcatctgtctgaggaagaggagtacaagcttaaggaatctgctgaaacacttgtcaaagttcagtctctacttggaatatgaacatgtttttctgtgttttattatatatattaatgttgttgaattatttttatgatgaataatattgcatgatataatttaataaaagctagaatataatcattattatgaccacatttttgcagtgccaaaaggatatttgagcaaacaaatagaaattaacaaattgaaaaagaacatagcataagaaattatataagtaaagaacaaaatgtaacaaacaaagtatagtaacgaaaaaaatctatcacaaccaattaactaaattaatctatgaaccaattatatgtgtgtgtgtatatatatattttttaattaagctttaatttttattttcttgaacaataattaaactttaacgttctgggtcacaaacagttagtattgttaatttgaattttcttttactttatggtgtccaataatactataagggctcgtttgtaacgccgtattaggtcgtattgtattgtattgtattatattgaattgtattttatacaatatttttatgtaaaactatatgtggtattaacttttatggacacctaaatatataatattttagtataacttaaagtttaacatagtattatataaaaatataatgtataatccaattcaatataatacaatacaatacgacctaatacggcattccaaacgagtcctaaatgttgtaattagttagggatttcttattaatattatcgattacactatgaaaggtgcctcttactatatacgcatgcaaaggagaaatgtgtttactgaaaatatcaataccaataacactagatataacaaatattatatgatcatatattttgcttattaatatgacgtgacaaataacttaaaagtatattttttttgctctttacgtaccctacatgcagtccacatgcatttctcaatatatgatatatggccacgtatatactatatattactattggctaaaaatggtcgtcgcaccctgtttattgaactatatatatattaaattattaatctagtttaattaataaagccttaattagcatttggcataacccattatatattataattagttcatacatgagttattgactactttcatagaatggttgtccatatattaatgccacgtggtgtagaataataaattatagccttccaaagctttaggacatggtttcactgtattctcttctccacccctagttttctcataccaaaaactcaaaaagttctggtattatatgatttgattattcccacccaatctaaagaaaaaacagctctaaattaataaagaaaattctaaactccagaaattggattggttcccaagcaaaaaatgtttctagatattatataatgctaaatgacgaatatattcactacaaacattccaaaattccaagtgtaaaccgaggctattcttgtcttttcacaaacacataaacgtgactgaccgtacgtacatggattcattgactgttgaaaatatcacacgtcatcttgtaaaaccccttaagaagttcaaaactacgtcgtttcgtttatataaaaagagaagttgaaatactatatcatttacgtgatcgtacctgttgaaagtatcacacgtcttcttctcaaactgtatatataaccgttcagtcccacatcgacacatcacaacaaatcacaaaaccctctaataaaacgccatactaaaactacgtcgtttcatatcccaatactactatgcagaagagtgagtcaacttcgtcgttagggccaggaggcctcgacctatcaaatgccttcttcagaccaatccacagcgccgccccaccttccccaaccaaacgccacaccaagatctccgtcatcggcgccggtaacgtaggcatggctatagcacaaactatcctcacccaagatctcgccgacgaactagtcctcgtcgatgcaaaacccgataagttacgaggcgagatgttagatcttcaacacgctgcagcttttctcccgaggacgaagatcatcgcctccgtcgattactccgtcaccgtcggatccgatctatgtattgtcactgccggtgcacgccagatccccggtgaatcgaggctgaatttgcttcagaggaacgttgctctgtttcggcacatcatacctccgctggcgaaattctcgccggaaactattctgttgatcgtatctaatcccgtcgatgttttgacttatgtgtcttggaagttatcagggtttccttcgaatcgggttatcgggtcgggtacgaatctggactcttctcggtttcggtttctcatcgccgatcatctagatgttaatgctcaagatgtccaggtcagcttttttctttttcttttttgccaaatttaattaaaagctgacattatattaatgccattattatataagtaaaaaataataattaagtggtcactttcggggtaggtatttattagatttgtttttaaaaaaataaaatattaaatgatatttttattattattattgaattgtaaagagaaaataaactatagttttgtagtgaaagtgataagtattaaataaaataatgcatattgggaatgggcagcacatgaagctaaagttttaggctatgattttatattgaagtgataagtattaaacaatttaatttgtttggtgtaaaatggacaagtttgtatgtagttaatttaaaataattgataatcttatatatagtaatattcttaaaatttggaaagccataatttcttattgttataataatgtaatgggaaagtttgaaaatttaagaatttatcatctgtggtgactatattgagtttaaaggtgtaataagaaatttggtatttttgtgaaataattgagttgtgttatgttgtatataggcttacataattggagaacatggggacagttcagtagcactatggtcaagtataagcgtaggaggagtgcctgtacttagtttcttagaaaggcagcaaattccatacgagaaagaaacattggaaaacattcacaaacaagtgataggcagtgcatacgaagtcataagcctcaagggctacacatcttgggccataggttactctgcagccaatcttgctcgaagcatactcagagaccagaggaagatccacccggtcaccgtactcgccaccggcttctatggcattggtggtggccaagtgttcttgagcttgcctgcccagttgggaagaggtggtgttttgggtgtcactaatgtccatctctcacatgaggaggaacaaaggcttaatgactctgctaaagccatacttgaagtgcaatctcagttgggattgtgaagcaataattaataatcaaacacatgtcaattcaatatatctaatgttctatatgtatacatatatgtttttggttttgtttgtattactagagtttatccccacttcgacataacctttttctcttggttatgtttttgccttgtatgattgtaagaaaactctttcgttgttgttgttgtttttttgctctttaatttaattgttcgtttctcctctaagacgagaagttggtacctttcaaaaaagaaaaagaaaaaagatgagacgttgtttgcttacaatcaagtttaactcacaaatattactgatttatcagaaaaacgacatttttttagaaaaacgacatctttcagaaaaaacgacatttttcagaaaacgacatttttcaataaaacgacatcatttgggagaaatgccatcttttcggaaaaacgacatcttttcagaataacaattttttcaagaaaacggcagcgtttcgaagaaatgacatcttttcggagaaacgagacgtatgtaaggaagatactagctaagccattatttctgataaacgacactttttaaagaaaacgacataagttaagtcattatttccgaaaacgacataaactaaggcattatcttcaaaaaacgacattatccaagaaaacgacactttcaaagaaacgacataaacattcatgaaacacgggaaaaacaacatatgtaaacgacagcatttatgaaaaacgacacactttcgataggcacgcatcattcggaaaaaacgacaatttgtatgaaatctaaaacttatatatagttcgtcgttttttcagcaaaccgtctcatctcatgtatcttcttaagcaaatctctctctctctctctctctgtaagccctaattttccaattcgcaatctgtaaaatttttatttttcgaatcaaattaagctcattttttctttttggtttctgaatttacattcattccactgaaaaaaattcaaaattgaagcgtgaaagcttggatttaagatccgatgggaggccatggaggtctgaacattcttccccaaaaacgatggaatgtatacaacttcgataacagagagaaagtccgcaaagatgaagaagccgccgctaaagaagaacagcttaagcgcgaggaatccagaaaacgagatactgaattccgtgtcgaacagcttcgcactgctcgtgggttagctcctctaatcaaacccaccgaatctgaacccaaggaatccgaacccaaggaatctgaacccaaggaatctgctcacattaatctgtttgagggaattaggatttttgatcccattaaagtagggttagagaataaggataagaagaaaggtgacactgagaaaatagatgggtttaataagaaattgaggaagatgataaagaaagaggaacctaaggttgtgactgaggaagatgagaagtacaggttgggttatggtcttgctgggaaaggagtgaagttgccttggtatcttgagaaacctattgaggatttgagtagtgagagaggaagaaactgtaatgggtcttcttcttctgatgaagaagaggagaagatgaagaagaataagggaaagaagactttgcaagagctgagggaagaacggttaagaagagaaaaacgtgagaaggaaagggaaagagctttggtaattgagaaaagtagtaggggtattagagatggagctaatcctcggcatagaaacttctcttcaaggatgtgagttttgtgttttgatgatgtttttggttgttagaatttctttgggtgttttataacttattgcgaagctttaatattttttgttgttttcttttgaaatccagtgatggagatagagatagagacaaatacaatcccagccccaaggtagaaagttctctgggaggtgagtttgtttatgacattgttgttgctttaatctctattttcattgattatattaatctctcattgagctatgcatctttgtttcactgaatttgtagtttgtaatttagagatgctataacagtacttctatgttgagagttttctattagttgaatttaagatgtattcaccttcaaagatagtttcaattgctttctgcaacttgtaattctaaagccttcttcatctggttttcagttttgcgtttgccactttgccttgaagattttgcatttctttgtagtattcagcttattgtgaatggtgtttagaggaggttctttacatgacaggggtgattaccttgattagtgatggaatacttggtttgagtttgagaaactt

SEQ ID NO: 188789 - DNA, 4346 bp, Cannabis indica
acttaaggctagtgtaaactaaactaaggaggagcttacagaggccatgcccgtctagaaaaaatccaacaagtctcaacccgtatgtcaatctcctccttacaggttgacggtaaagaggctgaacaaccttcgtgctactagcttatttaatgaagcttttatttatcttcctcgtgagggtcagctggccgacagtcttgggaatggcttatgcacgtggtctggatcccatgcctatcagggttctatccttcctctccacgtttacttttgatgtctggccaattattataatatcttccccatgcggattagcttgaaaaggttaaagtacttatcggcactgtacgtactggtacgcccacaaggtttggagagccttctccccacaagatcaattagttttttgatcttagaccaaccccaaaaatcacaattcgaggtactttacttttccctcctaacctacccgtggctaacaggcacgagggagataacaaagataggaggttatgctcgagattacttcataatgaggtatgttgaagctaaccaccattctgtccaaacttcttggccattcctctgcccactcctcaccttggacttgagaagaagggcccaccagatagtcaagctttccaaggaggctagggacatctctaagttggccacagaggagaactttcacaaatatggactctatatgtccattgcgagcatgaagaaatgaaaagaggccaaaggatagtcatttgttgctcgggctacagcaaataaagaaatatttgccctaacaaaagccacaccactaactcattcaaactgatcgactattaggattgacaagcttgtggatggtgtaacacggttttatttgcccattatcgatggtaagggtaaaatggtggtggaggaagagtctacccatgaccctttggatgatgagcagctcgctgtcattctttatgagaatgctccttaggttatcaagggagtggttcctacggacttttactttctctaaacttttcatatatgtatgttgtacttggtttctcttttattttttcactaagtttttgtttatggtgcagcaatgttgtccaaaattcttgcccagctcaccaagaggaagcagagccaagactaccaagcaaacttcctccgcctaaggagagaaaactctttcagccaacgaggtactccttgatgttccaactagtgacactcaagtccaacaaggagagataattgatctagacaacccaactctaccatataaacaagaagaccaccatgattccatctaatgcctggccacccactattttgaccaagaaatctagaaggtattctgaggcagacatcccctttcttccgaggcaaaaaaggccaaggagatggtgaaatgataccaagactatgtaatttttgaaaccaatgagcagctgaagggggctgacaaattcagggtcaaaacactggtcgaagggctcctcagggattttactaaggtaaaaaactttgcatctttttctcctagctctagatacactattaagtaatttctaactttgattctttcttcctttaggtgaatctcaagcttggtcattgttactcccgagcaaagtctatggagagttcctccaaggaactctagaaggttgctaacgcaaatgaagagcttgagatgaaagataaggtgctgattgatgcgaacaagcccctgagtgcaaccaacaacaaggtgactgatttggatgcagaactagccgaccaaacccaagttcatgagttggaaaaggcatttgaagttgaaaacaaaagagtcaaggagctcgaggatgaaagggaatgctttcataggatgaatcaatctctcacttgctaggtgaatgagctgattaagtctctccaggctgaggaagtggcacatcagaaggacaacaaaaagtatgagtccataggcaacatgctctttcaccttaaggatgagctggttcaacaattgaccttctgcgaaggaaaagctggtcagttgaaagatgaggatgtggctgagcatcctaacaatgctactaatgaagctaccgaccccaacttttctattcaggagtaggacgacaacatcctagccactcaggatctgaacctgccgaccccatggacatataaagacttttctatcttttattttctctatgtactttggcctatgaccttatctcttgatacaattttgttgaccaagtggcttttaaacttgatttgatttttattatgtagacatatggttgactgggttgcctttagtcccagacttaaaatatatataacttataagtatgttcctttcttcaatatcctctgaggaaaaaagaaatttgaatggactgagcagtgtgaagatgctttttaagacctaatgaaaagacttgcacaacctcccatcttatcaaaacctctagactgagaagaattgggaatatacctagcaataactaaatttgcggtaagcgctttgttaatctaagaagaggaaggtgcctaacatcctgtctgttatgtcagtaagaggctaattgatgttgaaagtcattatcttccaattaaaaaactaaccaattgtctcctactagccttgagaaaattacaaccctacttccaagctcatcctatcagggtgtacactgaccaaccgctttgaaaagtattgcaaaaacttaattcatatggccagctacttaagtgggaaattgagctagggcaatatgagttcacctaccagccaaggttagcaataaaaggccaagctctagctaactttgtggctaaatgtactaaaaaccatgaatttgttactaaaaatagtggtgagccagagaagaagcaagaggaagagcaggagcaacatgcagaacaaaagactaaacaaggaccaatatggaaagaccatgtggatggctcatctaccgagcaactctccagtgcaggattgccctagttactctcaggggacaaaaactatacaaagccataaaattttgttttctagccttgaataatgaagcagaatatgaatcgctaattgctggactcaaacttgcttgggagatacgcgttgaatacttagacatctatcgtgattcacaattggttgtcaattatgttttgggaaattatatgccctgaggagaaaaaaatagttgcctacctcagcaagattaaagatatatcagcacaattcaaagggtacacaataaggcagatcccaaaggaagaaaatgcgactgtagatgctttggcatgactagcaagtagtatagtggttgacaaggcaaacttccttgccattgaatatcttgaagaaccaagcattaccttcttgaagacatcaacatgttggacaactctcctacctggatgacctcgatcgtagcttgcctcaaatcaagaacactattgagcaacaagaataaagctcaaaagttgatgaggaatgttgcatgatattttattttggatagagtaatgtatagacgtgggttctcacttcccctcctaagatgtgtaaccaaagaagaagttgcacgactacttaccaaagcacacgaaggattttgtgggaaccatgattgggtacttttggctgaccatgatagaagaatgatgcacgacaaagtagaaaatcataacctccaagtagaatccctagatcagcttggagaaaaagagatcaagccaacttgaagatatagtcctaccagcaaaaagtggcaagatactttagtaagaaagtgaaaatgagaaaattctttgttggggatttggtgcttagaagagtttttattaacactgaggacaatgcagtagttgtgctcggacaaaactaggaagggccataccaagtgagtgagtcacactgttcaatgccaacaaattgggtcggtataatgatcaaatacagttcatcccagtacaaagatacaagaatgaagaacatgtaaaaaagtactaccagtaaaaatattgttcttaaatgacttcttttggatggcatgtctatgtaaaatccttgaaaatttttacaaatgccaaggtctgatgaccacctatgttgcatattttatctagaataaatgtaagttacttatgtaaccacacattctgaccataaatgagaaaatatgattttataatcattcaaattgtgtcttttatgtatatgatgtcttgcaatactagtggttttccaatcacgatttcctaacatgtgtacaaaaaggttttccctaagaatagaggccgaacagactactatggtatactctagttat

SEQ ID NO: 188790 - DNA, 2647 bp, Cannabis indica
tttttttttattattattgaaaatcgattagagctagctttacatggaggcttcggtgaaatcgaatggtagtaatgctaccacagctgctggaaaatcttccacggttccggcgaatgcgcagccgttggctgaagagccggcagagattgcgtcgaacatcaattaccatgctcagtacagtcctcacttctcgccgttcaagttcgagcccgagcaagcctactatgccactgctgagagcgtccgcgaccgtctcgtacaggtaacgattcaaattttattatttggtttatgagtatatactgattttcaatcttcgttgttggttttttatttttgcagcaatggaatgagacgtatcttcactttcacaaagtggatccgaaacagacgtattacttgtcaatggagtttcttcaagggcgagctttgacgaacgcaattggaaacctcaatatccagaacgcgtatgccgatgctttgaacaagttgggtcatgaacttgaggaaatagttgaacaggtagccttagttttgaaatctgaagcttttaacaatattaagttggattgtactatatatttgggttcaccacagtttggtgttactatttggggaactttgtgcttagattgcttgatcattgcaatctatagtcccgtaagactgtcattttgtttaattttttttaacaaaaattgtcaattttgtaggagaaagatgctgcccttggaaatggtggtttgggaaggcttgcatcttgctttttggattcaatggcaacattgaatcttcctgcatggggttatggtttgaggtacagatatgggttgtttaagcaacgaatcgctaaggaaggtcaggaagaaagtgctgaggattggctagaggttctgttttccccgactaagttattttgtttcttccatagaactttgctgttgctgatatgtccttttattggaaattatgcagaagtttagtccttgggaaattgtcaggcatgatgtcctgtacccggtcagattctttggtcgtgttgaggtcaatcctgatggatcgtaagtaatagagttagaaaatagaaatagatgatgtctactaaccactaaataattgctctttgataatgctgctgcgtaaagatatatgggaatttgtcaaattctttgattgttttttagtttgtcctctgaaaagaaaagggaatttgatttctgaagctgcttatggtaagcttattttgaatgttgtacagccgaaaatgggttgagggagaacttttccaagctctggcttatgatgtgccaattccaggatacaaaaccaagaacactattagccttcgtctttgggaagcaaaagcttctgctgaggatttcaacctatttcagtttaatgatgggaaatatgaatctgctgcacagcttcattcccgagctcaacaggtaagctattaattttacatagaaaagttgtatgagaattattgttttcacataaaccatttaatttatggcacaaattttatgcattactttttgacttctaatgatatgtatatctcggagagaaatgaatgtgtgcattcacattcgaacttttttccatcaaattcattttcataccatttttgaatttgcagatttgtgctgttctatatcccggagacgctacagaagatggaaaacttctacggctgaagcaacaattttttctctgcagtgcatcacttcaggttggtttgatttagttggtaaaatgtgcatcagtttggtagctatcacttttttacatttaagaatatcatttccatgttcagtttgtttgtcttggcattaaagctttgaccaatattcctgtaacttgaaaacaattacaggatattatctttaggttcaaagagaggaaagatggaaacggatcgtggaaatggtctgatttccccagcaaggttgctgtacaattaaatgatactcatcccactcttgctattccagagctaatgcgattgctaatggacgaggaaggacttgggtgggatgaagcgtgggatgtgacatcaaggtccgtatatttcatgcttttcatatgtattatgtgacgttgtttttgttatggctacgggagcacaatattgtgtttctttttcttctcatgtctggagttcctattggacctaaatagtacctgattttattttgaaccaggacggttgcttacactaatcacacggtccttcccgaagcactggaaaaatggtcacaagctgttatgtggaagcttcttcctcgtcatatggaaatcatagaagaaattgacaagagggtatttgacatttcctttcacatatctgtacaagatagataacttttactattgaattaatgaattgtgagttcattgcagtttattgcaatgataaatgctacacgaattgatcttgagagtaagattcccagcattcgcatattagacaataatccccaaaagcctgtcgtgcggatggcaaatttgtgtgtggtctctgctcatacggtaagacattaaaatgtgtttgaaaatttggattatcttctttaactggcatgatgtttgtcacagcagagctgattgcatctatgtattaaacaaaatcatcttt

SEQ ID NO: 188791 - DNA, 2034 bp, Cannabis indica
aactttcacttcaaaataaaactgactctcaaatttttccttcaaaagatcaatcattccattgctagtaatacaattatagagacactgttctaattttgtcttcaattttcctttcattaagacaagaaattagagtcccaataagtgttgtgcatcatgagagcatgaaacatacttaaaactcaagactatgcaacttccaatgagtcataggtgaaatgaacagtcacagccatatatcccttcttttgatggttaacagtccacatatcagtggttataactattctactcttgcttttcctccaaaatatgtctgcatttttctttctcaatcttatatattggtgtaaatgcatttcttgacactattttgaacgtgggacaaaagtatttgaatacaataaaaccactatactcaaccaccactaagacatattcatgcaaaattatcctttgagccaatttggttctccctagtttaggatcaaagttgcaggtaactgaaggacttgcattagggtttttgacaagttgttcctttcttatggaacatctatccatgtgacgaagtaaatgcttagtcaccttactactttctcccaccaatttcacccagcagtgattacacactgctttcattttaacataaatactctgtaatataaagtgttcctctaccctcattttcaactattctatcactatgacaatatgactctctacttcttctgtattaattgatggaacaaattcaacatcttcaaaattagaatcagacatctaacctacattaacactatcatccatattcccaactatatcaaaattaattaagtaaaaagtataaatatatctataaaaaaccaagcagcatttctcctattttattaatcatctagctatttcaacaatcaaatagcacaaattttcatccttatatcaccgcaacacagatttcacagatcttacttcactaagtgacacagtttttcaacattacgctattatggataaatatataaaatattcaaacaagttaagtaaaatgttaattatagaagaaaaaaaaacctcaataaacaaaaacaagctttgttaattatagttttgctctaactgcagctgcaaggtcagagaacaagttctctgctgaagttggcttctagtactaagttatctacaatttgcaaaccaaacgaatttaagaattcggtagttttttattggattaaaactgctcaaatttctcgtatgagaacaaattaaaaattaaaaggcacagcattataaacacacaacattcttgaatgaagctataattttatgaaggatatgtttggaagtttgattttagtgaagaaaaaaaatagggaaaatgtaataacacaaaagtgtggacgaaaaaaaaagtcaatttttcaagtttgatatgaaaatttttgttaatttgagtgtatttctatacaatttttctttccatactaaaaattagaattttttatttttaatttttcacttggttttttcctataatttctctactccctttttttccaaccaaaatccaacttccaaactgagcttaaagcaaaagtaaagtggatactactattttgataaggattgacaatatggaaatcttggtctcaatgtctcatctaccagtctttcacagcaacaaacaaaatttataaaaagatatttgacccacctgaattctaatgttattccaattcaagtctcaaatttgcatgacaactaattgaacttgacaagaaagttgagagttctcaaagaaacatagagaaatgacaaaaactagcacatatgacatcttagcattaatagaccacaagataattgacaaagaaaaatgttaaaaataataacaaggtttatgatctctcagagtaaagcagcaagaaaagttgaatgaagctgaagggcttgtgcttatcaactaaagactacacccttccagcacagtattattatatatatggagagagagagatttcattaaacttt

SEQ ID NO: 188792 - DNA, 1680 bp, Cannabis indica
tatatatatatcaagttatcaactaaccgaatttatttgtagatagttaaaatgttaaatctatgatttgtatagtgaatgtctaataaataattaaaatatatgctaataatcattccttttactgtataataataatcttcaaataactccagaattatatagaggggtagaaatagaatagtagtcagcaatactgttcatcaagtcgaaggtaagctatagatagggtttaataacttgttgctttttcaaattttcatttgccaaatcaaaataagtaagtaacctacaaatattgaatattgattattgattattgaattgaagaagaagaagaaattgttggagatggatttcgggtaagggggaggcacgtgcaagttgggaatggggcaatcaattgttctgctaatctggcaaagaataaaacagtagtaataataataatcactatcctcactcttttatatatttcactactctttctttctttttctcatttctgtctgtctgttgagttgtgtatgtgatggattgatttaaatctcaaaccagtggacaaaaaatgaaatgaaaagaccaaattgatttgacatctttgacaagatgtaacattgctgcctaccccaactctatttccttttcaatacagccaaaatcatcaattttacaataaaacaaactactttattatcatcatcatcatattcatactctctccatttgttttttattctttatataaataatatttaaaaactaaaaaacacttcattttctggcacagtactattactaccatactatatctactacttctttacttcaaatccatgtttcgtgtactcttttcatgttagatttccctgcatgcattaatttactcctcttttcaaggggtgcatgttgttttctcaatagctctctattttatttattttttaaaaaaatgtttttcatttctcaaataattgtaacacactacagtgcagtacaggctctttggaaatgccattattggaaggattcgggggcatgtcttctgaaagtgaggccatgattctctcttttgtttagttttcttttggttttgttagaaatgagttgggatattattggtctcataaaatatagatatataaaataattataataatggttttggaattagactacacatattgattgaataagataattaatagaaggtagcagcaacagtttaacacaccagaattaggtcaccaaggtttaccaatgagtcacgtcggtacttttttatatccattatttttataattattttactgcctaggcttgtcacactcagtagtaccatctagttctatcatttactgttttcttttctctttaattctatgtgtataacgcaatcaaagataggagtctattctattgtcgatccatgcattccatagtacgatctgtatttaataaatacgtacctatttacaactaactaatgttaacccactaaagctatacctcactcgtgagggaggaagggtggaaaaagatggaggacatgatgagtacccgcgtttgaatctaagggtgtttgcaaattattaaattatatatatttaataaattataacttttatttaatgatagaaaataataaagttatatgggttgagaattatggggttccat

SEQ ID NO: 188793 - DNA, 1553 bp, Cannabis indica
aagaaaaagattgatcatatgtatgtaaaaggaatctcttccagccaaaataaataaattattaccaaatctgcaaatcagaagtttaaacaacaaaataagtacttaataaatttgaaaaaacaaattttagggagagaaaattaaggaaagatattatttctccagaaataatactaaggagagactgtcggtaatagatttggtatttttttggacaacagttttgttatttgatttgatatatgatattgaacatcagaatcaaaatattatatatacattcatacacatcacttatatatacaaaagtatatattatatgtatctcgatgaaagaaaattgttataaatataaatagagtttttatagctagactgaaactaaaattgaaaagaaaataacagatttttttttaacttatatatgtcgttttgagactttgtttgtagctgagaaaagaaggaaaaaagatagaaaagcccagaattataaaaatcaaagataaaattagaagttatactattaattaaaaaattactttgaaggcaggcacatggctgtactttatgcttgtatatctatttcaattttaatatttattttctttatgtgcaaaaacacaaacaaaaggtaaaaaaatgtttctttctcatggagttgactggaaaatgaaaactccgactatataattttgaagatgtaagacgaaaaagtctagcgttttacaccaatcaacattttttattagaggttaaaatgattgtgaggaatgaaaatattaatatatatatatatatgtattattacatcttaatacatacctgaagattattgttggagaggtcaagcttggaaacaattccaagatttagagatggactagggagagtctctaaagacaagccactgaaatccactatttcaaatctctcttcttctatggaggttttcttctcctccttcttcatattactaaaactactactcttattattattcctgatcaaatccatcctcatttgcacatgttgcttttcatacatcatcttctactaaccacgaattaacaaatcctaattttccacttttcaaaaataaaaaaaaaaaaaaaaaaaactctccaagaaatccaaaagaaaaaacgacagaatatgaaaagagagagagatgattttgtgtgtaattatgcttgagagagaaaataccgttaatatatattttttttcggaagatagagaaagatgaagaattgtacggagatatttgacgtggaactgacgtgggcgagttaagtacaataggccgtataaaagtatgagattagtgcctaagaaatccacgtcagccacatgagaaagtcaactgttcctcttatttcagtttgaaactcagcagcccgcgaatctcgggggtggctgctctctctcttatatatttgcttgtcttgtcttatatttacttaaataggaccaaatccaactcccatttcaaattttattttataacaggtcggtccgtgataagttgatcttataatatacagtccaac

SEQ ID NO: 188794 - DNA, 1216 bp, Cannabis indica
ttgtttcccgagacgagttaattgatgtgcattttaataatgcacaatttaggctggttcatattccaggtctaatacacgtgtcagtcttcttattgctagccgaaatttaggtataacaattacaccctaaatgtacttttttaaagaaatgactttttaaatgccttcaagggtacaatcgtatttttccatttaaattttgcatgattttattttagcagttcaagactttgaggcaaattatttcagcatttaatgttgtgactgttcctttctcggttagttcccttccgttagatttatccttctcttaatataacgattaccattgtttgggtataaatttcaaatttcccctcatttttgccatttctgcccacaaaaccttcatgcttcgaaaatttctaaaccaacatcttccctaaacttgcataccctctctgtctttcaccttctttctttgagtttcatccgattacatccctcgattttagaatcgtcaagatccagtttctctggattcagagttttcatcgtgattaattttaacacccgaaatctctcatccaaccagtaagtaatgtttcattttactgactttattttatgcttccaatcttaatttcttagtatgtgtgttttctttagtttgcatggtttgggtaaactgtatatgaatgtttgagtaacctagggctagaaaatttaaggttatgtcattcacgggtcttgggttttgtttgtgctctatttttctaggacttagggcatgattctctatgatcatgccccaatttaacgtagaatttataataacataacccttagaatcagactgtcctcaatttccttccatagcttttaagcctcaaactcaagaacctcaaaccatacttgaaattaatgacgcgaaaattaggaaccatctcattaggtctaaccaggaagaagcttctaaccactatagacgatttttacaagaagtcattgagggtaaacgttgttgtttgtgagaaattgcttagcttgaatcacctagtttagttactatccccttagcgaggccaatatgtttaccaccaatcactgttgttttttcactaggtgatctggaatttgaacttatagctcacaaagctcgcaaatccaagactcctcagaatccttctgtcactttcgaggcagaattgattgaatctagggtcagatccat

SEQ ID NO: 188795 - DNA, 5535 bp, Cannabis indica
aagttatatttctagaactagatactaaactaagtcattatccacgttttatttttttttattaatatatttaaaccaatttttttaaaacaataaaaatttaataacttacagcaatcaaaaattattgcgtgacaatttacttaacacctgtcgaaaattaaagtatttatttgcaactaagagttaagcttaaatatttataccacaaattactgtaataaattttgatatctttctaatcttttgtattttctttttctttttctttcacataatgaatcacaatgtttaataatccaatatgtacctttgttctcatttacaaaacctcttttaagattattaacctaaaacaagcaaacaaaaaaaaaattgtaacactaaaccaagtcagaataaactcactgcccttaaacttttactcttttaatattagtaataataatcattatcatattaagaaacaaaacactgaacaatcctatttctttccaagaaagtgaagaaccaactccatcaaaggaatataaattggaagagagaaaaataaaactgaatataatttacaataagtaacaatctcatcaaaaatgaaaaactagaacgattactgtacattaatccgacaaggaattgcacattctgcctccttcttcagatgacagaagctcccctccactgtcatttacaagagccaagaaagaaaaagaaaaacaaaaatggtaaaaaaaaaagtttcgattatgccaagtagttgtaaatttgtgggttgctcttgtctcgctctaggtactctctgtcgatgaggctttcgatcctcttcttcaaatcagctggttttatcggaaacttgagctgctcatatcacaatacagcgattattgccattcgggttagttacaatcattgttttcggtgaacttgtttttgaaaataaaacgacggtggtttacctgttggaagagttcggtaatcagaagtgtgtgacttagcactttcctagttttcattatccgaacaatagcagcatcaacctaagggattagaagaaaatgtagtttggttaggccacagattcttttaagaaaataatctctttcgggttaaaaaaacaataacataatcataaaacgaaggtaacctgatattgacggtcttggaatactctttcagtggtgctcgtgttttcctctactgtttccttcatctggattgcatttacctgtacacgaaaagattgttagcttcaagatctgccatacaaactggaacaacaacaacgggattttgacaatcatcacaaagattctctggaccgcaacaatttaaaaaactgtaccttgatacggtagagaggagcagtaaatccgtcattgaacaaaaatgaatcattgtcctccacatctctccctttaggcaactgcagaaatcatgttcaaagggaattgaatattgaattgtatgataaaattcctacgtaatataaactccggccttataaatcctatgaaggaattatatcgatgaacctaccttttgaaggactcgaacctttccacaagcaagggactgcaaagttcttcttagttccttatcctcgatgcctgtggagtctttaatatcttgaaagcttagcttctcggcatcattaaacagcataagaacaacagtctgcggtataataaattcaacatgagcacacgaacaatctttagtcatcacacctttgggtaggcagaacttgagaaggaatatatgcttatgaaaactgatgaggtttagcctataaaccaacctgaaaaagagaaactgcaagctcctttttgcctttaggaaactcggctttcaacacacaatgacccaatgaattttgccacatcaaacgccttccactgtacttgctcaagtaaaactccttgaaaatgtcctattaaccaagcaaaagaataaaattaagaaaaacataagattaaaaacacaagcattactcatcgtgaagagaatccgtactgcataaactacctgatacacattcagttcatgagggagtctaatatccatgggagggtatgttggccagtacctgaagcaaggtatcgtagcgattaagcttctttggattaataatgatgcacaattatattagatgaagaaatttcttcaacctacccggtggttaggacatgaacactcatctcaatccctgatgggagtttcgtccttgcttgggatgattgtttgaaggactcatttatctctttcgataactcaatatcctatagggatataaacagaatacggtaagaaaatcttaactggtacagattgaatctgagcaataactggttgatgtatcaatcaagctaaactaaaaagcctataaaatatctttgatacgaagaactggatgttaatttggacaaaattgtaagcctatagaaagtttcccttcaacatgttaatttgatccacaaaaatcaacacataagacggaaaataatgcagttgaacaattaacagttaaaaacataacccctactcttgggaagaaaaagtttagtcaagaaagagaatttcgtctgcacacctcttttggcaattttcaaggcctagattaccacaattaaatcagactaccaattttcgaaacaaaactttgatatcgattaatcataactgctgaactgaaaacagaaactagcaaaccttaaacattccctcgagtttatttgtaaattgacttccacactcagttttcagctgcatcagaaattaagtactgttaataccatatttaggttgaaaatagaatacataacataggtagttacaatcttcaaaaaaaggaaaagggtagttataatcttaaccttggagatcatagacttctctgcatcaatagaagcactcttccccaaaagcagcctttttgcaagatctttcttataaaaggcttcaaatacatctttgcccttaattagtaaaaaagagaaaagcaattgccgttactcattattggtatcatcttgaatacaaacataaacaaatacaaataattgaaaagcaggaacaaggattgggaggaatataattgactattccattcataaaccaaatactagcatacctgtataaacctgaacaacaccaagactttgtcaagggtgccttccaattcttcttcagaggtacctttattcccagcccgaagtttctcatcaagaaactttgcaatcagttcagcagggcggttctgttatgcagaaaagaaatttgcactcttacaaacaggatatatgtacacataataaattgcaccggcataatatgaaaggaaatgcatgatcaatcaggtcaggacaaaacaggaaaatgagaataagaagcacaaatttaactatgtctaggttgcctaagtacgaagatcccgaagttaatttcgtgttgttaagtatttcctacttttgatttgagtatcttttctttatttcatttttctatgccaccttccattgtaaaattaagtaaaacagccagagaatagcaggagaaagaaagtatgcgaggggtcaaaaatgtaacctgacgcagattaatcaaatactcaaaagcatcctttattgtgttgcaaaacgcttcattcttgtagaagctttcttcccaaatcgtatcaagagcagccttgaaatccaaaaggcaggataccatatctttatctttctcttcatccatgacaatgccctggcctgttttccgaacatataagctaagggcttgccttagagattcaagagcactaactctagataacagattgtatgtccttctaaggtcttcaatacgattcccatccatcaacaacatgaacccctagaacacatccaaaaaaaatgcagcaagatagaaaagtgattacattaaggtaaaaattgacacattacataaatataaatatatatatctacagtgaaggataaaatagatgattcaatcatttaacgttaaacagaaaccttatcgagaataacagatatatggcgttcaagaagctgcttttctgcagttgctattaatggttttcttgtagtagcatccaggtagagcaagcatctctcgtgttcttcatgtaaccttgtctgtaacaaatcaccaataaatgtaaaataccaaatacaggatttgtttttctttctcagattaggtcaatatcacgagagttaaaggtcatgggaccgaagtaattgttaaatcattgacaggaaaaggaaaggagaaaaaaaaacatcgacagtcatttgaacaaataggagtggaacaaatatgcacctctacatgctttaagtaatctggaacatctgattgttgcatgtatttcatgccttcagcagcataaaattcagaagtgcgctcaagaaatggtttctcaaagctttctgcgtaaattcctagtgcggtaaacatcttcagaaggtggttaagaagtgctctatccactgcttcacctaatctgcaaaccaaaaacatatattgcagattataagttcctcaaatgataaatcacaagcaataatttgaaaattcaagttaaagaacacaaatcttaaaaccatatcatgatgtttttactatagcatcttcaactatgcctcaataagtccacatagactaatcctacctgccccactagaaagtaattatacaggagccagtaaaattaaccgataaataaacaattaaaggatgttacgacaaaaacaaagaacgagatccttagttcgaaaaaaaaaaaaaaaaaaaaaaagaatgagattcttataaattaaataaaaataattgtaaagcaaggacctaactagagaaactacaatctcttgaaaattgaaccttggaaatacaaagaaaagaaattattgaatactgaagggagaaaaaatccaacaaaattctttacaaaaaaaaaagtaagcttttaattcttctttcaatgtagctgtacccaagttcacagaaacaataaaattgaatagccaatatatccacatgcatcatttttttttcggtatcttgcatagcatctctatttagggcatgccccaagcacaggaaacattaaaaaattgtgccaaccttcaataatttgtatttctattggagaatatagttaaacttaatttctttaacacggagaaaagaaaatataggaattacattataaaatgttattggaagtagtacatgttaaacttgcatgtttaaaagaatatataaattctatataaaataaaataactaaaatgaaaaaagaatttaatttaccgttctttttcaatcattcttaaaaggccagttaacagttttagtgctctacttctggagtacaaagaaagatgtttgacggtaaaagctgcaatcccatatcccacagtgaacggacatttggtgtttgtttcacatatgttctatctaggtacagagctataccgcggaatcatcaacatttggttacatgatcctgccagcatctctcaacga

SEQ ID NO: 188796 - DNA, 3604 bp, Cannabis indica
aattgtgtcaacccaattctagtatagttagtcatgtgaaacagagatgcaaatttagataatatattattaaaatgatatatacaaatattggtgtgttgttgtggataaataaagtaaaattacaaagattactttttcttttcttgtttcattccattattgacctttttttgtccacgtcctacctcaccaccaccaatgttttatcatttatggaggaagaaggtgtgataatatcactctcgaaacatgtacgcacacaagtgtgtatagtggagttttacatatacatgcggggtcctataatatgctggaaagtctctaatgacatgtgtagttcaaaactgaatttatctaaatatcatagcactgaattatataataatatgtcaaaggaaatacttttttcttttgttgccctattgcaaaatatagatttatgtatatttatttatataaaaatttgatttaatttatgtttaatttattacatttttcacatatagataaaacagaaattttaatacatattaaatatttgaagagagaaaacgaaaaatgatgtagtgatataactaaaaaataatttaaaatatattgctataaattaattgagtgatttaataatagtattaataatttgtttaaatatatataaataaataaaaagtacagaaattcttaaacaaataacaaatcaaaaatccatttccaaagcaatattatatagacttctcgtataattataacgcacttatcaagttctgactatggatatattggcagatcataccaaagtcatatagtattataatttttctttttaaataaatgtggtattatttataatattagattaaattagtttcattcatgtattttgttgagccgtacgtaacatgagcgtaggaatagataactgatagtgatatgtttgctcactgacaagagagtcacagctttgacttggtctctctttagttaagagtgaagctttgactattggtcttttgtaacttaaaaggtttggtaaatgatattttttttttttattgtttttattttaagcagtcaattagaagaattatcaattattatatagataatgaattgatgatgcatgatcatgccgtacgttgtttgctaatcaatttggtaaattacgaaccaaaatatcatatataatatatccttttttctttttttgaaaattatataatatattctttaaattagcgtttgatcatcagttggcgtacgttgattatgtggcataatgttgtttattctctttctcctaatatgcaccgtgcacgtggaggaggtaaaagttaaaaggcttctctgaaaagctagctagctagcatatatgaaagaaaaagaataatgtgagaaaaaaataaaagagtttagtatctgaaaaattgagcataataatatatacactgtacacactgtatatttaaattatgataaggcatgttggggtctaccattttatcctaacttgaattccaagaaagaaaagtgaagttatgattggatgtgaaacaaccattttgacgttaaccgaaagcacttctcttttattatatatatatatattataaataattacagtatggtttaaagtagaacaacacttccatcttataatatcttattatagttaggaatttgaggagcgaggaaaaccactcatacattagtagcttatccacagtatacattttcaattatgcatgtaaactactacatcttttacatattaatactaaatatcttatggtaatcgactttaaagttggtacttgcacttggtacatccccatccctataatgtttctcatatctaattttcatttacctgtatgtcccctctatagattttctcgagatctttattaggagttttgtcgttaaatctgtttgtgcaattgcttcaatatttgtacaaatggccccggcccccaccaccgccaccaccaagttagatgaggtcaaattaaagatcccccgacacaaactctttctaaatttcaattattatatcatcccctccacatataatatatgtattctctaagaagtgagagaaaagaaaatatatagcaattatttatttatttaatggagagcatatgtacaattcatgaataaactaattgtgcattatttttctctgtttcattaaattacatatggggcctgactcctgatgatacgagaaattagacgaaccggtccttgatcaaaccatagtgagtgaatgataatcatagtccaagttataattctcaattaaaaaaaaaacaaggaaatgtaatacagaaagatgtatgtgttgtttcctttttataatgaaagtattattggaacacggattaaactaatagtgaataaatgtagagtgcaacaaacaacaaacatgatggtcactggtcagaacatgaaacgacgtttgagctgtatttgaagaagagtaagcgaagagggaaaggttagggaagggaagggaagccacattccatatgctataaaagcaaagttgatggaagttgttggttgaaacagagggagaatctaggccatcagtttcaatgctcaaagccttaccattagaaatgtgggaacatttcaactttttcaagaaagctcatcacatggcttgggaccctccattgttgagtatcatgggggcctaaattttcactttgcctaaacaaatttgccagaaattttgtccgcatgccccatattttaaaaaaacagtatgagtttgcttcaagtaaaatttacaagataagaaaccaaacaaattgcggtgatatgcataatctaatagttacacactttttcttacaatttaaagagcagattccaaattcaaatcccccttcactaatatcaaaaaacgaaaccaaacaaatttcatatataaaaataaaaattaccatgcaaagtggtgttgatgtcgccacttggtgggatgttgattgcagagattcatatgtacagttatatatcaagaactgttactactacagttatcgactcagttatatacttgataactaggtaacccgtaacctggttaagcaccatgcaattttctctttctctctcttctctttttaaagattaatgaaattgattaattaaaaaattgctttttatggatttgagagggaaggagaaaacaatgaagtactagtacacattgggaatgtgggaaaaagttgtgagggtaacatcaaaaggagaaaaaaaaagatggaaaaataatcttttctccattgttatgacaataattgaaacttttgtggcaaatgagcactcaaaaaaagagaaaagtggttagcctgcttaatacgaagacatggaacattgaggtgggcaccttagctaaaagcatgtgcattcctaatgcataaaaaaaactttgaaacatatttcacattcaatacagctaaccattgtttttgtgtaacagagacttgggacttagactaataatagccagccatagttcgatgtcttcatgttgagtacaagaatacttatatgaaatagttgacttgaaactaagttatgcttatgt

SEQ ID NO: 188797 - DNA, 3251 bp, Cannabis indica
gtcaagggccaggtcggggctggtctagggtcgggtctgagttgggtcggggttcaggcgggtacgagactagggtcgggtttgtgtctggggtctggggttagggtccgggacggggtgtgggtccaaggctgagtccaagctaggttcggggccaggccgatgtctagaccaaagtctgggtccgggctagggtcctaagaaacaaggggcatatgcttttgatgagtttaggcctataagcttatgcaattttgcgtataaagtcatctcgaaactcttgacaaactgtttacagcctattctaagtgatattatttctccattctagtttgcctttgttctggggagatggatagcagaaaatagtatccttgcccatgagattatggattcttttaagaaaatgggtggatcgtgcaactatgttggcgtgaattttgacatgtctaaggcctatgatcagattgagtagaatttccttgagcagtggctgagatcctttggttttcatgaaagattcatttcccttattctgatgtgtgtctctttagtttctttctctgttctccttaatgggccccctctaagatagttctgccctaagagaggattacgtaaggatgatccgttgtcgccgtattagtttattatctatagtgaggttctttctaggattttgttgaaataggaagaccacgagcgattccatggttttaagatcaattctcgatgcccttctatttctcacttgatgtatgcagatgatactttcactttctgtagagctgatttgagagaagttgtttgtgtttagaagtgtctagaggactattgcaagtggtctgggtaggttatcaatgtggggaaatctgctattatcttatcgaagaatgtagaggctcagacgagagtggacatttctaaagccttgggttctcgagctatgaatccacaggataagttttttgggaacccaattttcttctctaatagcaagaaaaaagatttccaatttgctagggacaatcttcgtgctcgcattgagggttggcattgcaaacttctctctcaggcgggaaaaactgccctcattagatcagtggctttgagttctcctctttatactatgtctacctttctccttccaaaaggcctttgtgaagagctagatgggcttatttgaaaattttggtggatggggagtgtagatcgtaatcgctatttggctttggcgtcttgggactctatttgtctcccctttgatagaggtggcctaaacttaaaacgctttcaagatattaacatgtcactaatctacaaattatgatggaaattagcttcaagtgattggtccttgtggtgtcgttcttttttggccaagtattgtcgtaactccgcatctttctggtcgttaaatgaacatggtccgttgtcttttggggcgcgtggggttttggctacaagagaggttcatagaaaagaaacttgcctcttagttggccctggtactgctattgacatttggaagtcctcctggattccttggattgattgggataattaccgagctacctttaaccctattattgaggtttctccatattttgttaccccttttctggtaaaggcaaatagtgattgggacttggattagcttcgccaatggtttgtgcctagcttatttgagtaaattctctctttgaagagattgccacctacacaccctgatgtactcatttggaaggatgctcatgatggttgtttctctaccaaactggcttatagagccttgattaagcataggtggggccaccttgaccctctgtggaaagatctttggaagcttaaggtccatgaatgactccacctgttcttgtggaagcttagtagagacattcttccttttggttgccgtctccaatgggtttttggcaataatatgacttgctccatttgtcatgttggtgaggattccttctaacatctcttttttaaccgtcatgtggctaaatgagcttggctttttagtcagtggggtttgagatcagaggatttagcttttgataattcatttgcattattgaactggatcttaaatcctgatattcatcttagcatccctcttgacatcaatatgcaatttagtattttcgtagggtgtctatgctatgagctgtggttggtaaggaataaagcttatcatgagggtatttttccaacggtgcctggtatcatgctttagctcaaaactctacaaactagattctccaagccatggcccctaaaattagaagatcttttatagctcccagagctgatggggggatccctgttttcacagcagacactgtctgtatttttgtggatgttgcttgtagagggtcgtgggttgcgagagctatcattgtgaagaataatggcggagctgtgttggaagctttgacagtcaggtttgatatttcctctccccttcaaggagagaccattgttcttctccatgcagcttctcgcgtggctggcagagttcggttctcctttcagattgtaaagtgctggttgatgatatttctgctaaaaaggctccatgctaagtattggtttaatcttcttgtggatcggctagattctttggctaatgctagggtggtgtggattcgcataactcttaacactcatgatcatgctcttgcagcgtgggatgctgcttattactttttcggttgtttgtcctctgagaaggtggaacctcttgtttccacttagactttgcccttttgggtggcctttgccttttttaatgaatgtttttttgttaataattttttttaggaatattggtgtgacttgcaagcttgcaggtatataggttatatttctaaaagcatttaattcaccttttctagtcggcgtatgcgagctgcctgcgtaatggaagctgatcagatgttattgtacactaaccttgaatattcccagcttcttctatgatttaagtaccaaatctctctgtacaacacattgtaggaggcattgtccgtccaagttttaggtttttttttttacgtatcaccgagatggatgccacatcaccttgtgtaaaaattgggataacacaccacaaaattatctctatcaataactaaggtacagttttgctattaatgttcttcttctcttcaacaaacatattatttagatttgtatttatacacttataaaaatatataatatgtttatttatggaattg

SEQ ID NO: 188798 - DNA, 3623 bp, Cannabis indica
caatatgttaatttaaggaatagtgatgatcatatcaacaatactaccacccaccaagaccatgaggcctattatagtatagtataatatgacttgtgtgcgtagaaaataggtcggtggatgtctgtcccattcaccagagccaagagttactttttttctttttttctttaaaaaaaaagggtaattgaaatatttttctttcatttggcaggaaaacttaggaagacaattattgtttattccatcacattcacatgcacatgcgagaggttcgtgcatattaaatttaagggatcccccaagctcaagggtccggagctaaaatgttcaacgtaagcacatacgataaggtcaaatacaattggttgaaacttcaggttgttaagaagaagatctcattgaattgaataccaaaaatgatataattatttatactgatagagggcaagtagcaggccttagggtcagtcactctgaccttcaaaccggcctcgctgggagtttgtcgctgacttaataggccccttcaacgtcaccattcccatcactaatctaataaaacataacacaaatatgtatatttaatgttctcaggtttgaattcaaactcaaaccctaccaagtcaaggtagaataactactattgatgtcctattctccctatctgaaatcatgtttcctaagctaatttaattagaactaatgatgtacacacccaaattacacccgttttacaaacaataatggtgtgtattttattttagttgtaaatattcttaagtaaataccgttcagattaatttcccctcatgtgtaaaatgtgtggaatttgagtgtttgtgattattactgattttattctgatacccctaataatgttaggcctaagaggaaagagcacattttgagcctagaggtccatgagatgagtccagcccataagatgctgctgctacaaagatttcatttttgttctttgctttgcttgcactctagttgctcaccctcttcaattgaatcatgtgtgtgtaggtgagggtgaacagcatgatgaaatgcatctgcaatttttaacactaaaatttctctaatctacataatatttagttacatgtaaataatttaatgagtcaacttaagaccactgtaattgaaatataaaaacaggaacctgtagagatacaacaacaggacaaaagagaattcattctggtataatttatctaatcattagttaacataatcgaactcttactaaacaccatcaaagatgtagatacaggtataaagaactaaaatcatcaaccacgatgtctatatggtctgtaccacatttcttaggatcacgaggccaaagtttacataggtcatagctatacacagttgcagcaagtgtatgcttacacacaaaaaacaggtcatggaagcttgaagtttgctttccagctagaataaaaaatggctttgagcataggcatgcctaccaagatgtacataaatggatgcatgaggtgtgtgttgtgtgaatcatacaagcaaaaaaaaataaaaaacaataccaggtcagttataatatccaatttccactcaacggtatgtcggtgctgctccaacaaatgaaacatgagaaggggctgcagcatttgcccgagaacttccaggtaagagcctttgcagaggatcattatagatctggctcggattatcacggattgatgtaggataataaggttcgtgaaacactggcaactcaacttgtccatgagcaggaggaagtgatggtgtgatcgattggggcaaagaatgcgagtagaaagaaatatgtgaggtcgtagttggcaaatgttgaccaccatattcagccacataattagatttagggatatcctcgttctctccctgctgtggtaactgaggaattgcgtagccacttgcatattctacagcagaaggcctatgcaccatctcaaattcgcgaatatatctggtcaaatgggcgggacaaaattaaaagtttgtagattggattaaaacttcatggtaagcttgaggctaaaagactataaatgacaggaatcaacttcttcaatcaaacataaaccatcaatccacacaataccaagatcaaacaaccccaagaaaactcgtttaattcttaagtagggcaaaataataatatttttacctaatccccgcctagccctacaaaatatttggagactagaaattataataatccacatgtctgaccatttgaccatttgagctaccctacaaagggggcaaaagaattttaccaagatgataaaagggaaattaccttagatatggatcttgcaaatttgaggaagaattttgaggcaagtatgactcttgtctttgttgatataacgctgcattatgaggcagagcaggctgctccatcacgtgtctttgttgatgcattggagttcgaagggttatttggggtacatattgaggatgcagcggaggtgcaactacatgttcaagtctattatcagcaggtatttgggactgaggaacgtggtgcactgcaaccccaggtaagcgaggcggagtggttagttggtggtggaagtggaacctttcttggggtgttgccgcattggaaagaaatggtggcccattataagtaggtggtatggaatgaagaggggggaacaatgagatgagagcattcaccttcattgaattgaattgagaaagaaataaactcaattaataataatgataaacgagattacaaatcaagtagtagctttacctgtgcactactaagtagttgtttaaaccttgaaccctggtaattgtcaataattgcagctttgaaaaccctctcgggaagaggtaaacattccttgaaaatcttgaacttgacctgaacaaacgaacaaggaatcaaaacaaaaccgacccttaaagaagaagacgaagaagaggggaggtacctgggcagggaattttccatgaaaggcagtgggttccaagttgagagcaccaactgaagtggcctcgtagacaccataaagaagcttcacatcaaagtcgtaaagaaaaagcttggcaccggctttaatctgaaggactgctagttgttgagccatgggtagcccgaagacacggtaaagaaagcattggggtttggtcgagccattgcacatgaatatgaaaccagatttttcttcttcttcttcttcttcttcttcttcttcttccgatttcttcattttcttactgattctcttgagcgtaagagttcccaaatcaaatcaaatcaaaattagggcacgtaaacaaaacaactaaaactaacatttgcctttgacacacataccaaatatctccacagtgatccaattaaaagagccacctgcccttactttcatttttattatgttactaggtaacgatactaaaaactttttattagttaattaatatgttgtaaaaactttttactaaaaactttttatttaccttgtaaaaataaaatttatattatatatattgaaaaaattattagttaattaatatgttaatatattataaaaaaaatactaaaaattataatcttaatatgttaaaatattaagtcatat

SEQ ID NO: 188799 - DNA, 2492 bp, Cannabis indica
aaaagataagtaatatccctagagaataggtagatactagtttgaggaagaatccctattttcatggacagttaaggttgttttgtaactaaaatttagcttatgaacccaccattcttctagcctctctttgaggctgtctgcacatgcttggccgaccaactctatttttagggcctgaccgacacataggacttcattgggcggtcaggggatggtccagctagggttccttggctggccaatttctcattgtttaatcttgcttgattcccttagaaccattgataattgccgtgcatggtgactatgttcacttactgacaggctctattccacgtgacctcagttttaccaatgtggacatggcacgtcaagtggacaaaaattagctaacatttgcccccaagtctgtatgcggacgtctataaggatagagacttttcaactctcgccttgactatgaaagccttcagcgggcagctttgcctagttgaatattggactcatcagaagacttgtctttgtgacaaaaaatgactattgccaattattatgggaattcgtgtaatggctgcacattcctcacttttaaacttttggtcttcttctcctctgcatggctatttttgtggaaaaaataaccactcattatgttttgggggaaaactcttcacaacctatataaggctcattctccttcattttgattcacttcactctaccctctttccctctctccttcgtgctctctgtaagaaaaaggaaagaaaaaactcttcatttcctcctcaagctcgactcctcaaacgcctccattcctcgaggttttaaaattttttgaacgatccgatcattccccgagtatctacatcagtctccatcagtgagtaagtattcaaatctcactttttcattgttttcttgattctgccattaatgactttaagcatttccaagcttttgaaatctttgattctcatgttgtagtgtagtcttttttacattataatcgatttgatagctttcggatgcataatgtatgactttttgataaaaaaagattggattttgaactctatttgggttcttaactctttgagtcacgaagaacatcatttgaatttttgaaaaatagaattttgattcttatgagcctctggctggcccacagggtctgttcgtgaccctggtcggttcatgcttttagtttcggaccttggcctaaaaaacctggtcgttttatgactctgaacccaaagtctgtccagttcatggttttgtacccaaaacctggccgattcatggtagacgatttggcgtcatgactttagccggttatggccaatacttagtgtttgtaaagactctgtatggcttctcgagcccatttcacccttatctagtacttgattcccataggaatttagtacgacatgtcttaggtagagtctatcccagccaattagcgaccttaaacttcaatgtctgtttaattttttgcacttgaaacctgtactttaccaattaatagctttgtaaattagcgttgttttgctaatacccttaggtttagggcagttgactcgtgctttaactaagtcttttattttgtccagttgttcacctccccctgcctttttatattgatgaacctgtgcaaattttgaggaggtgacaactgaattgacaaagacttgctcaattttctctacaaagaccatcatctagtccagaatgccagttcttctctcaagagttcttcagatatttcctcgagcaattttgaggctagtagtggttttttagaacctaaaatttcatatcatcgctattctgaatgaataagcgatgagttctacggtcgattcatctcagaattgaatcaagggtggaggcagttcctccccaggtcgtggacttatattttctgagaaggtgtgcctgacacgttgcccactagacgggcaactcttacagttagagatctcctcacagttgaggctgctgttaccattaggggtgttcaataaaattcacaaactgcccaacccaaataaactacccaaaccaaaccgaataaactgataaaacttacaacctgaaataatacaatgaaaatccaaaccgcccaatgaatatattgagtggtttatacattactctaaaccgcccaattaacctgaataaatagaattaaatcgatttatacattaatatattacataaattacatttattagttaaactattttttatttaaagtttagatattttagtgtttaacttaaaacttagactttatagttagagtaatttgtggcataaatacctaagttttatgccgagtagcagataaatacctaagtcctatttttggcggtaaaaataccttctgtcactactctggaacttccataggtacctctccgttaagttacatgtaagtgtccatatgtcatcttcgcattggttcacgtcatttaattatt

SEQ ID NO: 188800 - DNA, 4206 bp, Cannabis indica
aaaaatatggcaaaaagcataccctaaaatttttaatattattcttaggcactataactaaaatccttgctataatatctgtcttctggataataaacagcattcacaatattacccccaaattttcttccattcaatacattcctcgcattcgcacaacccgtggtatccgcatattccaagaacacctgcaaatgatcaaaccccattaaaacccgaagaagattttcagtttcggagaatattgtacagctgatgatgtttcaatatacctttccgacacctgaggttggctctccgctctgactactcggccgaggaatgatgacattcaccacagttcctaacaaaattcaatccgttcagagacaagtctcaagacaaaacaattcaagttgtatttgaatatattaaagtagtaaacaagacaagacgttcataacttaggaatatttgcggcgataccccttaatatttgtaattgttaaatatacgaccctcataaaaaaaatgacggtataagtatcttacgattttgtttcagtcgtacttttttttgattgttaagtgtcagttcaaaaacacgtggcaatatatttctttaacttatttaatacatagtccaataatatgtcgttacgtatttctaagttgatatttaataaccaaaaaaggatacgtctgcaacaaaatcgtaagataaaatacttttgcgaccatttttttttattaagatcatgtgtaacagttataaatgttaagagggtttcgccgcaaatatccccataatttatagaggccacaaaagtgatgtattgatatgtacacacatattatacacaaatttgatacacaatcctaaatgaaaatataattggttgaatttattttcttttagtcatgtgtaatttgtatatacatatcgtgttactgttacaaaattatattaagatatataaacatgtgtgcatccatgaagtttcaatgttttcttctataatttgttatgagtgtcagtctataaagcataaatatataatatatatatacataccaaatttgccacattcatccttcatatcctctaaaatttcttcatattcttcatcgttcgccagttgatcagcactaattgcctgaatggaatggaacaaagtgtaccaagaatcagtgatcggaccattttcacttacgaaaaccaatctaataacaacccgtacaaacagagtgcataactattgaatcatcgaaactattcagctttgtaaaatacctcggtgagacataaaatcttagttggactttctccatttcctccaaagcccatcccgcctacaggaagtcttacaccgccagcttgcagtgccattttctgtatagcttaaaattttgagtccaccatatcgatgacaagattaagaaaaaaaaaataaaaaacacgaagcaaaggttaagtttgacctgaatagctatatgctgttgcgcctgagccaaaatactatcctgttccgatttggattgcccagcgctacaaaagaatattcaacaaaacatttcatgcaagtcagtcttcgactataccaaaacatttaaaataaattcggaatcatacaagacatccactacaatgcctaactacatcctaaaggaaataacattgtaaatagttcaaataaaatctcaaatgttgtaattgcataatatatgaatcaagtaaaaggaaacttcatgtgagttataattaatatttcttagtgaatagaacctttcttaagattatatgaagtggaattgataataaataaatctgttatagtaaattgtaaaaggaattaataagcaaataaggaacaaacatggaagtttgagatttgaataaattgagatattccccccctatcggttgcatatggcaagactatttaatcaaagagtaccaacctcatagtagcacgtcgaacagttagagttttatcccccattttcaaaccattaagagaagcacaggcaatgtctgtcacagctgggtcctgaacttgtttcaaaatcaacaaaatcagattcgagaagaatactctggactagttattacaaagcaatgtgtgcatgaataaagaaaatgaaacagccttatcatcaaccaatcatattaatttcatcacataacgacaaccctcggtagtaaggttagcgactccaaagatgaaaccttaagtttccatctaaactttgattgttcacctgataaacacaaaaaccatatcctttagagtttccagtgtctttatccttaacaaggtcgaagccacggagaggtctgcattgtaaaatttgaaaacttagatgaagcactaacagtttgtctgacacaaatgtgagatctatgagagcaggtatcttcttccttgtttaagttatttcatcaaaaagaaacatagagaacaacataaacaagcataaagcatcgggcattaaaatagtcaataatgtggtttgtaagtaggaactgatgttctcacccaaaagattccaacaattcttttatctgctcttcagtgaagtaatacggaagcccaccaacaaaaacacgctcaggtccctctgctccagtgattgcactatcatcaaagtaacaagaatcagcaccgagactttttcaactttagagtgcataaagagcaatccaaattttaaaagtactaaaaagctaaccctggaatgagtccgacagcagccaagttaaggtgaggactaggttggctaggaccaagtgttgcagctaatgcaggattatagtcggttggcctccgcacccttacagcaaccccctataaataataaataggaaatctatttcagtcatgaaaaaacccatagcacaatggagttgagctgcaatcagcattttctcaggtcacatcacaagctttccaatggtcaaacaaccaaccacagttctctaaagttattcaatccgagagtgtctcatctggttaaattcacttatttacacaattcttctggttgagataaccccaaaaatggaacaggttcaatagacatgcatttgtacacaaatttctacaccgtgataacaatgttagattaagtagatcgaatagatgaaatcaaaacactgaaaaaaaaaaggtttttttctttttaacatgtgttttaatttcagccaatagatcatcatcaattagaccaaatgatgtttatcacggtataaatatgtccttatcaaacttgcctcaaatatgatcccatcaagtgccattgcattacttgcttcttcaacagttctcatctccacaaatgcaaacttcttctcatgattgatatagacattaacaactgcatcacctgctaagcaaatgccaaaaaatacatactctactcaaacagcgcatgagaaagaaatgagctgcacattcggttcaaaataacagactataaaataatgcttgttgtaaatttctatcgtgagatatataattacctgagccggaggagtttcctccaattgcagccatgacaccgctaaagaatgttgcaatggtctgttcaaacataggacaatccttcaaagtgttcaaaggaaagcaagacatatttcttactacctaaaacagaagatcagaaaaggaactcaaagaaaaacctgctcattagctaacggaggaagtccaccaacatatactcggcgagcatgccttgtagcctaaaagagagcaaagatgacaaatatgaatcatagatagtaatcactaaatatttctatagacgtacatatggtatttataattctacctgctgagtcatagcctgggccggcatcatgggaagagaaagctgaaacatattaaaggcaatatggtattaccacaccaaattacagatgaaaacaagggtatcataaccatacaaaatgatgtcaatgaaagatacagacttgtgttgttccaaagggtaacatgtttggcaccactccaggtgttgtttgaggaacagccaacagctgccctgtgttgttaataaaaaggaagaggtgaagttcagaacgattgttgaaatcatttaaaagcgaaaacacgtcccagccaatgtgaagagataatacatttaataacctagacttacctatttcatttacaacgaaaccgaaaagagaaacctaaaatataccatcatatatatatatat

SEQ ID NO: 188801 - DNA, 3965 bp, Cannabis indica
cacataaaaaccagatccctcacggtgtggttctatttgacaataagggtggttaaaattaatcacatcattgtaacgacctactgtacatgttataaacttttccttcttcctttttcccaatcaatgaatggaattttcataggtatacatagatatgaacaaagaaccaataaaacgtaacttacttgaatggaaagtactgcagcaatagttattatctcctctgaacacccaagttgacttgaagataaaatcatttttgcaatcattggatcctacagcatagcaaaatatcatttcagcgaaaataaaaataataacataacaaaataccatagaaattagagaacataatgcaaaatccttgacaaagaagattaattctcagagaaaagagaaaaaatggcaaaaactatagagcagcaataacagtttacacatgctaacatactaatggaatctctgccacttgaaatccatctggtgaagtaagtttggcgtcatcatccaggactccaagtgaataaagtacttcaagtgcacgaaccatagcttcaggtgatggagatgctggccactcaaagcccaagtatgttatctattcccaaagattttaactgcaaattaaaagcataacataaagaatttatgcaccccatagtgtatcactttccaatggtgaaaaaacaaatattcataagcataaaattatcacaaaaatggtttgacacagttgtaggacattgttaaataaatataaaattcaaggtatagttaactgatgagaaccagctgtagattaataaaccagtagccaatacaacaacaaagcaccaagaacagtaacagaaaatcaatagaacaggagcaaaactatagacaattgaatatatgagaaaaccaattacaaactatgggagcccttaggcccctttgatgcaaagtgttttactcaatacatagcatacctttactattctcttacctatatatagtaatttctcattcaaattaccctcccatagactcatataccctttttatttaatatatgctagcacaccaagctaatcctagggcccaactaaaacctttgaaaatctggtttctaagtgaagatttctggtaagaaacaattgacatgtagatatgtttaaaaagtaggattggagtggatcagattagataacatacatgtgattttgttataaagcttgagaggatatttaagaaaactaatccaacaacctacccaatctcattgaaaaaacatgggataatttactctatctaatccccaacttcatgattgtaagggggaacatatgagttctgggaccataaaattaataaccagaaaaagaatatcatcaagtactattacaaaataatggcaaacctgaatgacacaggaaacaagattagatctctgaatctctggtatcccctcgttaggcatttctttgacaaaatactcttctgtatacaacctaattgtagccaaactcaaacatataaaggtcaagcaatatgtttaagaataggatttaacagcagtaagagttattgtaaagcacatgtttatcttgatcaactttatataatacatccatacaaggaagagaaagccactgcaaactcatctaatattcagattactaagtacatcattacggttaaagggtggggcgaaaacttctgatcgaactaacacagaatgtacaacattttagtaatgttggatatgccaataccagattttcaaaagggaaattgagaaactatccctaatgtagcttcctaattaaaaaaaaaaaggacaatatattatgataaaacttttcttagattagaaggagcttacaaaaatagtatacacaatgagtagagaaatcacagcagaaactttattgaactttaacgagtaacaaaccaagcacttcgagagggttaaatatcctactttggcctgtcaagtggaatagatcactccaagaaacacttctatcttaattcgccacaagaactacttattctcattctctttatttaaagagaataaacttgccacctcatcaactaattacatttaaaacccaataatcaaatgacaccttgatagaacacaaagcaatatgcgacataagcattgagggaaatttgacatattgttctaggctgtcagagactattggaattaaagggaaggggaaagagttgtatgggtataaatataggaagtgtgagcatcattagggggaaaacgggtattgagatgagtatttgctcttgggagagttagctgtctcttgaatatcagccattgtggagagttggcggtccaataccagccattttcttattgtattgttctcgatctttcattaataaagaatctgaatagtttcatctctttctttatcatttttgctggtttgttcctatattctctgtatatctatctggttcatatcacaccttatactaagacacttaatcacatttggcccacatggcctttcttcttatgatatataccaaccaaataggtggctaatcattaacccccaagaccttcaccttgtcctcaaggtgaatagtaggaaattgttgttaaatggtggtatagtcctcctcccatgtcgcttcaaaaactggcaaggacttccacttgattaacacctcaaagttgaatgtgtttggaggggaaagaaaatgctactgaaacacttctttgagctctgggagctctaaatcggttgtgagttgttggggaatcatagatgagcattggacatcgccaagagctcgtcaagttgggagacgtgaaaaaatggttgtatattgaagtagttggtgatagctgaagcttgtaagcaaccttgccaatgtagtggacaaactggtatggcccatagtaccaactacggagctaataatttctcattggctcatttggcaagtgagcgctgcctataagggcggagcttgataaagaccttgtcaccaatggcacagtccacatctttgccactagaattgacatgggcttttattttgtgttaggctcggagtaagtgccatttggagatcatctaacattgcatctcgagccgtcaacatgcccttcacagctgaaactatggcagtcccatcttgcaaggaataatggtcagaggtgagtggccatacgaagtctggaagggtgtactcttgagggaagggtgataggaagtgtaataaccatactccacccaagttaaccatttagaccattgcttgggctggtggaaattaaaccagcagaggtatgcatcgagacaaagattgaggacggtttgtggatgatatgtcgtgcttcactcaagtataatgccttgaagcttgataaatgagaccaaaagttgcttagaaagatgcagttacgatctgcaataatagattgaggcacaccatgtgaccatttatctcacatttaacacacaaccccttttgcctcttatgtttgatttccaaatcagtaagccttcgcacatttgttccagatgtaaagaaaaaaagtctttgctggtgttttctttaccactaattcctgaaatgacgggcaagtatgggatacaaaacatggtcctatagcccaatattttacctcgataccctatggaatctctataagccttaccaacggtccaaggttgttgaattagcaattctgcccttaaagatgacaataatccattgaggaaggtgctgagttgcaacttcacaataatgtcatccaaaggggccaataatgaaatttggtgtaatccaaaaatgtcccttcttgtttcattaccagaaagtgatcgtgcaaagaacctgcatgtgtgttgcgaaagtggcaaagcaccaaacttttcatctcttcccaactgagaattgtcctcttttaatctcataataatattggtaccatagag

SEQ ID NO: 188802 - DNA, 6702 bp, Cannabis indica
aaatataattaaatgggcaccacacgtgtggtcatttgagtcagatcaaagggcagaaggaagaggaggcaaagaagcactgaactgcaccagcagagatatagtccttgttttagcccaaaacttttttgggttattatatcattacattacatgtctctatgttcttattattattattattattatttcatataagaatagccaaagggaattttgcagactctctcagaaacaacaaagagagttttgctaaattgacttcaactcacttttatcttctttccctcttccccaccattattattaataccaataccattactattactatgccgggcagtttagagccgttagatttgggggttcagataccgtaccatttcaggtgtcccatttcacttgagcttatgtgtgacccggtaactgtcagtaccggtcagacctacgaccgtgccagtatcgagtcttgggttgccaccggcaataccacgtgtccagtcacccgatccccactcaccgatttcactctcatccctaaccatacactccgaaggctcatccaggaatggtgcgtcgccaatcgatcgttcggcgtccagcgaattccgacccctaagcaaccggctgaccctgctatggttcgttcgctcctctctcaggcctcctcgatgacgattgctcctcagtcgcggctctctgcgctgaggcgactcaggggactcgctcgcgactcggataagaaccgagctgttatttcggcctttgatttgagaggaatactcctcaatgttgtgttttccaatgcgatggattcggatttgagccacgaagcgcttgctctccttgtaatgtttccgctcgctgaatcggattgcgctttggttgcggcggaaccggctagagtggcttatcttgcacggatgttgtttcactcttcgattgaggtcagagtcaattcggctgcgcttgttgagatcgtagttgctggaactcggacgccggagctccgatctcagatcagcaatgtggacgatatcttcgaaggcgtgattgagattctaagaaatccgatttcgtatccgagagctcttaaagtcggaatcaaggccttgttcgccttgtgcctggtaaaacaaacaaggcataaagctgtatccgccggagccgccgagactctgattgacagactagccgatttcgaaaaatgtgacgctgagagagctctggctacgattgaactcctctgtcgtataccatcaggttgctctgcgttttcatcgcatgctttaacggttccgcttctggtaaagatcatattgaaaatctcggatcgggcaacggagtacgcagccggagctttactatcgctttgttcgtcgtcggaggaaaaccagagagaagcggtggcggcgggtatattgacacaattactactactagttcaaagcgattgtactgaccgagctaagcgaaaggcccagctattgctgaagcttcttcgggattcgtggcctgaagattccatcagaaattctgacgattttgcttgcagtgaagttgttgttcccttctgatttttctttttctttttctttttcattttctattttaattttattttatttttatttttgggtttaatctgattcttctatgagaaacagaagaaaacaaaactgaaaaaaaaaattgaagagatttgttaggttggtatatagagatttgtaattctgtacgtaattttgtatgtaagaatatttattgaaaatttaaaaaaaaaaaaatcagtaatccattgttcatttcattattattatcattattatttggtatttttgggattgaataaacagtttgttggaattttattgggtaatggttgaaagtgtaaataatattagtgagggacaaaatatctgacaatggaaagaagtgtttcaatcctttgagtagctgtttttaaatccacctttcatttttgaaaaataattctggcttatattttggggggttgtctttctttgagcctatttcacactcattatcttttatttctgacaattagagatgaactttggagaccttgctccttcactggccctattgtttgttttgttgtgtggtttagactctactctgctgagattattaccatcaactggtctcactctcaagtctcaacccaattttaacaaattttatttatttattttcatggctaccttagaattatcatattgtacaaaatataggaattaatcgatttggaacactaagaccttatttaacttttcatataataaatgcacaaaaatcctcaaatgtataattacaaacaaacacctcaaaacctacattttacaagtactactagggtgatttattattcaaatatcccaataatcaataaactaggtagagtttttattttagcttaagatggataaatgagacacgtggatggtaaaaaaaaataaaaaagaaaaggggtttaaatttgttttgactaaaaaaactaccaaagtagaatgtaccccacatgtaggctaaaggtcctatacaaaagaaagacatgtttacaacgtggggtcgtattcagatttttctccccactctaaaaaatttgggaattgaatgaggctaaacaaaagcttgaattgggttaaaaaattagattaggaaaacgatagaagatggtcacatgtttgtggaatattatttaaccattgaatcacatggccttgatggctactagatagcgtctcacatgccctaacccatttactttgttgttaccgaaacaatactttttattactcaaaaaaaaatacccaattggaactttaacttgtcctttggaacaacccttgacttggaaggacaatatgggtcccaataaatttgttctctttgtgaattattaacccatttaccatactttcaattaccatttaatgtttctaaagttcaaccattttactaccctatagaataatgctaaggcgtgtgtgtgtgttgtgttgtgttaactttattagttggtaaagtatttgtgacaattatggtggttggcttcatcatggttggcttcatcatgttaaaaaaaaaaaatacaagactagttagcaattaaaaaaataaataaattaacaagattcaaatcttcttagtctcataaattagtataacaattacaggagtattggatgatagtgttgtgttgtattactatacttgctcttcggtagtttttatgtgaattgctataaagatttagattactctattaattgttatatgaatagggagttaaaatgagctataagtttaaaaaaaaaaatgggttcttactataaaaataaatggtatttttataaattattaaaaattatgtatattttttaaaaagtatcttttttatttggacccctaaaataagtgggccctaagcgcgagcttagcctaccttagcctagggtcgactctatatgtaagtttttacatagatttccataaaaatacaaaaaaaaaaaaaaaactaattagaaatgtaaaaataaaaaaattatttctgtatttttacggaaatctacatagattctcatataacaaccaaccgaacaacctaaattataatcaaaatccacttaataattcacataaaaatcaccagaacaacccaaaccgtaaatttaaaagaaaaaaattaaaacataatatataaaataattccctttttcttataaatacgtcaaaaaaaaaaaaaaaaaagattagcaccaaaatatgattattatttttttctgttgtttgcttacatttttaagtttttttctcctaaccagatactagtatcaaattaattattttaaaaattcatgttgtagaaatggttaccagaattaatttttgcattactagtaataagataccataacatgagatgcttattaaagaaattatcttttccactcatcctcaacaggacttgaaatctttactaaagtacgattgattatcatatttgcaaataaacagattactaagcgagctctccttgccttgaaagaagctagctgatagaagaggccatccatgatcaagagaagaaggaacaagtgcatctcttcttgttcatccaagaaagaaagattatatattattcatcaaagaattcaatagtgccacatgaatttattttgtgttcaagtggtatggagatgaagaaatgaggcacatttcagatgggtagccattgctaacacgaaaagcatcattgttaattaaaggccaaatggaagtacttagcaaaatcatttcttgaaatgttgagtactatttggagataggagggattgagcactacacctcgagtcatgcgcttgtgacactctcgaccctaatgctcgccggtagcatgagcgcttgatgagacttatctgcgagtgcacttccattgcattcgcgagcacatcaagctagctaatggcaagcacctgcttgaaattttccccttgcgagaacaccttgaaggatccttgcaagtgcatcattgcaacattttgggagcataatgtaatacatgtcgtccccgagcagatgagacacaacccacgaccgctctcatgatgagcataagctcacagggttgagctgatcctagacattagcggactagatttgtgcttaggacctacactttttggggcccaaaataaaaaaataaaaaagtctcattaaatttttatttaagtaaaattaagtatactgtaaacaataaatatttacagcttagttagttgagatgtacggtacattacacaatagtgagagttcgagtcctataaataaccttaggcccatatatttttaggatcggccctaactgagcatactgaacacttgtgttcagttataccttgaaccttgctttttggcctggtcatgaagactagagtatccatccaagcacttgacagtccatccaatggttcactccaacagattaatgcttggtgagatcctctcaagtattttgaagaagcatgttcaaggcaaaggcacatgataaccacatcacatcatcaacaagccattaaacaaattgaaaaatattcacaagttatttggagaaatttggttaaatctgattttcaattcaagtgcaactataataaaaatatatagtggataaaaccattataaaaactgactgttatttactttatcattctttctcattttgtagagtcaacaatattattaccctaaaacaaattaaataattcaaaattaaacccagtaaagtctattctttctattatttatagtaggtgtttattatccagtgtgtataggtaacttcatctgtcttaacaatacatgattttgtttgtctagataaaagtatttctctcaaatttattattatttattataaaataaatatataattactatattatcattgcaaaaataaattttcatccctcttttatcttgtgacattcatattcttaataatatagtataaaaacaactgaggatcatacacctatatcattaaatttcaataaataaaattatttattgtatctcaacaatacaattaaaattctagtattattccactacgaatatgaaaaatagtcttaaattattacataattatatttactaagtttattaacagtagtcattgatataatttgtcgtcctattatcatttcataatttgttgtcctattattattttattcttttaattaaccttttattttttaggaccattaattcactaatagtagttaattttttgatcatatcacaaatttgcatgcaacatcctaatactagaattaacacttaaaaggaaattgatattcgatgtgttaggaaacaaaaactgtataaataaacaatgagacttctcaataatccatgttactgaattctcaaaataaaaattgaaagtattcagagtgaattaaataaggaatttttacaaaaatattagattttggaaaaagtttacaattttactattatacgaaattttttacgaaaatactatctttttataaaaaaaaacgtaaattaacaaaacataacaattaaaacagcagtgaaacaactaaaaataactgcgaaataaggtaaaaacttaacgcagtacacagtataaaacttacacaatatttttaaaacagtaaaaaaaataaaaagttaaaaattttagtatgtaatgtaaaaacccattaaataactttgtaacaaaaacaaaaattcatgatactcaagatttatactgaaactaattcaacatcgaaataatataaattaactagaggtctctataataaacggtcatttcgcctgaaggagataagataaattaaaaatactatccttaaattgaaaaaaaaatgttaaatgcatccaattccaattcaagataatagtacaattattattattatttcttaagcaaaatacaagacaatatttccatatatgtataaataaactagtggaatttgcatattttatggatttttatacaattactataaaaatattattatttattttcaaaaaaattattttatgcaaaaaaatttaaaatatgagaaaacagtataaagtaactagttatccagcaccttattttccctgttttttcttttaactttttttttt

SEQ ID NO: 188803 - DNA, 1738 bp, Cannabis indica
gtagtatttcttatacataaaaaaattatataatgtttaacttacgttttgagaagaaaaaataaaatataatgtacatgtataacttgaattaagaattatatatcttttttcttattttgtcctttgtttttttcgttttttttttttttttttttgtagtgatgaagaatttaatgaaaagtaaattccttcatctaaaagaaaaaaaaaagataaagtagcaagccaaactatggctaaacaaaagtgtgtattacaactatcaaattttagtcgtactcacaggacaaaggcaatattattaggacatctctaataatgtgttaaatgagaggtataatacatcattatattttgatattttcccaatttagggttacaactcctcatctaatagctagtactattaatatgagagaatttgcactctttttagtaatattgttgcgtaaaataaaacttagtgtaagtgtacactgtcaacaataattattacagtagcaagtaccaaatgtcatggactacttttatgcttctaattgtgaaaataaactctagcaaaattattaaagtgtaaaaaaattaaataaaaatagatggtgatttagatatgggcaataaataagtaattaaaaatagaaaaatataaggagcaaactggaaagatattagtacaaagtctcagatatgagatatcaagctacaataattatttctctaatatgagaactcaggtaatgatagtagattatttttctttttattattgaagtgtttatacataaattacattacacaacctgtgattcaatcccaagaacccccacacaaaagcaccctcccatacccgctatggtcacttgacctaacctcaaggggtatagtgatgctagattgaaattgcaacaacataacatttaatagtcaagaattcttattgatttaacaggcttccatcgaagtcactccaatcttttaattaaatcacatatgtttaatataattgaacttcaagaatacaagtgtaaacatcaattttatagaattatagaaggtaataatatatatctatatcactggaataataaaataaaaactttatcatgttccatagaaattgtgtgtcaattaaatcaaatctttttaaaatttaatatcaactaaattatttacaaacagtgatcaataaaattacaaagagtaagcaagataaatatttaaataaataaactttatattgcattaccatcaatattgaagtctcaagttaataaaataatgactttctctctctttgatagctctaataggatttcgcacgatcttcagtttatcaacttaggccatggcgggttgaggccttctcactttttgatagctcttataattcaattaagaattatataaaataattcttgtcattgactttttattttcatttgtctttttgtttgactgaatgaagaatttgatgaaaaatcaactcctcgttccctaaatattaaatatctaaaatttaatattcatttacaccaatagtaattgtatagggtggtatactttttaattttttttaagtatttcttatcaatgaaaaaattatattatttttaacttacgcctaaaagagagaaaaaatatagtaaaatgtacatttataaccttaattaagaattatataggttttttcttttcttgtctttgtattttttttttttttgagttgattgaagaa

SEQ ID NO: 188804 - DNA, 1947 bp, Cannabis indica
gagatgtgattttttatgaaaatgtatacccctttaaaagttcaacacaaccacagaacatcgactagtttttttccaaaactgagactacaaatccacaaacaacaactgagatcagttcaactcaggatcaacaacacaagaactcttccaataacaacctggcttttgaaataacttgatcccaagaccacaattccaaagacactgcaccttcacctacaaatcttgagctcatacctcagtatcaacctatacctgatactacaatcagaacaagatcagggcgcataaagaaaactccaacatctctcaatgattaccaatgtgccacaaccagcacggatcaccctctagccaattttctatcttatcatagattctcgccccactttcgagctgaatactctcaataaatcacattcttgaacctacatcctataaacaagcttccaaacataaagtttagaacaatactatggatgttgaaatcaatgcactcgaaaagaaccatacatggattgtcgtcccattaccaccaaatcaacatgtaattgacaataaatgggtctataagaagaaatataaacctgatggttctgtagaatgttgtaaaacacgtttggtagccaaaggctacactcaacaacctggcatagactacttcgaaacctatgcacccgtagccaaattcaacactataaaactcatgtttgcccttgctgccatcaataattggcaccttcatcacatggacatcaacaatgcattccaccatggggaattacatgaagatgtctacatgaaacttccacaaggatataaacccaaggaccctatcccacctaatgcagtgtgaaaattacaaaaaagcttatatggtctcaaacaatcttcaaggcaatggtacgccaaatcgagttctcatttattacaacaacaattcacccaatctccaaatgatcattctctctttattagacaccaatggggtgtttttttggccatcctcgtctatgtagacgatattattgttgccacaaataacacccctgccttaacccagttcatcacaactcttgatgcacgttccaaattaacagatcatggtcctctctatttttttctcgatctagaaattgcacgatgctctaaaggcatttcagtgtcgcaacgacctttcacccttcaattactcaaagattctggctgtcttggctcaaaactagtttccactcccatggaaccaaacattaaactcaacaatgactcatgggacatactacaaaatccaactcaatatagaagcatcattggcaagcttctataccttactatcacacgacctgacataagttttgccttaaacaaattaagccaatttttacaatcccctcgacaacctcacttgactgcagcaaccagaatattacactatttaaagaattctccagggcagggcctatttttctacgcatcatcaccatcaccccttcaactccaagcctttactgacgctgattggggagcatgtctcgacaccagacaatccatttctggctattgtgtattcctcagtcgttccctcatctcctaaaagtcaaagaaacagcccactgtttctcgctcctcagctgaagcagagtaccgggcaatggcaaatgctgtgtgaactaacttggatcctctccatcctgaaagacttcaacatcaacatcaagctgccttcaacctttttttgtgacaataatgcagccatacatatttcagagaatcccgtctaacatgagagaaccaaacttgtagaaatcgattgtcacatcgtccgagaaaagatcaacaatggttcccaaaaaatgaaccatgtccgttccaaagccaaccttgcaaatatactaacgaaaccactctttcctgcttcatttagagacattttgtccaagatgg

SEQ ID NO: 188805 - DNA, 904 bp, Cannabis indica
agtaagttattgcatttcttttatttgttgctcaagttttcagagcgaacaaattactgcattatatacaacatacttttttggattttcctctgatcatggtgtattgtgcagggaacacattctcttctatgtaatttgctaggtgttattgaggaggtacagatggctcagatagagcttacgaatttgattcagactaacttcttctctccatctggtaaaatatattttcataacattccctctcctccctatccttcccctgtttttggacttgggatctagagagatagtattgcattttgttgcctgtctagtaacacaagggaaaagtcaaaaggggaaaactagtcacaatcacattcagcctttgatatcgaggaaccaaatggacatgtgaaaatgattgcatttggaccctgatactctggccgaaatgatttataaacttcctcccttttccatttttgtcacattgaagatggatgagtgttctgtcctctaattatctactttcctttgtcatgttttaattctaatctagtaatttccattatttggatgctttttaatcatatttgtaatttgtctgaaaggatttaaatctgtctctagctcatggtgctgcaagaggttccaattgtttatttattatcccaattcatgagggaataaataaaaagtcaacttcagtcttggatcagtcaaccgggaaaactaataagtctggcttgttgagtttgtagataagagcagtcttgctagaaactagaaatacgttctttcttaaatagttctgttttatgcattatatacaattataaaatctgtaccagttaccttttttttaattcaaaaagtacatgttagagctggtttgacattattgctattttgttgt

SEQ ID NO: 188806 - DNA, 4015 bp, Cannabis indica
ttacttccaaacacacccttagttttatgtaatttcaaactctttatatacttaaatttgagattctcttaatcttatcccctcccaactaaaatcctctaagtaaaactcttacaccaaatacctcataatagatcagcctatgtctcaattatttttgctgtcatgagaagttataagaattgatccttttttagcttcaataaagtttgtagtttaataatttttgtaaatattttgtcccattaattggtttcatactacacatattttgttatttcatccttaagttttaaagatatttaaagttacatctttaatgcttcatcattctctatcgttcttgtgattggaattgaccatcttcctaaatgagctgtataatttatgcatctgataacgccttttccagcagggccgtcggggaaatcaacgatgctgatgcttcctgagtcgagatgaaatgatcccatccattcctttgacagattcaaacagtgcaccattagtgctatgttaattgaaggatcaccaaccacaacaacaactctatccgcttcatcgtcactagataattccttcagcagatatggccatgcttcctctgattgttcccatacttctgaaagaaccgtgtcctcgaaaccacttaaccaaccgagctgaaaaggcggaatcacactggtgtcctgtgaaaaggaaaaagaatagtgaactaaagagaataattcttttggcatagtcatatgtaaaaattaatccaacatcttaaatttatttctcctaatttattttttaaatctgaccaactagtactactgaagcttattctatcaagcaaataaatctagaacaaaaaaaactgtccaatccattggtggtaaagcatgagaactgaatttggtcaaatttcttaaagcatcaagttgagttgagatatttgccttatttgatttctgaaggatgttttcaacatccaggttctctgtttgcttcatttccacataccgaggcacacagtcagctcccaaggaatctgcagcttcttgtacctacaatcaactcaatcgatgagacacttgatagggacttgaatccatttcttatgataataatgacttgagaaatgaagagttttttactctggagatggcattggctgtttctacacaggctttctttggactgctaataatagaactaactttcgtatcaagaagcagctcagcaattttctgagactgtaatatatcaacagtagtagcacaccagattagatttagtaaatgtaatatatacttgtcaaacacacaaaccagatgtgtacatcatatacctgtataacaccaagcatgttcattgatttatccccagataaaggattgctagcctgttgaaaagtgaaggaaaccttataacatctatataagagattcccaacatgatttacaaatatatagtcacatgatgtactcaaaggtaattattctaagcttgactattttcattgcagtatttgcctaaaataactaaatatctcacttttcaactctgaatttacctttactcacaagttgatctttatagtaaactgaaattttaaactcatatacttgagcttactagtgaagaatcgctcacaactaacaatttaacaccttaccactcaatttcaaagatagatacaatcttcttagagaacaaaaaacaaaattcatttgtttcaaacgattggatcacataagtgaggaacataatatgacccgaaactaggatgctattttctagttactcaatttcacacctctgcattgttttgtgtgaatccatgacacacaagtatgatcctcttgcttgttttccttcctccagaacttccaccgacaggtgaatttggtgtctgcattatatattatattcaataccacttagtggacaacttaacttgtgacctacatagtactgaaacttgttaactgcaaccacaccagcaaggaaaaattagagacagagattcttaaatatgtttgccaaaaactcaaattgtcaaatcacaaattcatggtcaagtttaaccaaattaaaccactaagtttagaaaacagaatatggtacctgatttaaacgatcaagacaaacaaacggcgacccaccctcaattcgtggagtgaaatccaaaacactcactccacaattgctctggagcaataccctgaaatactcagttcccaaccctgaaatgtggataaataatttaaaactagtaccaaagccacactcgaaaacaagaaagactgaaccttggtacaattttatcaagaattagtaccaattgcagttgaaacaagagcttgattgacagcattatgagcaaccacaagaacagacctcccttcatgttcaagtatcttgtcccaacaattccgagctcgatcccataactctctcaccggataatgcccatcaatgttgaaatttgcaggatccacctgccattgtcgaaaagtttccccgaatttcgctttcccttcatgctttaaaagcccctaaaatactcaaaatcaacaaaattagaagttttctctcatttcccaattcacaaaaatgttcatagtactataaaacagcttacttgaaaagaatacaagtcgatttctctcaagtccatatcagtaatcacttcctcttctcgattatcccaaataatctcagcagttctcttcgaccgttcaagaggactaaaccaaccccaaaaaaaaacagcaattaaccatagaaaacttcaagggaaagattcaattcaattcaagaaaaaagaaaaatccaaaaccttgcgaagcaaacatcgaaggaatcatcaatgagcatttgtcttgagatctcagcttgaccctctcctttcttggtgagaacagagtaattggagctcccttgaatccgaccctcttcattccacgtgctctgtccgtgcctcaccagaacgactcgcttcgcggccttgatcggcggcaacggcaactgcgagtggaggtgaagtggggtctctacttcttcggaagaggaatgttggtggtgttggggggttgaagaggaaggagtgaaacgagaactagggttagggttttgaagaaggggattggtgaagaagacgatagaaggagtcagagatatcatttttttttttttgcgctctcagttcagtttggttgaaaacagttatttcagttattttctatggttaccgttgattctaacgtgataaaacgacacgtgcctaataactttgaaacgcatcgttttggagtttgtagatttgtgttgatttgggatagtaatttgtgttggagtgttgtgtttaggttgtaaatttactgaaaaactacagttactaacacgatttgtgacacaaaaaaattataaaatacgaacacaaatatgaatcgaataaattttgtgttgccttggcaagttgtaagcaaattgttgtttttagtgtttattgtgtcgtgtgaggtttttgaatttagtttaaatgactgacacgaacacaactcgtaatacaaaaatattgtcgaataagaacacgaacaaaaattgtgatacaaaaaagtatcaaaatatgtcatgacctgaattgctaatcctaatatttgatggtttctttttatcaagttattaaagtaattgtaatgggcaatactcaaaataatttaattgattagaataataaaaccgagaatataattgtgtgaaagaatttaaaattaccccacaagaaagtaatattatttccacaatgataatattataaaggaaaaaaatcttgtactaaacatggaaatacaagattatatttagtttattgtaatgataatagtaacggaatcataaatataattacaatgtttgatttatttttaaaagtgatgtaatggacttacaatgtaatgatgtgtaaaatctagtgtgatttcacattgtacatgttgtacctggtttttactgttttgacagt

SEQ ID NO: 188807 - DNA, 2977 bp, Cannabis indica
ctgtagaagtataaataatgtagtttcatttcagacattcagttaataatgttatgcaataaacacatagacatttagaaatattagaaacagggttatacttgcaaaaaattgaaatcctgtttattacaaatttccatcatacaacatgaccattgacactccacatataattacatttataaatttgtcaaaaaagaatcttaattttattttttttgttaaaaaataaaaaataaaaaataaaataaataaaaaataaaaaaaaagaaagaagaagaagaattttagttaaacagtaactgcccaaaatcaagaaattgcatatttactttagaaattaatggatccatagtccctctgtaagaagctgcaaggccaagcatcaatcccacagttgtgctttcatgttcctaaaatcaaagtaagcaaagtaatttccaggattaaacatacaatggcaaataaacatatatgaccacaaatatgaacataaaatattacatggggcggcaacccaaaaaatacagtatgtatatatatagtaaacttgtatgaagtacaaaacctgattgtaatactggaaaatatctgtaagacttaaaacacggagatatccgtgcaaccctagtgcaagaagtagtccagcatgaatagcatttggctcttcaggtttgttgtatataatccaggttcttgacattttaccctgcatacaaacaacctccgtgtctctaagaaaactcaataaatgtaatttacatgttattaatatcatgtacatatttcacagcaagacaagtgagaaaaagaattaaagatagcataaacttgagatcactaattatttctaaggaacgaaagaaattttgaatgatacgatactacaagcatcagcagaccatttacagaagaggtacacacatcaaagtaacacactcatcaccaaggaatttgagaaaaacaacactttttcaaatttgtaaatatgatatatctacatcagataaagaggataaacctgaagtggggccagcctcagtccagcagccacagcattgtgaaactcaggccaagatttaagttcttgtatatttctcacggttgggtccagattcacctttccatcaaaaaatcacaagtacaatgaggcacagatgagacaaggaaaatgtgaaaatgaaaagcaaaaggtacaaattaaaataatatttgcaaaaacatttatggagcaaagcaaaatgaacagccccaggaaaggattgttcagaagtgaatacatgggcatatattagagcttggaaagcaaaaggtcaaataaacaacagacactaaccagtttgttacatgaataagttaaataaactccaaaaattgcataaaatgaaaaaggaaacaaaaaaaaaaactcagactgaaaaatcacaaattgacctaggccaaccttaatattttgaatgacaataatggattccttaattctatcttgttaaaacaatcttgtatttggagacattttggacaagactttgaaaattataaatagcacttttatgacctgctatataaatgcaggaaaaagaaaacccaactccgcacatagaacaaaaatattcagaaggacagacaaccagataataagcatatcacgaaaaaaaatatgatttgaacatacagttgcattctgttgggcaggcaaccgacctgctaaaacaagctttgggactgcaaacacctgcacacaaaatcccatgaacatattacaaaagcgaaaacaattattctagttatgcagaacatgcacacaagctgaaatacctccgtcaaaagtgtatatattgttccaagagtaaatgccccacgccctagaggaagggaggtagtcctttgcgcaacatgccataatcgagccttcacaaataccaatttgataaccagaaaaattagagcatataaaaaaaatataaaagaaccaaaactaaacatgcagatttaaataagatgtacctgctgaaggtcctggtcagaagcactgggattaacagatgtttgaatagccacaggtcttgcagagcataaaaggcgtctaacctgatagaaggaaagtaactttaagcttgaaaatacttgaaaaagaaacaaaattcagaagacctatttgcacaccaaaggaaagaagtatacatctgatatgatgacaaagatacaccctgactaacaataaaatttactaacacagagagcatgtgatgctggacaaagacaaccattaacagtccaaccgcaccttcaatcaaaaagtttggtgtcatgttaagccttcaaaatcataaaactataaaagcccagttttgatatggaatccatatcctcaggtgtcatgttaaaagctactactgaagatatctcagcctggggatatggaatcttatcaagacttacattatggccagtggacactagagatataagtacgcacgcatatggaatattggtgacaaacatccaacataaagggaaggagaaaatgaaatataggcaactaaaacatgtagaaaacatatgcaataataatattaataataattttagcaaatctattcttcatcggtgcttccattctgttgaaagagccaaaaattacctcattcaatcgtaaatcacgcccgtaacgcaactgtgtgctagagttgaaaatatgctccatgccatctgtcatagaaccatcaatagaatctgtatcctcaaactttgcaccatctaatctgattgaatcagacactgtggaaggaatggttactggatgcaaatggagcatgtacggtgtagaaatagagattaaattcacatttgtttgggtttcaaactccttgaatttgcatgatcgtgccagacatgacaaagccaagtcctctcgaccaagtaaaacatatgcagcagctggccagtcagtaggaggacattcccgacacttatc

SEQ ID NO: 188808 - DNA, 5099 bp, Cannabis indica
gtaactgtaatataaacgtgatgtattatcattgaaggttttttaaaatttcacatcatacattgtttgaatttggtggagtccagatctgtttgttacagatctacatttcatgaatctggatttcgatattagggggagttgttttgatcgaataaacagaaaaaatgtgtaatttcagtttcttcacagtttttctgattttttttttcgcattttcagtttagatcattgcaggtattcttttccagttgattttgccagaattaatagttgtatttttctcgttttggtttcattttggttgctttgcggttttgaaacgagcgcgtattttcatcttcatggttcgctctgtacagctgaaggcttagtgcatgtggtatttttgtaaatatttgtatgtggactgtataaatgtttaatgggccggcccaaagtatttttgtaatttttttccttttttgtatttttttgtttttttcccaaagaaaaacacatgttgatggcatgggagtaattcctcacctaaaaagaggtcaaagttcaccaagtcaacgatataaatagaggtagaacctccttcttcttcttcctaatttcgtttcatattttctctgtaaaaattaaaattaaggaaaatagctatggaagaaaagcacgtagctttcgattcgatcccagtcgaggaccaagagatcgccattaatgctcataccaacaccacctccaacaacaaccatggctgggagaaggttgttccaaggcgtcagaggaagaacaaaccctctgctgcttcttccgattcgcatcccaataaactcaccgcttcctccaatggttccgttcccggagccgataacgtgttccgttcactggagaagaattcagaggataggcgaaggagaattgctgaagctcagatgttggccaatggtgctgatgttactgttcctgttagatcgaagactcgttctgatgatgcggacgcgtacgatagtgatgatgaagactcggcggagaatgcgaaggttgaggaagttaagaaagttgtgaagcctaagaagcctaagaaacctaaggttactgtggctgaagccgcggctaagatcgatccggatcacctttcggcttttcttgttgaaatttcggtgagatttttgtaatttggtatctgatctactgaattcttttggttcgtggcggaattcaatctcaatttctcttttttgatgttttttggtttatggataggcatcgtatgagtctcaacaggagattaggctgattcggttcgctgattattttgggcgagcattctcgagtgtgagctcggcgcaatttccctggatgaaattgttcagggaatcaactgtggctaagattgccgatgtgagtttgagtttcttttctcttttgtaaatatttgttgaattttcacttttattcgatgggatcagatttttcgttgtgacattggttccaatccccattttatctgcatgcatccgtacattgattaatatactattatatatatatatatattttgggttgtattgagcaattgaatggaaacaaagttgggatctttgattagttttcatccacagaatgtgaatgatattatctgatcgttaagctatgatatatgtttatttattaatcatgaaattgcattacccttcaaagggtgaataaaaagaataagcagaagaaatagtcaataccattgaattaatttgatattggtgtttgttttatttttcttataaccatttgcccttaaaaaattaactttgcaagcttttactgtccctaaagggaatatcaactttgggaaaaaatgtatctggtgcctagtgataggaaacactttgccctttcccaattctttttacttgttgaaaacttgggtggtcttagattcttttctatattatcattaatagtgcaacattattttctcctatctccacatgggctgataaaacagttcttattctttgctgaattttgtaattctatccgaatagcaatttctttggcttttgtcggtgccaactgtaggaatttcctgaatcctttgtttgcttactaaattgattttactctttttcttttacagcattgttaatttgcaggacctcagttacctaacctatgtctattcttttctacaggtccctctttctcatatatctgaagttgtttataagacatcagttgatttcatcaaccagcactccctcgaggcacttggatcttttgtgctgtggtctttagagagccttcttgctgactttacaagccatcaagctggtgcgaaaggctctaaaaaggctgctcaacatgtttcatcaaaatctcaggtatttgctcaattctggaatgcttattattttctttatttgttaatctctatctctcttatgcttgttatgttaaatgattcaagattattgattccgaaagttagattcttggaaaggtttgtcagtcacagacactataacagactgttgtaggcacatgtgccgaaaaaagaacacaaatagtttggtccccaaaaaatagtgcctaagctaacattttaaattttcatatcaccgactttaaagttcttagactaatgctagttttttctaaaaacaattcatttcaaattctcatagtctaatatgaaatgaattttgctggattgtcaggttgcaatatttgtggttgtagcaatggtattacgaaggaaacctgatgtcctaactagtttattgccaaccttacgggaaaatcctaagtatcaaggacaagataagcttccactcatcgtatggataatgctccaggtaagctgtgaaactagaactaatacttaatggatctttgtttctgatagattatttctggccttcttctatttacctacttatttatgccgttcccacactttgtttctcacattgtataatctattttccccaggcctctcaaggagatctggctgtaggtctgtatggatggtcacgtaacctgttgcctttagtcagtggcaaaactaataatccacagtccagggatctggttttacagttcgcggagaggtatttgagcatcactgctctagtttttttcattatattttattttttttattttttttttttctgattttttaaattcttgtcttaaacttattattctcttctcatttttggttccaggatcttagctaccccaaaagcacgaactattttggtgaacggtgccgtcagaaagggggagcgtttgattccaccttcttcatttgaaatattagtgcgagttacatttccaacttcgtcgagtagagtgaaggtgagttcacattatctttttggttggggagaattatatgttctattcgttcctttcttaaatgttgtgctttcttcaggcaactgaaagattcgaggccgtatatcccaccctaaaagaggtagctcttgctggctcccctggtagcaaagcaatgaagcaagttgcacagcagatacaaagctttgcaattaaagcagctggagaaagtatgtcatgctacccttagcccttttttttttaataatattttatgaagaactgttgcttatattggatttcgacacatatcttttccttacaggcccaccggaattggccaatgaagcatctggaatctttatctggtgcttgacccaaaccgctgattgttacaagcagtgggtgagctattttactccttacattcttacatttttccaagattttatttttatttaaccaactctcctacaaaaactgtgaaatctgaatctgaacaggacaaggtttatcaagacaatttgaaagcaagtgtatctgtcctgaaaaagctctctgagcaatggaaacaggtgtctgtgaaacttttccctcttgattccttgagggaaactttaaagagttttaagaaccaggtaccctactttatcctttatattatcaatctgttcccaccttatgatgatgatcttgcttatgaaatattcacctaatgatttgcctaatcatattaaagtatttagcttgtttctgttgttttcttttaatagaatgagcaggcattggctaatggggtcgatggtaatgaacaagctctcttcaaggaatcgaacaagtattgtaagcagctattgggaaaggtatcacgtggccacgggtgtctgaaaagcattgttgttgttgttcttgccgttgctgtgggcactgctgtcatgtccccagcattgagtcatggaacttggagaaactgtcgttgctcgtcaactcctacatgccccattaagctgaataatacccacccaaaaaccgcagtcggtggttcaaatcatcggtttctaacagcatggacaacaacaacaacaaaaaaaagtagttgcaccctttaaatcaggtggcggaaatgagaggttcatgtatacttttacgactccccggtggtataagaaactagaaatagtataaaaggttaaaatactggttggaaactttgagatggtttgtgccattttaggacttttggttcttctgttcatttcctttttctttttctttggaacccttttaagctattcacctctgacatatatagtttcactcaaaaattcaaatgagttggatacacatgatgtagcttgggatttggtataatttaaattcgaaagtaatcttatgacatttgacatgaaaaatgtcactgttttttgccaacatgtacttctgtatatttggttttgcttcaataaccacaattaaaacccttattgctgaatatttgatattgtagtatatttacttgtccatcattcatgatttttatgttcgagattatatttcataacgatatttgttatacttataatattattcttgtttaaaaatctttattattcgaatttttttaaaaatttacaagaatgattttgtaattataataaatacagtaatgaaaaaaaatatttgatgtgtttttgaacctaataagaggttgatattagcactccgactagtgaatcagaaaatattagatttactgatcataaata

SEQ ID NO: 188809 - DNA, 1950 bp, Cannabis indica
tcctcccttggagtttttcctttctacgtatcaaaatcatcaaaccaggttctttaaaaacaagtgcttttcccctatatagaagatctggagggtttttctacactacttatcgacagtgattcatctcacttatgatcatgaagtgagctcatgcttaagcaccaatcacataggcaataacccactacacctcaacaatagtttatctcactcacaatagatagctttaacacacaaacttccaagtttttcaccctagtcacaaagagatcaatgttggggggcaagagcagtcaagcttagatagggtcaatgaaatttcaaacatcatggcactaaaggtaataattaatagttatgcatcacccaatgttctaacaaaatagaccttgaaaagagtgggtcactccctaagagatcttaagccatgcaagtaggtcatgtatgttttcatgcgagctgacattgctcctcatggtaaaactagattaccaataatagtcgaaactaccccatgacaaacatcactatgactacctttatagtgattcacaccaagtctccttggaaggtcaagaaccaacaacctccaagccatctcacttatctaccacatttctggcaacttctcgacatcagctggtatagattgtctccttggcaaccaaagagttgaatgcaagtgttacaacacatctttgatattcgccaataggacctcctcaattgttccgaggggatgaggaaggcctcctttgctatgattatagctaaggggaagtggatgacctctttcattcgtaagataaaccaaggggatgtagaaaggccccttctgttgtgaatacaacagaagggacaatgaagagctttaaggtttaagaccaaggaaaaaatagagattgcacctacaatcactctatggttcacccaagatgaggaagacatcactccatcttgggtacattaccttgagagttagtcacatccttaattgaccaaagaatatccagcgactccaataacacattgttgacaatcgtcaagaagatctcctccactgtaaagcttaagagataatgaatacctcctctgctacaatgccgaggggatgttgaaggcctcctccactacaaagttgaggggatgttaaaggcctcgtctactgtaaagctacaaggatgttgaaggcctcctacgctgtaaagctaaggagttgatgaaggcgtcctctactaccaaaccaaggagatgaacaagactaccttcactaaaacatagttgagggaaagctaaataacttcaaggctacaacctagcagaagacaaagaatacatcaatattcacataaaagaacagtatgacaatagagtcattactaaaacaagagccaaagattagagaaagtgttgacagtccaatgttgacacatttaagaagtatctcaaatcaaagaaaatcactcaaagggtcatcaacttgaaattttaaatccttctactcaacagggaatgaaattttgaaatcctactctcaattggagtgcttgaaaaataaaaaaaaaaaaaattccaagatttttaaaattgatgcccacctggtaattttaagataaacgggcttagttcacatcatttagttaatctcacacaaatgtaaagttgaattggggggggggggagaaggtgtttacacaaaaagtagaccttgatgatgtggacatcaatgtttgacatgtggcaagaaagatgacatctaggagttcagtagtcctgagtcatagcaggctaacctaggaggggtccctagccctacgcccaggttgacattaggaactctagaatggaagttcaaatttcaataacttgaatccaactaacaatattttagtattttgtaccatatatacatggatccacctaatccaagctcaagtagctaaaatt

SEQ ID NO: 188810 - DNA, 815 bp, Cannabis indica
ttttttttcttttttttgttaaggatcgatctataatagcatataaatcaattactttttactaatatcatagttcgttcatgcttattattctctatatgtgcctatatataacttagcagcaatatgactctcttataaattaattttcttttcatgaattactataaaaatagcatataaacactcccaaagtcccaaccaaacaacaagaagcacaaagcataatttcactattaatctagcacacactcactactcacacacacacatatatatatatatattcaattaataattaaaaaaaaattattttatctctcatctctaaactttgttacttatatatgattgtatttctgtaatattagtgtcgtcaaaaatatcttcttacttttatcagttaataaaaattaagatttttgttacaaaataaaactattttgtccccctcaattttgttacttatatgattgtatctcttataatattaacattgttaaaaatgttccattaactttattataaatagtaaaaaattaagatttcagttaaatttttcataaattgggctggtaaagtatgacatggtggacaaataatatatccatgtatttgcttatgtggttgaaaaaaaaaaggtaattaattttaaaatgaaacttaatgaaaatataacaagactaatttataatgaaagttttatttttgacataaaaattatatttgtaaactaaactttctaaaaaaaaaaaccttgaaacgaatttcaaatttataatgaaaatcctattttgacataaaaattatatttg

SEQ ID NO: 188811 - DNA, 2304 bp, Cannabis indica
aaaccttcaataatcatatgttggattggagcccaaccatttggaaaatccctgttttttttgtcacaagaatttccaacgaagaccgagaaagttgtatttgttagaaattcatatcaattttaattcatcgatttggttttgataagaattgttactagggttgtttagtgattggaagaaatcgagaaataacctctcacgtgcaaaattattgaagagtctctttaagatcgaaaaatattaatgaactcgattactacctattttagcttctaaaaccctatttattagtttaaacggagttaacaattttgataatatattcaattccattccttcttggttaaattcctataactccaataaacgaaatacacatatatttatatatataaccaataaatatataaccaataggaaatagcatagtacgaaccattgttgtcctgaatttgtaagagatgtagcaataccagcagaatgaacaagacctgatttttgaagacttctcatgactttatcaaccactacaccatcttcatgtaaataaatgaaaaaaatcagtataaaatcaactaatttgagtgtctcttgtgttaagttgttaactaatctattaaggaaaaatttcaactttatgtagcaaattgcaatcattacataggtccggtcctgagcataaacaggctaggcctgtgtctagagacgcccaaaaaaaaatttcctcttagaactacacatttctttattaattttaaaaataccatatttctttctacgtaaaggcttaaattttttttcctatgacccactaaaattcaaagtcggcccaaatcatgtttttcaatgaagaattgctagtaagattttaatctatgagttcttccttttctactaataaattttccctatgttcaacccacgagtcccaaaaaaaaatcttttaaaaatatatatttttttatactaattttgaaaatactacatttctttctaaataagagcctattttttttttctatggcccactaaaattcaagaccggcctagatcatgtttttcaataaataattgctagtaagattttaatctatgagttcttctttttctactaataattttcaagaaattatattgtatacccactttttattttttattttaatttttatcttttttttattactctttaatatatactcaaactcaatgttataggtaaggtctgtatctctaatatgtgcattagagactctaattttaattagctatgtgaggttatatttatcatttaaaattattttaaagttatatttaattaatatataataaataaggtagttctcaacttatcccgataattttttcttatgttcacactcttctaccacaactttgagtttgaaaaatcagctcaaataacataagtcagatgaggaacaaacctgagtgaaatgattcaatccataaaggaatgaaatttgaagcaaacactttctgattctggttcctagcttcccatgtttcatttatctaagtgtcaaaagagaaatttaagtaaaaccgaaagttaccaagccttaaccccatgatagattgaagtaaaataataccatgcatttgctattattgctgagccagtaatcatgccattgccctgtcttttcgttccaaaacacagattctattgccttctttctaactcgagaagctttcgagaatcgcttagagattgtgtaatctcctgtaacatttgccaagaaggaaatatcgagttccatctaaatcgaaaagtaaaacacatctttgtcacatgctaatcgaaaaaaggaaaaaaaaaaaaagaaaaaagtagatcttcgaggattcttcctcgaagataagaaataataccccgagtatgaatgcatttaaatcaactggtaagattgatgttgtagccaatgttgtaaaatcgacatggtgcctgtataggaatcttgtcaactcattctataaacaatcacataattaagattagttttcacctcatccatctcgtactaaaatcccatccagactcagcagttgatgcgacctcgcggtaaaacttttgtttcttagtaagagatgagatatttgaagcaagttctttgtcctaattaagaagcaaaatataattgataactaaattgttatgattatcagctaaaaatagtaatgtgaaatgaaatgacttacaagggtggaagattcaggcctgggcttattccacattgcataatatcgagttaaagtatgattatgagcttgatcaccgtc

SEQ ID NO: 188812 - DNA, 869 bp, Cannabis indica
ttcattttcattttttttttcaaagatcttttgttacttctagcaaacaatatattgcatttgttttgtaattaagaaaagtttctggagctgtagtttgtagggtgcttgcccaaatagaaagaggggaaaaaaaagaagaaaaaagtggtaaaggaaagggttttttttattattctttttttgtgaatgtgtgtaaacaaagttagcatatctggtttcgattaattcactttcatttctcattattttattcaatctaaatgcatggtttggtttgccactatctattgcgacttttaaagtatgcaatactaatatacttaacacagatatgttttatgtaacatttcagattgatggtattgaatttattttttcgcaaagtcagattgatggaattgattaaaggcttgtttggaacatcacataaatttgtgcacttcccactcaaatcacatttcacagctcacttaaactattttcttctttaggcataggttacaaatggatgactatgaagtatcatacttaatggtctaaggattagcttaaaaccattccttcacaaaaaatcttaatctcttgagatataatttgcttgaggaatgttagttatatggaattagtattctatgattactttctcttagaagaaaatagaaaagttttaacaataaattcaatcattcgtattaattggtatgtaataatgtacttttcatcaaagaaaattgaaaaagaatctagagacaatattggtatacaaggcttatttacagattattacatctagtccggggcaatttgagaccagaaggaatgacatgaatacaaacttcatttctttttatatatatatttatata

SEQ ID NO: 188813 - DNA, 1492 bp, Cannabis indica
gtaaataagaaaccctaacattatgggcttgtgctgtgggctttttctatttttcttaagatttcttttcttttgttttcggaattattttaaaaatataccaaaataataaaaaaaaaagtacggtttttttttacgttgtactcttgttaatttgttgtcgattttttattatttgaatattattttttgttgttgttttgatattatttaagtgttattttcatgttacttttattatttttttttggttattttctatattatttttatataaaaccgtaaaaataattaaaaaaaaaaaacaattcaacgtaaaaataataattttttaaaaaaaaaataggtgtgttatataattatccctttctttttccaaaagatattgtagtctcactagtaacttctacataatattaaaagatagtaatcaatttattcaaaaaaaaaatattaatcaaaaaaaagagataaaatacattattaaaaaaaaatctcctctatctacatatataagcaagaataatagaagttataattggtgtattatagatatatgctcgactcaaatacgattttttatcaaaaaataaaacttaaatataacctgtttataaacagattgacacaacacgatacggcctgtgtaacccttttataaacaaattttatttaaacatgtaaagccattaatatactagtgatatcttacacttttatgatatatttaacacatttataatttgttaaagtattaaaataatttttgtgcttttaaaatagtgacatgtgacttctcatactttacaaattagcccaatatggcctagttaaaagcctttccatgaggagaggttcaacccagatgaaaggaagggcccaagtccatccaaaagctcataagactcgcgttcgagacgaggcttatctcgacctaagaaagtctccaccttcattgtgggacggaatagtaaaaaccttctggatgagtgttaggacacatccagaaagggtactctccaagaggcacctcggaaacttagtataggatgatgtggctgccctcaaacaccctgtaccatcgaattaagatttgtctcatgtgtcagagcataagagtgcacacactactaataggaaacctcccttttatccaacgacacaaacctggcactacagtacatatatgcagcgtgcgtcagacactcgtcaaggatcacgtagttggtatttcagctcaaaggatgtttattttgaagcttgagggactctataagcaatttggacgtgccgatcgaagtttaaacacctagaacaaaaaattccattttgacaccattaatgatagtacaccggaaataagaaagacgagttccatccaaggtgtcaaggttattttcttgggttgatttgggttatgttgagctttgtttcgcattttatattagtgtgtaatgacatctgtgttttagttttaatgatttttgtgcaa

SEQ ID NO: 188814 - DNA, 2655 bp, Cannabis indica
caatttttatttcagcccatgggcttgccacttgggatcctggcacaaagctgaaaatagattgtccttccgtttgacttcttcaacttaagatcttcggccaccatgggagctcaacaacagacttgcgacttctaaatcctccttggcaacgatgcaaagggcagtgacggttggtcggggctgcatggacggtagatggggaacgacaacaatctattctccaccatcaggattttgccttgaaagaggtatcgaagttttatcttctaagttctctccaccaacttggttttgctttaaaggaggttctcaatggagatatagcagagaaggtttctgatattaaacttgaagaagccaattttagtaggatttatcaaaaacaaagtgaattggtgtaacaaaagatgatggagaattggcttcaaaggtcttaataatgagaaacattcttatattccattatatcgagaatttgtttaggaatttcaagatcccctcgcaagaaaaggactcttgatgaacatgttgatgttatgccctgaatttcgaagttgcatattactgctattgatttgtggtgggtggctagaaatgaaaatatcatcaatgacgcaaaggtcgtaagggaaattttgtggaagagggaggaccatatatgcaatgcatacatcgcttgcaaggaaaaaaaaagaacaagaagctctgactaccttgctttagtccatgtcattcatactgccccagatatggcacatgtagttgagagtggtggtttgggacctttgggtgatgttgtggctgttctttgtaaatcgttgcatacaaaggtacccaagggttttttacttggttttttggtgccgcgaatgtcgctcattatcgtggagtggctctttttgtgttatgctagtgcagttccaatgttggattttcaatagtgggtgacaaactcagctgtttgttgtcactctacgacaagaagaaacttagcttataagcacaaaggctattgcacttgaggctttacttcagcctcaactcgttttcttgatgaatggaggtcaaatgacattggtcgactggtgttttgagcaaggctgcctagttgcgtggtggtgtttctcttactcccatatttcatgtttagcatgattgtgtctttaataagccttgttcttccacttattacattgctcccgtggctcttcctagcaatggggagaagagcagtttattaacttggtattctgatagaggacaagccaagcctgtgataggcgagtttggtctcattcactttgaggacaagttgaaattctgcctgtataatgttagactccatattagtagggtgtggtagagtataggaataaagcgatatggctcattgtattgagagtagtcttgtgtgagatttggatagtgtatatagaggtgagtagcggttagtgggtatgcaaagaattgcgtaggtctctatttgcatcattgtgagatcctaggtctctcgaaatgcctaggccctttcactgtatatctcttttattgcaacattcattggctgcgatagactaatttcctactgtttttcctaactgcttccattttattcttgtcttctactaactactattacttacgggttggttcacatcaatctgaggggcagcggattttggtgaattgttaaaagagggtactattgagtctctgagcctactatatttatatgagaaattcaattggacaagcattgtgatacttttgggaaagcacattcgcttgatgtttacccaaaaatttgacctgatgacatggacattgtttttgacatgtggcaggaagaaaacagcgttgagccccacatctcgaatagggcggtgccacctgcacgttgggcattgacccagtgcccaggtgagcactaggggacacccaggtagacacttgggtcatgatgaaactggaattaagattagaaaactcggacatcttggaacaccacctgggtgcccagatgcaaatgacttaacaaccatagcaaagtacatgagagacatgccacaatttgtagaaatattagatagacatgttttaaatacttagcgtgtatggtacaactaagttaaggttgtaagtttattattattttgttcttgatttttagttttctagtcctttgtattaagtctatatataggccattcttttatcaatatattaagataaaattattctcacaaaaactacatggtatcagagcatttgttgtctaaattagggtttcatactatgaggtccaattttagagaatcattttagaatgatcctctattctcacttctgactagggagtttaccagccttcgatgggcaaaaccctaaattttggtgtccatcatagtcgcgcgtgggctccacgcatcacctccatccgctgcaagttttgccatcggcgttcgctccatcgacacttcctggttcgactgtcttttcatctggggttgtttgacaatttcttcaaacagctgcatcttcgcctagtttttacctcatatagttttcaatggctacttaatctcagcgattcaatatcattaaatctcagaaatctctctcaaactcatgaggtactccacccatgcatca

SEQ ID NO: 188815 - DNA, 4430 bp, Cannabis indica
  modified_base (42)..(42): a, c, t, g, unknown or other
taaacattagtggcagctccagtccggcaggaatcagcaacntacttgcacagggctacacagttaaagaaaaattagacaactcccaatcattgcactggaataccatataccaagataaaaaagagtgctttacctgtatgcatttgctagtataatactcagttacgaaccgatgataagtccagcccagagaccaacagcaacacataagaaaagttgcctgtgcagagaaaagaaaatattttagcacaacaaagaaagacatagacaagcaacacaagaaagttttataattacaacttaccagttatgtacaactttctgtgttccaaaattgaagatggtgaaggtagatggaagggcaatccaactaacaacagcaattccaatagtcatcagagcagtagaaatgattagctgcttctttaacgcgggttcaatttcattcacgttctttatctcgaagaaatcagttgcgaagagggtggtgagcaaacatacaaggataccaacggaactgataatgagaggatatagcatagcagtcagctcgtgattaatcccaaaggaggagatggaagcaacaacaagagcagcacaagaggactcagcatatgagccaaaaagatctgatcccataccagctatatcaccaacattgtcaccaacattgtcagcaatgacctgaagacatgaaagttataaatataagattatttatgtatgtttaaaataataaataaaaaagactaactattataatttttaaaaagaaaaagtgagctaatgcttacagcagggttcctcgggtcatcctcggggatgttcctctcaaccttaccaacaagatcagcaccaacatcagcagctttggtgtagatgcccccaccaactctaccaaagagagccatggaagatccaccaagcccgtaaccagttatagcttcaaaaaggccttcccaatcatcaccgtaatacagcttgaagagattgatagtaataaaaagaaccaatagaccacttgcggcaaggagaaatcccattacagcaccagacctgaatgcagtaataaaagcctttccaacaccttttcttgcctcaagcgttgttctagcatttgcataggtagctattttcatcccaaggaaaccagaaaccactgacgtgacggcaccaagaataaaggaaatggtgctaaagacagcattagcaagtgctggcttgcaaactttagtcttgtcataggtgcacggctggctacttgtgctgaatccctccacagagccaaggaaaagaaaaatcaagacagcaaagattgccatgaaaatgccaacatactggtactcagtgaaaaggaaggaagttgctcctgtacatccaatcacatacattagaacatttcaagacactgtagtcccaatagccacatttcatgactacaataaacggtaactttattttagaaggccaatacttaataaagcatgaaaatcaatctaaaaacatgtcattggtgaaaggcccatcacacgactttgaagtataggtaacttgagaaccactagtaactttacacaaatatgtgaattataacataagatatttgcaactttactggcatctagcaaactgtaatatatatcacataaaggagatcagaccatcaaattatttatgtttagaacatgggacggatttcttaagacaaattctcccattaagtaggaaaaaaattcaaatcccagatgcgattctacatgtcatgttctgctatgaaaaaatcatttgataaagtacaaaagtattatagcaggcccatgaatagtattatgttttctccacgagaattaatgtttcaaatatatataataatttatatgtataaaataataaggatgttaagtctttagtggcttaaatgctgtctgatcctgtatcgaatcatttaacattgtataaaaaccttataaatccagggaagctcaaaaccaagaggcaatatcaatacattctagaactagtacctcctataagttggcaaaagctagaaacggggaaccccacctattatattttaaaaagtttcaaaatggtagagcccgtctaaacaaagatcttttgtatctaagaagtaagaagtagtgcagtcgtgcttaaatgaaaggagcacacaaaattcaaaatgaaaacaacccatacaaaatttgcaaatgataataatttatgtagtaaaaaagtagagaaaaatacaattacgactcaatggacaaattttcacttgcgtgcagtaattatgcatacccatgtacagcattaatataatatattaaaaatgaaaaataaataaatagatctgaacaacaaatttaaggtaacaggaaacaagatacaattacaataaagaatcaacgtcaattacaaaacaataaattttaatggtggaccccaatttcaacaacagtgacgttctcagatctaatttacaaaacaaaattggatagttcgcagagctttcgagttgttcaaccattttcttatcatgaggtacacaaactcttatattattatatataaatatatgtaaatatcctaacactcacaattaaaatatatccaaacaaaattaatgaaaccctaaactaatatcaatttaagaattaagtcgaatgcaaagaaaacgaaaagacaaataacaaaacgacgtcggatctgcagccaaaaaaaaacatgaaatgaactcaagaaaaagaaggagagatgtaaataatgaaccttcagatatggcgttttggatttcagcgcacttaagtacaacgttgtggtcgttaagtccttcctcctcttcgatgaggtgatcggcgtagccattctttccgttgttgtgagcttctctggtcgtcggagagagcttaactttcgataccaaataccattgaagcaacgagaacgcgattccgaccaccgcgcaagccggaattaaaatctgcgtcccaagatctggcagaatcaccgtccccaacatagtcgccggaaaattcaaccctcaaaaaaaaaaaattaaaaaataaacagagaaacgaaagattcggagatgagagaaacagtgtgtgaatatatataatatagatatatatatagatatggaagagggtggaagaggggacatatatataggtgagttagagagagaaatgaagacgatgagtgagggcgtgtggttaaaatttataataaataaagtttttgttacaaaaatataaataataaaaaatatatgttgaaatatataaataattcgaaaaatataaggagggagatcgagaaggggatgagggaacagtgccaggtggcctagatctgattgcttttctaattaaataaaaaacaaagataattttgtaattatgaatgtaattttttgtaatttgttggaaaataacgtttatttttagtaattgagaagtaacagcactgtccaatacacagtcaattttggcgtttcatttttccttattttagattttgtgtttggttcaactttttttaaaatatttaatcctttcaattcagttacatttgggcttaaatttgtctaatttaagaaatcaagtagtgattataaaacgagtctttcatgttgttaaaaaaaaaaaataatatatataatatatatagtaatttgtggtataaatatttaattttaatttttagctgtaataaatttataattttagaactgtaactataattcttcattgctagaagtcatgaatttttaatttctttttttaaaaaataatttatatgtactaataaagaaatgacgcgtggataatgacttgacatttaatgttgaggtcataaatataacttggctattattttcgctaaaacttaaatttaagtatttgctactaaaagttaaatttaaatatttataccgcaaattactctacaatataatatatattagctataaatggaccataatattgttgtcacaaaaattgttgtagaaaataattatattatcctttctctttataacgattgaagaaagaggctgagttccaaatattagtatgtttatttttcattaaaaaaatgttatcaaattatcaatgtatgttttattgaaaaaaacaaaaatattatgggtgtgataaaaataaaaaatgtaaataaaaaaaaaatgcattaccaaaatatatacattttttcttctaagaaaaaatatacatttttattatagattaaattacattgttataatatttatttaattattaaaaatctattatgtgattaaagcttggtagctaacataaaaaatgtgtttaataatttttttatattgaagacaaaaaataaaaatgttaattttttttttattttactttttttttttaagttgagaagagagaaaa

SEQ ID NO: 188816 - DNA, 2049 bp, Cannabis indica
aaaattttaaaaaaagaaaattaaacataattatggttaattttattcaatatatcaaaatatctagtatttttaaagagtaaaaaaaaaattttgtacatagtttttttaaaaaaatgaaacattattattttgttactttcataagttttttatcagctaaaataataataatttttaaaacctaataagaaataatttttttagaaattttttaaaaaaataaacaataagataataaacaatatatttttatttttaaaactatttgtacaaaattaaaattaaaatatgtattcatttcaaaaaaaaattaaaatatatattatttcaatgtataacaaacttaagaattttctttaaaaaaaaataataatcatttactattatatttgcaaattttgaaaatttcaatatttgttaaaatagtgattatttattcagattaaaagtaaatttacaaaaaatcacaagtaggggtgttttatattgatttctcaaataaaagcaatttattattagctaaataaataaattgaagttgaaaaaattaaaataattaaaagagtaactaataagtgattgtagaaaaaatattaaaggatattcatattgctgtgtaatattgctattggtgtcacatattttatttcattaaaaatttaggaaaactgttaattagttatgtagcatcacaatatagtagtattaggtaatagtggccaataacaatgctggaaaaaaaaattaataataagatgatataatccaacattttatttgcattttaaaagaacaaaggtgaattttaatttttaattaattttatggaataaactgaaaattgagttgttttaaatattattgtgaagaaataaaataaaaggaattattaacgtttagttgacagccgccaaagataacgttggcaaatagagttagaaaagtaaaaaccaaactgaaataccaacttttatcaacatagcaaatattacctaagcttagctagcgtgagactttggacttaacaactcattgaagattccggttcggtcacaaaacccggatctttctttctctctttcatttcctaacttcagcccaatccaatccaccaaccaaaccataaccatggaccaaccacattcctcccccaaacaacccattttctccgacaccgtcatcgtaaacggctccatttcgcccttaacgttaactgccgacggctttctccggtggtcggagtctggtcaaaggggtttgaccgtggagaaggaggttctcgggtttgcaacggatggtcccaaaatcaagatcagagccctcattgaaacaggggacagaatctgctgtgcgccgagcaggggagctctggttaggaccaactttgtattcgagtttatgtctcaggatgctcagaggctcttctgccacaaacttcgtcaatacatcgattctctcggtaatttctctttctacatgcatttatataaaaaaatatatattttttctttagttggctcggctttccatgctgtttggtcgtcgggaaagtgccgtaaaatgaaagaaaactggaaagtcttaacttttggggttcgcttgattagttggttttgtaggaaaatttaatactaatcatcaactattacgaacattgcattatcaacttcttttttcgaaactcgatcaacaacttatgcacagataatagtgaagtgatgttggattaattatattagtgttcctttaatagtcaacccattttatatctcgacttaggagaagaatacgaagttgttcgaattcaaaatatttagaattattcgtttcttttgattcgaaaaaaaaaaagttgatgggatttcaatgaatggtcaggccggcctaagagagtgtttgtgtttgtaaatccatttggtgggaacaaatctgcttcaaagatatatcttgatgaagtgagaccacttcttgaggatgctgatgtccaatttacattgcaaggttgggatttttactcactaaaccatccatttcctatgtaataaa

SEQ ID NO: 188817 - DNA, 3084 bp, Cannabis indica
atttattttggtatccaaaataaattttctgtatagtatagttatttaaaacatcctataaaattttaagaaattataaaaaaaagtaaatacactgaaaatagggttctaaacagtgtattgcatgcgtaactatttttattttatacgcgtgtgaaatagactgtttgaacgctactcatattaaataactatatataataaaaaaaaatagactaaattttttttcaaaatgctgaaacaagtcaaatatgtacaagtgtatcgttttaagggattgcattctaaaagcaattttttaattattatttatatatttatatattataataaatacataatttaaaactctaatcctaaatttctaacctacatccattcttctataactataactataactagttgagctaggctgaagtagattttgtaagaacatccattaatatttggttaaaataataatctcattaatgaaaaccaatggctccattaaagtatatgaaaaacaatatataatatgtgggcacaaagttgataagaatcggaggcttgcactttccgcactcctattacctgacttaaaggcccaacatgtgagaaagagggaaagattctctgcttttccactcaattttttcattttaatttaatttatacattgaaaaattagttaaggtaattaaagattaaatcacaatcacaaacaagactcatgtgggttccacttgatcaacatcgtccacttagagtgggacccacaagatgaacaaccaccctattaatgttatccacatgagattttttattttttttgggatggagctcactcggataaagaggtggcaagacaacctggacccgcacattcctctgttatcatctgttcatctttgacctttgactacccacttatatcacactaattgcagacaattcaaaacctaattaattcacatctactttctcaagtacccctcttatttttccaatatttccttttaatcactacaattctctttttttacaatttttcccaccacttctaataaattattactattgctacaatatttagggttaatttttactttctaaacttttttaactatcatttcacttgcacgtaactttttcagtttggtaaaatcttctaaattattgaattgttagtaaatttaaaatacaatttatttttcacagttaactactaacgtaaagtgcttatatatacactcttgtacacgtgacacgtttatattaaaattaatattattatttaatattaggtgtactaatataaacgtgttacatgtataagaatttatatacaaacaacccatattaatcgaataacacattaaatttgttaacatttcaataattaaaaaagttttatctttaaaatttaaacttaaaatggttaaaaataaataaaattataattaactttttatttagagtttttatttctaggatccatgtttgagtccgaccttgtaacatgaatgtaccaaaatgaagccaattatcatccatgaatagtaaaatatccattaggttcgagaagtgtgtacaatagagaatagacaatgctaaaaggtttctttttggtcattaaaaattaagataaaagatctaaagttctttttactattgaaatttccttatcaattttcttcttttaatataaataaaaaaaactccaagcacttttcatcttccatttttcttatatgtcttttcgaattatgataacaactgtaaagatttgttgaaacgttgaatccaattataactccactttccattttttcaattttatacctcaataaaaattaacctctccctaaaaagaaaaaagaaaaaaagagaaaattaaataattgcttaaatattattaaaaaagaaaagtacaagaaaaaggctttgtcatcctgttgatcactcttatttcttggggtcatcaactttgaaaagattacatgttaaagattgagatcttagcacttttaattaaaaatggttggtctttccattcaattacgatgttagatttgatttgccatcataatgttaaattaagcaaatatgtatatataatgacataacattatttttcgagagcattactttacatgagataattgagaagactgcatcttaattatttaattgttacttaattcactaacgatatagtactttcttaatttgacacatttataaaagaaaatatatgtcgaacaacactcgaagaagaaaaagagatcaaatacaacactactagctagctagtaggacagcaagaacaagccaatgctagttgatataggagaataatgtataggtgagactttttgacacaacacgaaactgatatgagttggagacacataaacacgacccaacacaaaaaaatatgtgcttaagcacgacacggcacgatacgaaaaaatatgagttcaagcacgacacgacataaaaaatataaacttagacacagcacgatacaaagagcttaagcacgatattgcacgacaagcctaaaagcacatgtaagcacgaatagaattagttcgaaaacacaacacattaaaatgtctaataatttaattataataacaataataaatatttatttattaattaaaatatttgtaatattcactataattattataattattttttatataattgcatgtaattattattgaaaaaaaaataattaaaattataaaatacacatatatttaagtatttagttcatcaattataataaaaattaaaatatagagtatgaatttgagtccgtataaaaaatagattgatctatttaagaataacaggtcggtttgaataaaatactacacgaatccgagcacatacgaaattatcgaacttgcttattgtatcgagcctaccctataaaattattgtatgatacggtatgacccatatttttttatagcacgacataattcatatatttcatggcaacgtctggcacaacttatattttttatggcacaatttatattttttcatggtctaatatgacacgacaaatattttaaaaaa

SEQ ID NO: 188818 - DNA, 5213 bp, Cannabis indica
agagagagagagagagaggaccacatacattaaatgaaaaggacaaaaaccaaaacaatgtgtatcctaatcttactaaacaaaggataagagccaatgtgaccacacagaagagccctacagatcagaatttagaagcagaaaatatattagcagaagaaaactcacaagagacacaagtttggatttggtgaaaaacaggtactccagttgactccatcaaaagtatagtatgagaaatcagcctactatttagtcaatgaggaggagaggcaagctaatgtaaagtatcaattagaagaaagtgtcatatggaaacaatagtttcacaccaaatgaagtataaacttgtttaatataactgtccaataatgataatattgaaagagaaaaaaaaagaatcaaagtgttttagtaacttatttgatggggatcccatatgggcatccttccattgtttcacactagcaacatcaaaaacctcacatacaatttgagagaaaaaatcccagaagaaatatggggagaagccagcaactttgcaaggcattaaaaagtaaaaaaaaaattaaaaaaaaaagaaattaacatcctatctcttttttttttctttttcaacagactaaggctggcttgtcctggagaggcatgcaacttcctgagtatatattccgcaatctgattttacacctcaatcgaatttaaagaaacgaacctaaacttgagcaataaagttattaaaaaaaaataccaaaccttacacaaaatcccttgtaactgcattcactctgaatatgtatacttcgaatcaaggaatccctgttagaactatatcagtttcctcataagctgaatatcttaataagagagacgtataaattcacaagcttcagttttgtttctctgcacctactatcacctcaccatgtatccaaacaacaattctcctatgtagcagttcctgaaaaagaaatatatacatatgtatcaaacaacaaaacaaaagaagtgagataccatgagatagcattgtattgtggttaacatcagaatttacaatgtagaagaattgacaaatgtaaacacacagcattttctctgcataatcatcccatgtcgacagttgaagaaagtttttaataatcggataagacagataagtttaggtcgacatgaagttagaaaaacgtaaaccaataattttatctagctccagtttgaaactgttataggtctttacatatatacccgtgataaacttttccctaaactcataaaatagctaaatttgtatgatagttcattgtcacgaattaggaacaataagggatgacagattctaactttttaggaaagccacacaacctggtatgactacacaatgcatttccagtcagtaaatgattatattcaaatttgggattcttgtttctgttattgccatcttttactaataaaaccacacaatcaagaacaagaccaaaataaaagagtttacctctatttgtctgcctactagtgacattgtagctcccaatataatcctcagaactcttggctgcaacatctgaagttatgttgccaagcccataaccaaacgtgctagaaccatccaggtcaggagtggtggagcgccaagttgagtcgccataaactgaaccactacgatacagatccccgtaggacctctcataaccaacagttgatgttgggtatgatgacgttgtggtcacacctgtgctaccatttcttccgtaacccccctctccgaatccaaagctactatctccattcccgtaactattgccactataaccagaaccactaccaccaccttgagtagaaacaggagcaggtccccaatttgctccactatttccaaatgaaacaccaaaactcccatttccagagctcaggtaagcccctgggctaccagggttggtcgcattggtaatgctcccatttccccaaacatttcgagtagcggagcttataacagagttactcctgccattactcgcattatacccaataggggtattgtacctatttgaattgccagtgtagtatgggcttagcatccgtgcataaccaagactgttgttaaagttggaagttgcaccatagcttgggctcaaccctggctctaaattcatacccattccataaccagaattgctaaatggagaaaacccacttcgaccgctagaaattggactaaatctgtcatccatcctgaccccaaaacctccaaccgggctaagattataaccctgagcataactgcttaggaagctatttgccctacccaaactatagttgtatcctatcagaggactccggctaggtcctggggaaagctctttgggaactgccctcttgacctcaaccattttgccattgagttcatgaaacgttttatgcagcactctgtcaacagcttcctctgagtcataagtgataaagccaaaacctcttggcctttgggtgttgtgatcatacatgactacaacatcagtaatcataccaaattgatcaaaatacttcttaaagtcgctctctgtgacagttgaagccaaacctccaacaaagatctttcttgtgcgaccaggaccgggagagcagtgaattccgccaacatttctgttcaaaatatgttgatcatccttaggaacagctttctttgcctcaacctaaattggaaacagtagtaactgaattaaacaattgacttcatctttaatttcagtaaccagcaagtgttttagtctttttttccaatgcagattctaaacagctgatgctgcattaagtttcaaattcattgattcaaaactggagaaagagaagaaaaatttgttagctaagaattaaatttgacaagatcgtctatctctgaacaacataacttctagtcattttttaatacttcaaactaaaacctctaatcaaattcacatgaatccaatcaatacatagtacccggcataggattaaaatgaatgtactaaccgtacgtccatcaattatgtgcttatccataataactctttctgcaacaccaggatctgcaaaaacaacaaaaccaaagccccgagctcgacctgtagcccgatctctcatgatcacagcttccactacctcaccataattcccaaaatattccttaagtcgttcttcatctgtgtcccatgaaatcccaccaatgaagagcttgccaagatctgattccatctttctgaaatcaaccattgagattcaatgatccaattccattccaatactaaaaacgcctcacagaaaactataattcaattcaattggaacaaaacaaaacaaaaacagtagacaattcaatcaaaagaattcaaagaaggatagaattttcccagctgcagaaccaatctagattgcagaattacgtgggcaatcatcaaacaaaatacttcgcagataaaagactcaagcttttgatcataacaagcaaagcaaaacaatcaaaatgtggataatatcaatcgagcaaacaatctattaccttcttaaaatttagacagaacccagtggtgctccgattaaaaaacgaagtgggatttgttcaaattcaatctaggaacatcggatcctctgtgcaccaatcagaacaagacccagatttcctaacaaaaccagccaaattttctttttttttgtggatcagacagacccattaaaatctagatagagatcgatcaaagagaaaactttggagaatcaaaggaaggaaaaaactaccattagaggaggacccagatgagaaagttgtggaaactaagatctatgaagaggaatatttgtaatgacaacagacgacgtgctcatagtttctctctccctctctctctctcttttctatctttcttggttattccacttatattattaattaaatataaaaaatacaaaaagaagaaaagaaatggaatttgaagctgtgatgggtaagatgcaatttataaatagagagagattggcaaatctcgtgtaagaaaattggaggagccaactagagatgatgatctctacacatacatgaattacaaaaattacaaaatggtaatttgtctttttcaaaattgaaaatgaataattaaaaaaatggtaacctaaattgtccaggtaataaactgtatacacatacatatgtattataatttattataagaaatttacgtacattatttgatgaaggtattgcatgtgtttattttaatagaaaatatttctctctatttttgtgtgttatgtaacaacctacatattttggaccactacgtttgtttaatttaatttttttttccttctttttctttttataatattgttagaaacattaacagaaattaatttacatatggtaagaattaattgatttttaattaagaataaccaatcacaaataattggcacaattcttggtgctaattctctctccccgttggtttcatttaatagaggacctcaagttgaagtatcttgttatgggtattttgtggtgaccataataagataagcaaattggccacttattttcttattatatatatatatatatatataaatgtatatatatagagaatatattaaacatttgtcaactttttaataaaggagcaacattttgagacctcatcaaagcatatatatatatttgataattttgttatttatattcttaatttttattttcattatttgtattttttttagaaaagtttagattttttatttaataaccacaataagtaacgaagtcagatattattatcctaatttttattctcctgacgtggcatgtttacatggacaaaattagtgtcacgtggcagtacagctcaccaataggaaagccaagttagcacttgaacaaacggagactccgacacttaaacgggcatcaagtgacagactagttcccacttaagagctagccgaccacccttggctggctagccttgggactgcaccatagccggcctacttggcctcgacaagggcctggtcaaccaagagggtttcctttgcacttctacatgtggacaacaactcatgggctacgaattgagccctaatagcccaacagaatggccgaataatatctagattcattggcactttgttcttttgtaattatctaacaaactatgaaattatctagggatttaaactgtaat

SEQ ID NO: 188819 - DNA, 1983 bp, Cannabis indica
cccctctctcgcaagaaggactttactatagaaaatttgcagtatcaaaaggacctcgcaatattagataaaagagaactcccaatatcaaggaaggcaccttgcatatttagtaaagctgcagtatcattagaaatggttcgaatacaccaatcaacagaaataaatgtccatgcattcaggtgtcattaaaacgagctttacacttactttataagtgttgtaataaatgtaattaatatagttattttattaatatttgtaacagtctcattattaccacattgttgtaacctccacctactaccttgagtagggacttctccccctccattcaaaggaggatgggctcataaagaataaagataaagagcaatagtattatttcaaaagtggactaggtaggtcgagctcgaagctcttgctgaactactataatttttgtgtctatcttatattatttacatacttgtatatatttatacaatattctttgagtacttgcatgtttattattgggtattcaagtaacctttgaatagttgcatagattcagtgttgtcaaaattactttgacaatatttggcactagaagaagggtatttgtgcattattttttatgatttttggaggagaatcataatgtgacgaacccgatacatagagaattaacctctgttcaatcaagcacaaacaaagaaatatacacgagaaattttttgatcccagtgtattaagagatcaacgaaaatcaatagaaatctttgttcgagattatcaacaatactttttaaagaaacatgaagattcacatcggtagcacaatctcatcattccccaacctagaaaaaattccagtatcagcaaacaaaaaaaatcaaacattttcaacaaagaaaaatgaatcttagcggtagctcagatcttggagctgctcagccattgaagcatctcgacttctaatgtctttcaaaaaatcatacaacaacgataatagggagttctagaaataaactttttctattctacaacaatacgaggggcataaacaaaatggcaaagaaaacgatggtcgcacaatctcaaagacaatatgttgaagaatcgcattcaaaagttaaataagaagtcgaaatacatactaagcattctaatagcaacgatcttgggcgaaaagcattaacgaagagatcaatggatgcctgaaataattgcaccatcactaacatagaagagatcaattacaatcgaaacatgataacgacaatgatacaaaagacttggtctagaaaatttgaatagaagatgtcaggttgaaagaaaatagagacatctccaccattttcgcaacgaactcttggggctaggattgctcgacttcgctcattattggcagaagaagttgatcctgttctgaacaagtgtagtaacaattatagagatacatactgcaaaatggagattcacctggtacggtgatatgtaactgtgaatgcgaagagtataaataaaaagaaggctagtcgttgccatccaccttgtcgtcgtttttttgccagaagagaaaataatcagagaactccaaacaacactactatgtctcattgagaaatagcagcaatggaggtgccaacatagtaaaaacaaattaattttttcattaaataaaaatgcagaaatgagaatgtgtaattaagaagaaccgaaaaatgtatccaccatggtcattcccgttattcttcgaagccgtttcttttctcgtccccacgccccaacatagcactttgcttccgaccaacccaaccggcgatttccaacaagtctttcttcatttttagagcaagaacaagtctctcttctttttttttgggggggggggcagtcaaaaagtaaaccacaaaaaatgattgttctagaatggctattcctcacgatttctcctagtgatgtagcggagccatggcaattaggatttcaagacgc

SEQ ID NO: 188820 - DNA, 4968 bp, Cannabis indica
tcagtttttaaataatttaaggacattttatttacactccaaaaggtcgtcattaatgtaattttatttggtggggtccttggaatgttcacgaacttttggcacaggtcatacttaaagacgtagtctatacaatctttcttgatagtgggccagcggtagccttgtcttaagaccttcttagagaggcttggaatccttcgtgaatctcttgtacaatttgtctagtttcagggttcgaaacacacctgcctagggcccacctagcccagaggcccaaaaaaaaaaatatttcccttttcaaattatacaattttttaactgattttgaaaaatactatatttttttctaaataagggcccaaaataatattttttttctatggcccactaaatttcagggccggccctgcctccagcagtgggtgttttgtctcgtggctaagtacacatgttcttgggtgtccatcaaatcggtatactgagtatactaggaggtatagccttggacaaatttccagcaaagtttccttatataaataagaaaataaataatacattaaaggtataaataaaaaaactatatatttatctaaccaatataatacaatatgattttaaaaaatattttcacaccaaaacaaagtcttaacattatttcaaaaataccacacataattaattttattacttttaccaaatataccaggactttacaaatcatatagtcacaattaacatttattttatttttttttttaaaaaaaaaaacaatttctgttgtcgccacatttctacaattttcaacaaatattctatttagaaccaaaagaaatttcatttgagaaaaaaggaaaaaaaaaagcttgtaacctccaaaagtgtggcattaattcaatatgatgacctattcacactcaagactgactcagcttattagatttgggttttgaattgatgagaaaagaagaacgtgtgaatcaatctcaagctctcttcacttttaaataatttcatatcaattcaattcaaacactttagaacacaccattacaatattagtaccatttcatacctaatagtaataataacaataatatcttaaaaactctcaataatttaagacagagagatcacttgagatgagtttgcatgaatttgaccaagataataaaacaacaacactggaacagtgtggtcatccataaccatatccagcaataattttgacaaatagaaaaaaccctagtagtatatacatatgacttttttttttctctttagttttttagaaccataaatgaaaaaattattatttttatatatgtgggtttgctctttttacaactcatttccagtacttttgacagtttgttgtctttctctccaattcataaatgattataagaaaattgtgtaattttagaaccacactattttactcttccaactacatgtactaaaattaatttaatgtactaccaaagaaaactgtatatatcctttaataaatgaatattatgatattgatatatataatatcacaacattatttgccgtggtctctaaagttctcagcaaatttgcaggggtaattaatagaccacataatattttggatcataaagcaattgggttgagttgcatttaagggaaaattcaacataaaatttgtgttatcttcgagttttactacaaacccttttatcatatcatataaattatagagtaagtttacagtacacctcttaaaggggtgtttaggtagaaattttatctgttttgatatttaagaaatttttttagtataatattttttatgattgtgtatattatacttatttaagaccatatataaatttttaaaaaattaaaaataatttataataccgaaaacatgattcacatattttattgtactcctgactactttttttatacacatagtaagtaactgttccaaccttatttttgacattgtaaattattcggaattttctgaaaaatttacaagtggtctcaaatagctataacaaacgcgatcataaaaaaaaatggactaaaatttttttcaagatgctgaaacagataaaaaatctcccagaacaattctttagggggtctaccatgcatacaaaaatttcttaaattatattattaagacttaattttattttatttttcaaatatatataaattgcaattggttatagaaattatgctataattaatattttaaaatgttgaaaaatattatatttttgttagagttaaagcaagttaagttcaatagcatatctattaacaagtactcatacaagaaataacacatatctaacatcacaaaaccataaaaatacaattaaaaacaactaatatctataaatatatgtatattaatacacataataaaagctttgtattgtattacttaataatctcagtaatgaattgtttttactttggttggtagtcacgtacgtatgtgtctttaaaagattcccccaactatttttctcttcttctataaatgcccctcataactttcacactctttctctctatatcagttaccctcttttggttcttttcctcactctctctctttctctcaaaaatcttccaatggagaccaaccaagccaagctccaccaaaacccacctcaaaataccaaagaccttttccatggagcccaaatttgcttgagaattctcgctttcgccaccacattggccgccacatggaccatcctcaccagcaaacaaactattctcatcatcggcatgtccttctccgctcgctatagctactctcccgctctcaagtaagaaataataagtaattggtgatcagtgaagtaatccatatttttttttaacgcgagttgctctaacaatttcgttttattattaggtttttggccttggctaatgggattgcttgtgcattttccgcgatatctttcgtctttgtcgtctttctccgccgcactttcttcaatccagccaattactttttcttgtttctccatgatttggtacttttttttttaataactcgtgttcttataaatggttcaatatttttaaatattttcaatgtgggacactgtatactcttacattaactttttgtatatgtgtaaatgttataggtgatgcttttgctagtcctggcgggatgtgcggcggcgacagcgatcgggtacgtgggggagtacggtaacagccactcgggttggtcgccgatttgtgaccattttcataagtattgtaaaagagttacggcttctcttgcagtctcttacttctctgtactcttctttcttatgcttactattatttcagcttctaagtctagacaaattaaagtctaattaaaaatgttactctctttattaaatataaatattagtttttgttttcttaaaaaaaaaaagaaagtaaaaaaacaatcttttgtgtagttggagaaaaagaaaaggttgtttttaattatatatatatggagagtgttaattattatactaataaaaaaaaaggtgttctcttataatgtaatatgcattatctttttatttgcccatgttctttattttattttattttttttatctaatttatgtgaaattatgaacctaataataattttgctatctgtccttaaaataaaaaaaaaaaacaaagaaaatgtttaaagtagttctcctaattcagatctacactagtagtctttgactcaagttagctgaaaatcttgactttcttggccaatgtacaaacaaaaatcacagctttaccaatattgattcaaaatgtgtgtgtatttttttagttataaagaatttgaaaattaataattaatatgttaaaaagattgtcgttacaaaaaaaaaaatattatatttagttaaaatttatgattaaaagtaaaaaagttataattaattataaattattattctgtgattaaaaagttcgtgactgaaagtattaattacaaaaattataagttgttgtaattaaatatatttttagttataatacttgttgtgactaaaaataatttaatgacaatttgtatttaaatactatattttaatcacatgtaattttttattgtaactaaaattatatttaatttttgtaattaaaattttcactaaatataactgttttatagttgtgtactcccattatttgagttgatgaacgttattaaaagctatatattttcttcttaacaaaaaaaaaatatatatatatttatataattttctccctattatttatgggaggtaactcactccaactaaattttttccttaatttattgttttattaatgaaacttccacttttgtcatttttattgtttctttctacccttgaaagtaaatcttcaataatgaaattgaaaataataggattgaactaactacttatcaaacaaaataaagaaaaaaaataaataatcatttattatatgtaataataaatgatgatcttaaatggtactcaagcaaggggacacaaaagtccaaaaaaatgaaacaaagaaatatataaaggatatgtagttagatgggatgtttggtagtttattttgaattaagaagctacaataaataagctttagaaagagagaatcagtttgttttttcttaagagattagtggtaaaaatctgtatttataagacaaactagagtctaaagttttctttctcaccgtgttcgatgttgtgggctttataaggtgggcccacgtttggggccatcagggacccaaataaaaaaagggtaatttttagttatatacgtaattatcaaaaatattttacatataacgataaaaaataaaacatcctatatatgtatatgcttaccgaaaattcgaaaaaaactcataaccaaccgaaaaaaatggcagcccagaattttcaggcaaccatcgtttgcccaaaacgg

SEQ ID NO: 188821 - DNA, 611 bp, Cannabis indica
ctatattattctatgttatatgttctcatcatgtattctctcaattaatgaactatctttcagatgtgtaaaagaaataatacacaaatttatattatatatatgtatatacaccaacaatgtatatacttctagttctagctagctgggcatttaatattgttgtttatatattatatatctcatgaagattcttgaattgccaacttgaactctctcttttgtctatgaattccagaggcacccatcactcaactttatactttaaatgaatttattttgtttctgttgtcacaattgcatgtgaatgtactttcccgaagtgcaactcacgtgagttttatgctagcaagtcacaagaatcctttatatattatatatgatatattcaagattgcttatatttataagaaaattacaacagaaaaggaaaacacagtgccataaaaacaaacataattaaagctcttccattgtaagcaatatacatatcattcctctctcaaaattgatttttaatcaactacggcaggaaccattttatccattttattagtaaatctcatctgatatacgttgtatttgccatattatatatcagagattatttt

SEQ ID NO: 188822 - DNA, 4831 bp, Cannabis indica
cttaaaagttataattttaaagtaaggaaaatttagtttttcttcagaaaataattggtttggttactgattaaattatgagaatcaatatgaacataaatatttttatattactcaagtgaattctgaacctttaataatatccccaaatatcactgaaaaatatttgttattgtcatttttattgttaaaacactttattttattttgttaccaaaaatctcaaaattttcgaaactagattagatttttaatagcttagaataagtaaatattttcttcaatctcacacaattcccatgggtttgacctcgttttttacaatctctacacaacaataaagatttgtgcacttgcaagttgataaatgtaaaacacaccacttttggtactaatagatgagatgtctaaaaatccaatacatctaacatccaatcaagctaattagtatttttatttagtttggatgagtaattagattttatattgttatatgtaaaatatatatgtatatataaaaattaacattaattttttactctttttttttcttggattggatggattcaatttaattcaatatatactggacttaaatattagatggatacgatccgataaaaaaaaatactaagttaacatattgaataaactcaaattaaactaataaatatatatgaaatatattcattggatagaaccgatccaattcaacatccaatagatgttagatcgattggataactgaaattaattggatcggatggaattgtaaaatctaacatccaatatataattagatcagaataagtttaaaaacattaaatgtggtccaataaatatcgctaattaagttcattgattttcaaataaatatttaaacagtagaaatgtgcatttatcatctttgatttgaccgatcagttaacaatatgtctagctgtggaaatggcttaatataaatgaatgtcccaaaataatgtgtagctcatatattatttgtctttattgaataaatccctttaaataattttgtactttcacattgcttttaagatattcctactcctattcctaactcatcttcccttaactataataaatactcattattaggggttggaaaattttgggcttacattactctcatgaataggattataggattggtatgaggtttgtacttataacctttctataatatttatatttattcagtgaaaaagaattatataatcatatttacgtgagatgtttctcttatttttaaaggaaatcacaccaaaaggtttttttttttttttaatgaaatgtacctattaaaatcaaattagtattaatgactatcatcatcactattagaataaacagtgattttgtctttgacattgtattttgtaccataactttttggatttatcttcaagtactacttaaatattaattgttttcctttgttaaatttggtttatgttccctatttgaattttagggtggaactttaccttttattttgacctttgaccttatatttggattaggaatgttgattaaatctaattactaatattttatttatactgcatccaatttatactaagttcgaattttatattttagattcaattcaattcgtacagtaattcaaatctaatccacacaataatataacagtgtagattagatcgataattttaaatttgttacttttaaatattgaattatttaatattttcacataactaataacaaaaaaaaaattatttttgttttatatctttaataataaataactgactcaaagaagaaaaaataaaaattgtatacaaaaagaatagtttaattttgtttgaaattatacatgtaaagataaaatatacatttgatctataaaaatttaaaatatatttatattacatattagatttttaaattattttttttatattaaaatattatatatatattaaaatatatttaaatatgtgtgaatttgaatagattggttacttttacatgtcaatcaacatccaattaattcaatccgcacaagtacggatatcctcactttgtgaattagattagattagatcatgcaaattaaattagattgaatattttataaatacacctatattaaagatattgatacaccacaccatactacatacacttaataactttacctaaagcaagacgacacactaattaattatgataataataagtattgtttatacaaatatttttaataaaacctcctaaaatttgaccaaaaaaaacatctaatctttcatacattttttttttaactttttgaagtgttgtatgctttgattttagctcataaagaaacacaatatgagattttttttaatgaaaaacacattagagttcgtttggtatgctttattgaattttattttgtattatattatattaaattatgtggtatattatattttatgtaataatatattaaattttaatttatattaaaatattatatatttatatgcacataaaaattaataccaaacataatatacggcataaataggatatacctgctaaacatattttatatctttattacatttgatattttttttgttaaattttaaccgaatattctcttacttcactaaatattttcaatttttttttaaaataaattacttttaatcgtaaaaactaaccttgaatatgaactcacccaattataaatgcgaattactctctcccatcaactacaatgtgatttgaaatttgaattttcacattcaaatatggagcttgggagtatcttgaaaaattgatcgacctaatcatgtttttcaggaatatttatataaatgtgtgtgtaaacaaccctaaatccatattttaaagaaatcaattctaaaattacattgtgttgttctaattacattgcatttgaaagaaattgattctttagagaagaaaattgcttttagagtataaaaatatatatactcatataaatatatgttctacattaaaaacttaacaagttaaattctcttctcttcatatatatatatatttatatgatctatgacaatggccataacttgtacgaataagatgaatataaaaaattacaccagatggattttttttaaggaaaaattattatagataaatacactggacttcacggtcattactaataatgttactcgggatggttgacaggtcaaccatgccaaacacactgttggtgaaagcccacttaatcacattataggccgcaaaattacaaagtctagaaataagcgaaaaattacaactcaaaaataaattagaaagcatattacattggtgaatatagttaccaataccccaattgaaaatggttccattcaccgccttgataactatctttgagtcactctcaattaacaaaaaagtgtttcaataacacgaccttctccatggtaaactgacaagtcgcagcttctccaattaggagatcctcaaagttaagcttgttagtggtcacccacaaaatagaactcgtgtgattccttgccaaagccactctgcacatggaaccgcaaccaactttcacatcacaattgattttgatccaatcttctggagaaggggtccacctttgaggaatcacaacttccggtaaggaaaacaagacagacacataatctacgtaacagatggtaataaagtcaaaacactatttaaagttactcaaataattattgtgtatcttatggttccaagccttccacatcgtatccaccacaattgaaacatagagaaaaagtttatctaccacaacccctctagacttcaggttccaaagaaaattgacccagtcccacattctcgcctcagactcaacaacctacataatcccccaaggagaggcatgccacagatgggacgcaaagttacagaacaggaacaggtattccaatgtttcctcaccctccccacacagagggaaagagacatctttgatatggattcttttggcaagaatagcacagacgggaagggcattagaaatcatgctctaccagagaaccttatgacgctctaatactttagagttccaaagtatgttccacaaggctagagagacagagcacaaaggagctcgatccaaagcttaaactagataggcagacttaatagagaataatccatttgactccttggcctagacccatctatccctaccattagcacaaggcttacctccttttaaagcactattaattgttgcttgatcaaaaagaacatgaagtttagggatattccactctccattgtccaaaataagttctgcgaccctttaagcctcgcaggctgagaagtaataggcttagggaagaaatttgtgccatggataacccacggattagtccatatgttcgtctccttcccatcagtgatcagcttacaagcgccctttttaagaatctctctagatctcaccacgttctttaagaaccacgaattcgagttcttgcatgagaaattaaagaaagagctgcctctcaagtacttagcacttaagacctggccgcacaaccactgattttcattaaggagggcccaaccccatttagctaataaggactggtttatttccatggacttccgaaaaccaagaccaccttgggctttgggaagacacatgtggtccaggccttcaaatataagcctctattcctttgctcacaatcctactaaaaatctctggccaaaccgtcaatcttggaggcaagcttcttggacagtttttgaaaataatattaatctcatttaccaaaaaaaaaaa

SEQ ID NO: 188823 - DNA, 2939 bp, Cannabis indica
cagtcttctttatagggttgttgcagcagtttgtccaactacagtatattttatttggtggaattaaaatatttgtatttttgagcaaatatatttatgattttttatgtgaataacttaattagagttgctcttaaagcgacattattacttggtgataggagaaatttctctaaaagagaccaaccgatttttgattttgtctgtaacacgtaagtaagtctatcttttattgttttgtggatgattctttaaatgtaaaaaaaaaaatgagtagttttgaacacgtgtattaacctcttttgaccgaggaggaagtaaaatgagattaattacgagagtaaaagcagggtagttaccgtggtccaatttgcacatccccaaaacccaaacttcgtgtttgctttgcttaatttccttttgcgtagcgagtctccctccctcttcattgacactgcaaaactcaatagggttgctttctcctctagtctagggcttcattcgattcacccgccatgtatcgaactgcagcttcacgacttaggtctctcaaggttagtaccaacttcactccaaaattctaccgcttcattcaacgtctaggtggtttaagatccgtgtcgtgatgtttcatttccattatcaagctcgattaattgtgtttttaattagattatattgcttcaccacctttataattgattatatgggaaaatggagaaaaactagggaaatcaatttattagtgctgtgtgtttatgtatgctttggtcgacaaaatgaaagattttaatcaggtttattatctccgctgttccaaaaaatgaaaagaaaagtttttgggcgtgggatcatcgtaattttggcgagggaaatttttttctttttcttaaaggagaaaactcatttaagcattgtaatttttttttgaaaaaaaagaaaaacttgatatcttttaactttgtgtttcaggcaaatcatattatgagcgtttagtttcgttgttttcttttcgcataaacataataaactgtacaaattggtttttcttaaaagtgaatgctgactgcagtctgcactgcaatgccttcttattcttttctgagtagggtcgtgtggggagttcaggtgctgccaggtatgccaccgcaagtggggttgccacaagaccaacctcagggggtttctttagttggttgactggggaacgttcaggttctcttcctccactagaaatcccacttgcaggcgtaaatttgccacccccagtacccgattatgttgaaccaagcaagaccaagattacaactctttctaatggtgtcaaaatagcttcagagacatcaacggtatgcaataatcaattcttttatgcaacctgtctatactagttgaattccattttattttaagattttatctttattaattttacggtgtgtgtttgtgataaactctgacgagctatttaatcagaaccctgcagcttctattggtttataccttgactgtggttctacatacgagacttcagaatcatgtggggcttcacatttgctggaacgaatggcctttaaaagcacaactaaccgtagccacttgcgaattgtgagagaagtggaatcaattggtggaaacattggagcttcagcttctagggagcaaatgggatacacatttgatgctctaaagacctatgtacctgagatggtagaattgcttgttgacagtgtgcgaaatcctgttttcttagattgggaagtcaatgaggaggtaaccttgttattatttatttatttattttgtaaaagcttataaattggattcggaactgtaaaattgttgcatttacctaatgctattgtcatgttttgcagcttttctgccatcttatcaagattaatatattattatcaattgttattgttgtgcttgtgaagttgtttcatttgttaccttttcaattgatattatgtttgtgtagctgcgaaaagtgagagctgagatcgcagaattgtccaataatcctcaaggcttacttctggaggcaattcagtccgctggttattctggtgcattgtcaaattctcttttggcttctgaaactgcactgaacagattagatggaagtattctggagaaatttgtttctgtaagacacaataatatttatgaatcccttatgcattctaggtgtcttgttaaacttttcattatggtaattgtgcatttatttttcttgattattcgaaacatatgatatttcaaattcaggaaaattacactgctcctaggatggttcttgcagcatccggggttgatcatgaggagttgatatcactagcggagccacttctttcagacctacccagtgttcccaatcctgaagagcccaaatctgtatatgttggaggagattatcgtcgccatgctgattcatgggtatgatgtttgtgtgtgcatgtgtgtgtgtttaagattggttctttcttctcctcatttgcaaaattttctcatagatcattccatcatttttctttgtgctaatattctttacttcttttgtgttttttcagaccacgcatgttgctcttgcctttgaggtccccggtggttggcgtgaagaaaagcaagctatccttttaactgttcttcaggtgtgcattttaatattggaaaactcgtaagaattttttcttgattttatatcatttttctacaatgatgtagatgtgacattgcttaatttcatgcttaaacaaactctcattttacagttgcttatgggaggaggcggttcattctctgcagggggtcccggaaaggggatgcattcaagactatgtaatattccttagtcttccagtttatttatttatttttttgtaggttccactttattggaaaattatgggacaccaaaacaggaaggaagatga

SEQ ID NO: 188824 - DNA, 2018 bp, Cannabis indica
aaaaaaaaaaactaaaaaatattctgcatagcctcaatgctcaatgcaataacagttatatttgcaagctcaatcttaaaatagttgctcaaatagttgctcaaatcttggagatagtctagagtaatcaagaaccttggacatggagcatgcagtgactgacatgttatcctgacacacggaacaatgaaagtcattagaagtattggagttaaattgcaaatctttattcaatgaatgagttcgatacaagatgaatgacccagtctataatgccagactatatcttatgttatttttgaatatgaaatagacaaaacaaaaggacctttattgatagctccaaattgtagatagtaaagccttcatattcttttacccatcccaatcatttgcctcctcaaattatcctgtatttcacaatgattagaatggaaacttaaagaatattcaccagaattagttattgagattagagaaaggagattgcaatgaaaatttggtacatgaaggagattacagaattagttattaacagaaggtatagaatgatcaaaataggtattttgaagtaaggaaatcatagtgagtagcaccagtgtcaatgatgtactgagaattgaaaattatggaattcttaccagaataatgggagactaagggaggttcttttgatgagttagatggaggttctgaattcctttaggatagcaataccatgagtctttgacactgcacaacagataaaccaacaagaagtcttgatttttagtatttctatcttcattgttcccatcattggccacagagttagctgaaaaatttattgcaaaaatttttcctgagttattgttgcttcaattatcatttctattaggaaactttccatgcaatttgttattaggaggatagccataaattctaaaacacttagacattgtgtgaccttttttaccataatgaatttatactatttttggactatgtagttgaatatttttagaaaaatattcagaagtagtactaaatctagatcctactttatcatcttcaataggaatatttgacaaacacctttagctttcttcttgaataacataagcataggacttattgatgttggaaagaggaccttgcatcaagatctaagatcgagtactgctgtaagactcattaaatccaacccaaaaattcaagaacaagatcttcttcctagtattctaagattatcttcatggcaccataagtacatgttggttgtggacgatattcttggattagatcccatagggagttgagtcgagtgaagtgatttataacagttttttgaaccttgagccaaagatttcttcgtacgtatagcttcaaacacacgaggagcatttttctgattaaatctttcctcaagattagtcagatgtgtgtagcattgtccatatacatcacactttcaacaatttcactagaaattgcataaaaaatccatgaaatcatagtactgttacaacgattccagagctcaaaaacatcatcatcttccttgggagcaaaaaattttctatttacgaacttgagcttgtttcttgcaataaaagacactatcatagattcatagctcgacgccatgagctgtaattctcacaacctgtcaaaattttcggaactaaactagctctaggataatcattattggacagaaaatgagaatttcaagcttcatcaaaataggatcaaacattcaaatccaaaacaaagaattgattaaaagtctccgaggaactttgagtctgaacaccatcacctctcgtgccatggaaaagagaagaagatgaagaaagaagtaggttaactcagaaaacccactctgataccatattagttgcgaaagtaagagagaaagcagagtgaagcaaagctttgtacattgattcattaaagagaaaatacaatggtagaacttatatagctcaatgtacaaaactttagaattagttacaaaactaattgtgatatctata

SEQ ID NO: 188825 - DNA, 2794 bp, Cannabis indica
  modified_base (822)..(822): a, c, t, g, unknown or other
atatgtacaaaaatgtacacataaacactaaacagtctatattggcaaataattggggaaaatagatgttcctttaaatttactaccagtttagtagtttgagaattcaactattaaaatttgaacttaggggttaaatacaagtaaagtagtagttgagagagtttagctgcaaaacactcttttatttttaattttgttctctttttccccgaaaccatggaaggttagcgcgatcacgaatgaatgctagtaggataaatttgtgtcccgatacatgcttcttttttttgccaatattaccacgtaagtgagtctcttgagcagggagagagctatgtcggagagtaggtggctttcatccctcctcaaatttttatattttcttaaaaaattataatttttttttatattttctctaaatttcttttaaaattatattttggcccctactaattttttcttttgcattttggcctcccttagtttgagaccctgcctctatccctactcttaagtgactttaaacttataagatcaacatgaatagagcactaaatgtgtagtttttttagcacaatttttataaaattgaatgactgtgtataatgcgagtcaaattttgtacatgctaaatactattttaaatttgactgaaaatataacatatgtgaaattcgcaatgaataaatatcatattttttatgtactctttttcatacaaatattttaagttaattttacatgtaacgcattgaaactaaattgtgaaatttgatcaaattatagtattaacttaattgtaaggtttttttttttttnttttttgaataaaatgaataattccattgagaaggtacatagccaagaatgacaaacaatacatcataattagaattggattccaaggggtaaaccaagcaaccaaattcgagaggcagataaaagaatacgaactagagaatgagctataacataaaattagcatgaattttacaccatcagtctaatatgaaattattaaatgaaaattttactcaaaatactatttacaataataataaataattttcctttaaatatagacgaacctccaacgctatttacatttttgctacttgaaaaaaaaaatatataatctaatttttatatgaaaaattttgggttttttagggtaccaaaaatcatgattcaaataatatgtttcaattacaaattaaataaaaagcataataatatgttaactgtataaataatataattttatggttgcatttggtcgaataattctagttataaatatttaattgggagtgatactagtatttgggggactcttgaatctctcgtagtaaagacttcttcacgaagtctaatggctccttcgacactagtttgagaaaagttgttgatctcctgttaaatagtagttattgggatatccataagttaaacagcctatttaatgaagaaattgtttttgcaatcctaaaaggggggtagtccctttagccatggcaaagataggtgggtttagacgcttgaaagtaatggtcggttctcgtgcaaatttgcccacctcgtccaagctttggaaagggctcctcactgtgaggtagctccttcgctcacgaataagctgtggaatagtaaaatattagagcgtcataagatttttcggtggtgtatcttgtccaatgcgctccctgttcgatctgtgatcaaaaaaaagatttcatattgaagatgtgtgctgccctttgtgtgggactgaggaggaatctttggagcacctatttatttcttgcagcttggcttatcatttgtggaggtcttctctttggggtatttatcctgtttgtggaactggtattcgcatgtgggactgggttaaattcatttgggaccttaaacacaaaggcatcctttctcaggatattttcctttatgcgccgattgttgttgactccatttggcagatccgcaatgacaaggtacacaataatagtccaattgatgtagaaaagagtattgactttattcgtacttcttttgcagattatcatgctgttttattcccttgtcctcctccgtgcttattggatgtctggcatcctcctcttcaggattggttcaaactgaattgtgatgttaaggtagggttggaaagcatgtgtactgtagtggtagctaagaatcatcttggcatggtggtttggtttcaaacagctcaattggatttttctgatgcgctgtgtggggaaacgacgacctgctgctcagctctgatgactgctaaggaagtcacttccaagtttattgttgtggagagtaactcgaagatagttatcaatgttttcaatgggaaggactctcattgggcacttgagaactatgtctcattttgtaaaagatcttcttctttgtttgttagttgtattttctctactattagtagaacttgtaattttgttgcccataatatgattaagtaggtgtttacccaccagaaatttgattttattctgctatcatccatccctaaaaacttattttgtaatgactgtgaggtctaacttatttctatttatataagaacgattttcttcaaaaaagaatatttaattgaaaaataatcagttaaactactagacaaaaacaaagtaataatatataattattcaaaatcaaaagttaaaactactagttttattcataagttcttaaacaagaacacaattttattgaactcaaaatttttatatgtattatctaagggaaatttcaatttttg

SEQ ID NO: 188826 - DNA, 1683 bp, Cannabis indica
actactactgcagatccgttcagtacaagaggggcatatagtcagggtagctgtcgacgtggagggaaactgcaaaagaaacggcgccgccgtcaatttcactgcttttagctcttctacttccctttgtagccttttattttcttctgtcagtgactcgcaacattttttcattagctcgtagtctgcttccgtttgtttcagcttagtccttcatcataacaacacaaataaattaaattaatcagtagtgatatattacaattacaaattatatttatatataattcaattattacgtacgtatattacgtacctagcccttctgttttggaaccatacttctacttgtcgtggccttagattcagttttcttgccaaatcctgcttttgcttctgtaaaaattaatatcaatattttatattattttttttgaaaaaaaactacgtattaatttaatttaattatgtgatcagaagagtaatatgtatatatattatttacaggattaagagtgttatgctctttgaagctgtcttccaatagagcagattgttgtttagtgagcctgagtttcttccggggactagcctgatcttcatctaataattcatcattagtactaaccctggaacctgagaatctctccaactctacttctacctcaaactcatcgccaccactaccacggctgccgcctctgcctcggcttccaccgagttctgatctctctctcttcaaagttgtagtggaggagttagataacgatgagactgtggcaagagaataattggctccaggtcgtactccatgcaaatcatgatcatgtacttgatcaaccgcagtatgatgtatgatgatcaccatattgatgatctgatgatgatgatgatgatgtgccaagtgtaagagatggcaatatatggtcatatctcaaacagattagcttcttgatcttgatattattaatttcgtgatcatcttccttgtggtattgggaatttcctaagccgagatcaaggccagtgttgaaaatagctccattattagagcccatgtttctaaaaacttatagctagatggacgaggtaggtgtatatatatagcacttaattgtatggaagcatacaatatataaatatatatatatatatatacatatatataattctagtggaggaggagagtgtgaagcggatattattaatcttgttagggatatggtgggatgtggggtagtacttaatattgtatgcaataattattagataatcagagaagaaaagtgagtaaatagtaatgagagagaacgaatcaggcgttgttatttatcaattattttatatatatataaaaaaaaggttcccatgtcttttttgtcctcataggttgaccaaataaaacaccttaaaggaatgcttcccccctgttgttcagtatccagatgttcattaatgtgtttaatatttttaaaaacaatatgaagacatacggtaccggccatgtttatataaatatacgtacaaaagtattcatgaaatgtagaaaagatttatttctgaacatgaaaaccaagaataggaactatatactattattactactcatatatcagagttaatgatatctctgaatctcctaaatgaaactacaatcaaaatctgattcaataatagcgagag

SEQ ID NO: 188827 - DNA, 2337 bp, Cannabis indica
ttttcatagtaagtttctaattatgaaagaatacataaacatatatgtgtagtgaagaatcaaaaagttgtgaaagaagactacctggaagcatttacaggttgcttaattgttttaatgtgaaggcaaacctgaaaagcaaaaatgatttgtgtataatacagacattctaaatttctctaagaataaaaagtaaaccaagacggtcataagaacccacttattaactccaataggtaaagaattgtgtgaaaagaacacctacctgccctgatggatccaacgtataccatactgctcctgtttgaccctcattttcaattgaaacggtcacagaaccaagcacagtgcttttccaaattatatcccaatcatatattgtcacattaatctgcaatgtcagttggtaaagatgagttcaacagaagaatagaagatgagtaatatccattctcggtaagagacttcaagaacaaaacaaggaaaatcttcataatatacaggagaaatgcacaaggtgatgaaaagtgcatatacatataaacattaatgggaccttgattctccatcaacacacacaaatccaaaaaagcacttgagctaacctcaattagcatgattacaaatgtgcaaataagtaaacaaaacaaccaaaatgattcaaacactacttgaaacttgcaggaaagcaggaaacagaacaagtttgaggattaagaaagtacctctaaaccaagatgaagataacaagaaaagctttagcaaatgaaaattacaaatagaaaaatagaaacttgagacctttcatgcatcttccagataacattcagatatacctaaaaagaattataactaaaaaaacacactttgtactttcaaaggaaaaaaagtatttggttctttatgctaacttaacagaaaaggttcccaataatagcatcataacaaatatatagaatttaactcttgcagtgcatgctcaccacaaaatgtcagctaaagtcttagaaaagcctatattttagctctccagtcacaagccacaatgaaatagaatgaagacattgaagagcttgttttaacggctattgggtttaagtaaatgagcatattgtaatccaataaaaaacagagcaaactgaagtttttggtgtgatacctgtacaggaagttcgtcaactgaaaaattaaactcctctccccacataggatttcttgaaccaggaaccattgaactgcatcagcaacaaatagaaaattactatacgcaaggatagcagactaaaagaactcttgtttttcacacatgtacaattctagtaatagaagattccatatagcttctcatgaaatctaagccttatattggttctaaaacacactagaaaaaagtgaaaagtgcccaaaaagtaacctgaatcgcatttctgtaccacaagtaatgatagcataaggatccgaagtgccatttatgtttgcagcaattaaattcttagcagccaacaattccaactgaaattaaccatgcacaatttcattatcagttctttttttgattaaaccttaagtgggtccaaaacaaggttctgttttatttttcctttttgtgtggaggggaagcgagaaagaaaaaacttgagatagaagacaaacaattcattttcaaaacttaatgtacaagaaacacagccacaggtcacaccttgattaaatacggagaatttgtctgaagatcaccctttaattcaaatgcctgtcgaaaataattaaacaaaaaagtgagagaaatattagtatagaaaacaaaaagttcaaaatttctcaacttttcaatcagaacaccttaaaaaaaaaaaaaacccttttaggaatgaaattttgaagagggaaaaaaaagaagaagatatatttaaatgatcagatgaaaatgcacaaacatactcttgcattgaccttgaattcaagaatattaggaaagattcaaaattcgaaattgaagaaacgataaggagagttgaactgacattgtttttaagatcagaagcagtggagtcggcgtccccattggcaccaccgggtctacgagagaaaaaccagtaagcgaaaataacgaagagggaagcggcgactgtgaccttgatctcccaccacgatggaacaaagaaatcaatcaaaaccgtctcgatcatcaccatcgtcgtggacgtcgtcatcatcatcgtattcccggcactgaaaaattggattaaaataaagggaaaagacgagtagggttttgggtgtttggtaaagccatgcgaacgctgagtttgaagaatacgaagaagaagaagaaga

SEQ ID NO: 188828 - DNA, 4105 bp, Cannabis indica
aataacatgcgaagaataacacactatattacgtacttggcaaacagaaaacagctacttaaattttgtggcatgtaaaaaagcttatgatactaaacgtagatttcgtattctttttctgtacattatattacgtacaaaatacttgttctaatttgatcatcatcggattaagagagatacaccgaacatcaccgaatttgtacatattgtcgacgtagatttggcaattcactttcttcatccgatgaagagagcgataaatgagaagtcctacaacatgaaaaagataataaatatactttctatggggaaaactagatttcaccaaccaaaagctaaaaatctggcacaatgatattttccagccatttcgtaattgaaacgttaaattgaataggttattatgattctgacctgctgatttcgttgacgctgaatggaagtgaatgttcttgccatgatgaagaccggaagaagaattccaatggttctcaacacaaataactacaatgaaatgaaaaaatctatcaagaaaacaccagagcatcactgtcatcctttttctttttccccagtttgtcaccaatttatttaccacaactaaagataaatttgattacagaatgaatgcttagataccaatctcattactttctttccctaagaatgtattctttgaaaacttaccatgaacgcagtcattgtatactcccctgctccactaattataattggtagagtatggcgtaaaactaatagaactataaactgcatccacagaaaaggaaaatataaacagctcagttttagattttactttacatttggtcatgtgattagtatttcttccaaagcaaattcacattgagaatcttaagtagcattgacttaatttacattcttaagtttattaaacaagacaaactatttcatacatggaaagtaaaaaacaaactcaaaatctaataaactcaggttgctcagccatggtaaatattggagaattttatattagagtatgatatcacactatttctgggaaaaaaaatgtatctaatctcaaatggtatggaaagaaccacacagaattaacaaaccctaaagcctaaagcagtcttagatgaagattaacaaggccctgtgcacgatttaaatgaaactgcactcgacttcaattggatcaacgactaagccacctcactttgaggataatcttacaaaagtagtctatttatgctgcctgctatgctgtgtacttctaaacaaattaaagaacaaagggataattactggttggcagatgtccctgttggacagcagctatatagcaactcgggattcgaagaacataacaaatcattacatttgaaattatgtccatttggtgacagattaatttttcagcatgctaaacagagtaatcatcttttagactaatgctcaatagttctattttctaacttgtaacaaatgaaattgaaaagaaaaattaatttctgtttctttgaaaatcaaagctaaagaagccaaacactaatcatttttcttatatattttgatataacttttaatgaagatgtggaaaggtctattattgtaatagtaagccattagagcaaggaaaaactgggaaagcttactattatagcaattactctaaagcacattatacttctggtagagggcactggatagtcatcaaaatcagaaccaacataatcgccatcactagtaaccatccctatgaattgagaattatgtagctctcttccagaaatttcccagtttcccctgaagatgaagacaccatacaaaacttcataaattattttgtatatgaaagggtaaccaactacatgtcaacacaattatgtaatatacctgaagttcataggaacaccagcataatgaaacaaaggaggtggtgcagtgtaacctgatttaaattgctgcaatttcaaaattcaaagtcaaatacataaaaagaaaaaaaaaactgaaaattaaagtttgtgcttctaaattgacaccaactggaggtgaaaaacaaagtacctggtggcaaatttcgcagatgatatcgcctttttcattgcaccatctctgaacacatttacggtgagcatactgcaaattaaaaatagttaataagtggaccatctacatccactataaaacaaaaatggccaaaacaaaaaagtgcacaatgtcagtcacaagaattaacataaaagagctttaacaattagaatcttataaaagaagagagagatagagagagtgcgcatagcagagaaggaactttgagcaatcacaagaacaatcactactattaggtggtttaaaaacaatactgtgaaagaaaaatgtaattcctctaggaattaaatgtaggtaaggtatagcaacataataagttatattgtactgacctttaagctaccacggcaagaacatggtgactccatattcaagtcttcatcctcatcatggcaaatcctacactcaaccaatttactagaagatgaactcatatttaaatctatcttatgtgaagaaaccatattatcttggcttgctatgatcatagactgctgcaactgattttttctttctattgctgcttcaagggtagactctgtaagcagccgatccaccaaaagcacaaaatgatcccccatccttcaattacagaaacaatgtttttatttttaaataaaattacattaatttaaaaaaccttgtcctcttactgtgattttaattacagcccaagaaaagaagaataatttgatattacctcaactactcatcttacatttattagatctgcaacataatctcagtaaatagttttagcataaaatgcctcagagtggctaaaataatttttcttttccttaatgttgctaaaacaattaaggtttttgacaaataaatatgtatgtttgaagtttccatcttcgggctaaatggaataacaaacaacagaacaaatacttactctaaaaaaaaaaaaaatcgaaaaaaaaaattaaataaaataagtgaaaatgggcagttcttaaagattcccaaaatgtgactttttttttttttttttttttggagggaagcaaaatgtgacatttaagcaccaaataataatctgttttaagtttctcaaagaaaaagaatgatctgttttaaggttgaagggaaaatatgaaaatggtgaggaaatgaaatgagaaatttaagaaaaaaatagcaaaaacaaaggaaaacaaacatcaataaccgtattaatgctccatgttgattccgaaatcaatcccaaaaagttacttttttttggtaacaaagacccagataagaaaggaatcataaaaaaaaacgtacataaaatttcaaacaataaaacccaggtttccattttgtataaaaaggatcgaattgggaatcagaacccaaacccagaaagagaagaggaatgagttgtagacataaaagtataagcttacttataaatgcttatcggaaaagggttgaaagggagaaaacttacaagaatgggaatgggattcctttcttctgcaacaaaagaaacaaagatagcttggcttggcttggagaagcaagagattgagtgttggccttgaccactttctttgtccctcctcacaaaccaagaaatgtttaaatctaacaaatagtttcttttctttcttaacaaaaacccaaaacttgatacaaggagagaagaacaggagaatcaaagtataactctctgtataatacaaatacaatatggcattttacaagagagagtgagggagtgagggagtgagggagtgaggaaagaagcgtgggctaggaaagtgggttgggtggcagtgaaaaacccaaaaggccgaaaagaaattcctctttttcgcttttcccaaagagaagaaaaagaacattatatcaaaaaacaccatccaatcacttcgttggtcaattggcatagtactccgtacgtacgtatcccactacacgcacgcacacgagcctaattttgttagagaaatttgattttgcatgattatattatggtaaaattgataattaaaactcatgt

SEQ ID NO: 188829 - DNA, 1889 bp, Cannabis indica
atgacctgagtctttattaaggaaaggcctactgagaaatatctttatggtgactacatgaaacatacaacaatgaattcaagaacagatgacgaacacggaatacatagaaggccaaacaaaaagacgttctgttgccatcccaagtcatcaagagccactagttatatgaatttatgataaattaatatcagcctatcaccttccttataacctgttaaaactctcgaaggcctaacaaacaagtaaaaatcatatgcccatcatgcaaggggatgttaggggacaatttatagtgtctctggtaaaatatcttagcttccgggagtcatcaagtaattccggaattttacaaatccaaactccactccacaccagaagaaccatgcccgttcaaaaggggtcttagcatataacagaatatcaaccagcattgcatcaacataggcatgtcataaaattactaaggcacagtatttaccagccgacagtgtgccccatggatatgaggcgtaaatcaatgttatgtaaaaaagacgaaaaatatttggaaaatgaaagaatcaaagaagatgatgaattccagatttcccatatttatccctgcagaacaacaatttggttcaaaggtctaaaggaaaataactcatccagaagatatctctacataataaatcaacatacaaacgttcaaaacttcattgctcacatctgccaaaacgtaaaccaaaagaaaagaacaatttaatcctcaaatcccaaatgataagcagaaaaataaacaagaaatgagaaacgcaaccacaaaaatacatataacgatgcattacctctaatgtgggtcaagaaatcaataagaactgataacaaaagagacaaaaagtaaccaaagaaagaaaaacaggaagaagaaagaacgcttatacaagaaaacccatgtccaagatcttccattttcaacactaaatcatgcaaagaaccaaacagaaatgtggttttttgagagcgtcagagatgaaacccacctcttcaatccgagaaagattgagttgaagccgattgttgatccatgtaagtatctcattcctcccaacgaagtaagcactgtccatcatcccaatattcgtcgccatttcccccaaaattcccaaaacccaattccgattcccttcaaaattcaaaatatggaaacggagagatgagaaatgcccaaaatgtcggtacattaacaatggtttttcgtttattgagcttctattaagaaaaataacactcagataagtgaacggtggaggtatttaatgcaaaaataaataaataatatatatttttttttatgttgaaaagggttaggttggttggatttggcaggcttggcactctttactttaataagtattatttttccattgtaaatgattctctaggcactccctctctttcaacttcactcaatagccaattgtttaggggagtttttttaaatgattattaaattaaaatatatatatatataataaaaatagtaatacttttatttaatttaataggtaggttttttttttttgaaaagttctaatttcattattatatagcaagaaaaatacaaattacaacttaaaagtttggtaaaggatcatttcatactaactttttatccaaccctaaaacaatcctagaaattgtatgagctaagacattagcatctctagaaatgtgacacaatacaacattgaggaagaaggataaagaggaaatgagatcaacaacacatcagatggatttgttttttatgacataaactcatctaatatctaccactattttagaatccaattctatatggaaaattggtagctccacaacatagcaccaataaattgagattt

SEQ ID NO: 188830 - DNA, 2027 bp, Cannabis indica
cctattggcaggtcaggagagtccaatcccatctccataaaggcatatctgtactcaaaataacaaactttttagactcttagtacacgaaatcgaaaaacaaaaatgaagcaacaagaggtaagttgttgttacttgtatatctcttgactgcacattactttcatcaaattcgcaacaagaggttcgagtctgcaatgtgttacagcgattcctagctgccgaagacttagagccccgtgccttacttctactccatcggcctatgcaataaggtatcgaaaaaggttaagacaagcaagattcacaagaaagaaatgaaaatggggaaaacttttagtaccatatcgatgggatagaatttcaatggcttcttttggatctttttctctctttcccatggttcaaactcgttgccagtaacttcctcaaacatcctcacaaactccttcaaagcctcatctacattctcccactcttcttgcctttcctctgcattagggtcatcgccaacttttcctttcttgtaatacaaaaagagacggttctcgggcaccatgatcagctgcattatgcagtaactgcaaaattcggggggcaggagttaaacaacgaaacactattcgattcccacaacataaaaataagaactttatagtgttttctttactgatttagtcctcgggccatatcgcaaagggaaaaggcgcagttgtatagtaagccatctttctcaaagattttccctccttgttcttgcaacttagtatctttgtacactcctctcttcccgaaaagcttgagctgtaagtaacccgaaacaaacaacattattagtatcatcaataattctgatttttagtaaaattgcaccaaactttacgattcatacttcagctgagattgattctagtgcttcttcacttggatcttgtttatcccaagggattccttttccatccacagagagatcagacactatatcgtaagactcgagaggctgcggttcttgtttctcaatgctatcaaccaaccattcttctctcacaacaggtatgcctctttcactaacattagcataaaagattaaaaacataatatgaacaatataaaccgaaacatttaacagaaaaactcacattgcttcagctagcttcgatgtgccaccgcgatctcgttcagcactggctgcaactagacaagccacacctgcaaagattgacagataaactgctgaaaagaaacacaatcaacccaaacccgaacgaattaaaggttagtttttttcggtatgtattacctataaccgagttggcaactttccctccatgtttctcaatctcttttctccaatattgctacattttcatgataatcatcatcagcaactacattttcatgaaacataatgaagaaaaactcataacttacatgggttcgagagaggcgccccatcaaggaaatagtcattcctaagaaaggtttatcagttgctttcgagttcttgccagggcgacgactcgggtcttgatatttcttcaacaactgcacaagaaaatgaaaggttaaactctacaatgaagagctcaatatgtttgtaatgatgagattttttaaggagtgttcccaacatctgaaaccggggagtcgagcacagaatcgggtaatgtgatagcttcgtctttcctaggcggatcccttgtgctgaaagtacaagttgaccactcactgtatgaaccattgcagcaaaaccttatcccattgtactctagtgtgccattacaaacagggcatttgtctaatgctccatagaaaagcaagtcttggctgtttcagagttcaaaattcaaaaccttgcattacatagaaataaactaaaaacagtctttaaggtagattgaattcaatttcatttatttttccccaaccaaacacacccttatgaatcagctaataacacaagtattcgtaatattactctaaacatgtatcagaactaaggttcaatattattctcttgggttcat

SEQ ID NO: 188831 - DNA, 2106 bp, Cannabis indica
ttaatcatgtgataaattctgtctcttattggttaacatccttgtttacattctagctggttcaagatcttgaatttcgtttgtttcgcatttgctttacgcaatgatgacaacgatttagattttttggtaaacatgctggttatttaggtaacatttgctttatgctatgaggaaaaggatttggattgtaggtaaaccctgtatggtaatgaggaggtcaacaagtatttaataattttatccaactctgaatttgtatttactgatttgtgtttattattacataatgtctgtacatacccttttagactgacctacagttttatagtgtgagatgacaggagttgtagttgatgttggtgatggcgccactcatgttgtacctgttgcggatggttatgttattgggagtagcattaagtcaattcctattgctgggaaagacgtaacactctttgtgcagcagcttatgcgggtatgttttttcatttgactttcattcatattgttgaagatgagtacacatcatacacttgcattttgctctacttgggtctttcttataatatttaattgcgactagaatgtattaataactggaatctgttctacttctaccgatttggacttgagtatagtgcaataattttttttcttttctttttttttaaatataggaaagaggagaaaatgttcctccggaagactcctttgaagtagcacgtaaagtgaaggaaacatattgctatacaagttctgacattgtcaaggtttcttcatttacttgcatcgtgaagagacgttgatagatttaaattcagaattttttaagaatatctttcttctgactaaatagagtgacatggactaatttgacagtggtacctacctctcatttatttgataattccaggagttcaataaacatgataaagaaccatcaaagtatattaaacaatggagaggcattaaaccaaagacaggggcaccatactcttgtgatattggctatgaacgatttctcgggccagaggtttgtttcttctctctctttttttcaagatatatattatttatttaataaatcatgatcatggatgtgctgccactgtttttatcaggtgttcttcaatccggagatatatagcactgagtacactactcctttaccagctgtgatagacaagtgcattcagtcagcaccaattgacacaaggagggctttgtataaggtgattaagctttaaaaaatgatgcaaatttatttttaaagattacatgctccttaaggaaacaattagattacattacacattttgtggggtaaataaattcaatgtggtaatggattggttagcctaaattattacattcaaggcactatatttactgttgtgtaatatttcgtggtgatacgtcattttctgtaaatttaaaactcttatgtttttcctttctctacctttcatttgtggtttattaattgctttagtgatggcatccatttaatctgctgagagaaagttacgtgtcaatttgtgatcatttaatcttcagtgtatctatatttatccaaccaattgtttgcttataattatttttgatttgaaactcagaatattgtgctgtctggaggctcaaccatgttcagggacttccataggagattgcaacgggatctaaaaaaaattgttgatgcccgagttgttgcatccgaagctcgacttggtggagaaataagagtatgcctacatgataattttcttttttaacattatggtgagtaaaaatggtaattcttagagtttttttttttggtgtcatccagtcacaacctgtggaagtcaacgttgtcagccaccccatccagagatttgcagtctggttcggaggctctgtacttgcatcaacaccagaattttttgcggtatggatttcttaaaatttaagttaataattttgcgattgttttttttttttttttatttttttctttactccataaatgttatctatatttatccaaccattgggtgtggtgtggtattgttgagagatggttggaagtgtagaatttaatcacaatagagtaactagtgacaa

SEQ ID NO: 188832 - DNA, 2301 bp, Cannabis indica
tattagattccatttcatgtcatatcatataaattttttgttgtctgctgcatctaatcagttgctgacacccacaggtatcccacattcttcgatgatattgccgcacgtttacttccggtcattccattaatagtttatagacttattgaaaatgatgccattgactcagcggatcgaattctggccatgtattcaccatttcttgcttatcaccccctaagattttcatttgttcgtgacattcttgcatatttctatggccatcttcctggaaagctcatagttcgaatcctgaatgtacttgatctaaacaaggtgatgaccactgtttctgttcatccttttcataaatacggaatttactttttcttctttcaatttctctattgacttaaatttgtttcagatcccatttacggaatcatttccacaacatatcagctcagcaaatcctgttatgtgcccacctcttgattattttgcaactcttttgctgggactagtaaataatgttatacccccattacatagcagctcaaaatcaggatcactgggtgagaattctagtactttgttgcgcaagaaccaggcaacatctcagtctgggcaatcaaatgcttctgatagccaaagagctttttatcaaatccaagatcctggcacatatactcagttggtccttgaaacagcagtgattgagattctctctctcccagtatctgcatcccaaattgtatcgtcacttgtacaagtaattgttaatattcaagcaacacttgttcaatccaacggactgcatggaacaccaaatagtgttggacaaggctcagtcttaccaacctcaccttccgggggaagcacagattcattgggagcaagcagatctactccttcagtttcaggaataaatacctcaaacatggtctccagaagtggttatagcagtcaacaactgtcttgcttaatgattcaagcttgtggtctgttgttggcccaacttcctcctgattttcacatacaactttatatagagacatcaagaattataaaagaaacttggtggcttactgatgggaagagatcacttggagaactagactccgctgttggctacgccttattagatccaacatgggctgctcaagataatacctcaacagcaataggtatgatgtttaaataatcatgaaattactttttgtctgatgatgtctaaaattgtaattttccaaagcaagctgagcctcctacgatccacaactaacatttatccctgtgacgggtatataagtgcattttgagctcacagaaatagtgctaaagttagctgggttatttcttttcttgaaagcgcctggctatgcctcagaatgttcttatcctggtagattttccatttttaggatggacggaagatctacttgaaagccttcttgtttgttttcacctttctgtatctgctctttcatttggtttataggattaatgaaatcatttttgccaaaaaaaaaaagaagtttgagaaaatctgtaactgtatttgggttatttatgagtacctactttgttctttctcagccaaagatgattcttagcaagtattcaactcaatctttggcattgtgtatatgtatttctgaatactgactgtaactctattgtttttgtttcaggtaacatagttgctttgcttcattcggttttcagtaaccttccacaggaatggctggaagggacccacatcatcatcaaacatctcaggccagtgacatctgttgcaatgctgagaatagtgttccgcataatgggtccattgctcccgagacttgccaatgctcactcgctttttagtaaggtacaatattgtatatatttttaacacagtaaggtgcaatattaatttattaaatgaattggtcttcattaaacacatgctctgagtagaatatattcaactaaatactgaaaactgcctttgtattacatgattttcttaatcatcagagttaatgttgtttctataatgttctcaacctcatttccctttttcttggacctgacactgttttgggttataacaaccaaagtcttcattgtcaaaggctatggctttaaatgccatctctgacatacatggtattcttaactgattcttgtatctatgcaatttcttcgatttcaacttaaaaatttctttattgatatttttgagcggctagactatttaaatgtatttgagatataccttttagtatagaaaaagcagactatgtttttctatttcaatatatggctttt

SEQ ID NO: 188833 - DNA, 4432 bp, Cannabis indica
aaaaaaaaataataatcgcgttaccaatgaccaccttatttattaatttttatactaaaatagcatataaatcttattgtatactttttaaataaattaggaaatatttcatatgagtatgaaaataattattattttctatatcgtatagcctttctctctcgaattgatgtcaaatgttttgtctcgtgacatgcctacttactgctacctagtttagaatgagtgaaaatggcgagttcacagttaatattgatgttgaagtggatttgaaaaaagggtaatcaatattctcgcttgagcaatgtgggggcatcgaccgctaggataatagatattacattttagctaagatcaatgaattgagtagcacattacataacgaagaatgccttatttgacaaggtttttgttgaatgggaaggaggtgtttgatattcctctcctttgatttgtagtcttatattggttattttgttttgactatttaatattttcactttgtatttttactaagtaaattgagtttttgttgaaatattaagcactatggtgccttttaacaattataacatggagtaaatagagaaaaattataaatatgtctcctataatgtattagatacataaatattagtaattctatccctctttttaacatttgatacaaaaataaagtattactccaatcataaatcagcccaaattctacaaatttttacaaaattgaaaaagtttagttgagtaaaagataaataatatacataagttataagaatgttataacttaaatattatgttgacataaaatcttaatgcataatgtgaataaaaagattcaagatcaaaccaaaataaaagggacatgagattaatatttgatatttcatcatcatcatcatctacgtgagaagagctcaccagccagtaatttaataagaatggcctgtaattcaacacaaaacaattcataataacaatcaaaatcatcactaattgttttgtaatcgattcaaaccccatttaaggcttcaaaaattactttgataacttgattaaatatcatactgtttaattattatcatttgtgtacattcaaaataaaaaactttcattaaaattgtttgtttagacattttccgaataactaatcataggttcttctctctatcagaacaatggagttgttatgctcgttactaaacttgttaaagagattaaatataactattagagattaaatcgattaaaaacatattatgaactctttattaacatataatattggcctattctaatcctgacaactaaactaacttcaactgaaataaacttcatgcactcgatttgaaaccataatgaagatattcagataaggaacgagagaaagagagaaacttacgggactggaacgagttgacgtcagtgcctgatgtagttcatgggacgagactaaaagctttaccggacgaaattcaatggactgattgtttcctcggttgtctgcaaaactaattaattcacgtcgtaaaaggtgctcgaatgcctgtagtaaacacaacaacaatgtcataaataatgaattatcattagaatacttgcttatatagctatacatacccttaagcaaacgttttgtgcataataatctgaagtctggcatgaatcgtgcacgcttttgtactctgccacataccatacacatgtaagtatagtcgaaaaaaccagtagtaactagctacaactccaaaactattaagaaccaaggttacctttcattatggaattgaagttgtatgagttttgttctttaatttccatcctcctcatgcataccagaatatatagttccaatatagaacaatctgtttccacaggtcgaaaatgcaatcgataccattaattttgattacattaaacaacggggttagtagttaagggactacggggaagtggaagaataaaaacaataggaaagatagaattttcactcaaacatataactttcattcgtatcctacatatcatctcgaaaatttcgtttaaatccttctgtgaatgaagcattaaatagtgaatcggtaaccaaccatacctgtctttcgccgaagaaagaatatactttcataagctacatttgtctccaaaattttgattaaaacctttactcatccttgaacatatcaattcatatttagcttaaaagttttcataaaatgagagatagaattctaattttagtctctctcaaatgcatattgcatcaaatgtctataacatgttctaacaaagaaaatgcaattccataataggtatgagaatcttagcatttctaccttttatgcattctagctttggctgcctttgcatagttgataatgcggttttgaaattctccagagataagaatccagttcccaaatccatatttgaaacagcacgaaatctggaatcatgaccgtgcagggtgagtttagttcgaacaaaatatgatatgtaacggcaaatagacaatgaaacatctgagcttccaaacgaaagagacgaacttacagaaatttcaacaaggcattgacggtggaatcaatattcgaacatgtagtgataatctctttgaattttacatctgactaaaatattctacgcaatgtcaaggacttcaccggataagaacaatatatcagtaaattagttacaaatgattattactaatgagacccattaagtcatatcaaaaggcagaatcaactccaggctctaaaatttagttaaaagtgataaactcttcgatttaaggatacttgtatcttctcgttgaattcggtaatatagtttggggggagggttgactctgttggcaataacaaaatatgctccaataatctgtggaaatcgaatttaacaaaatcaaacaagaagaattttatatcagaattgtcaactacataagaagaatctgccttagtatccaagagtctcatacaataaaacattacctatgccattcctcattagtagaaggaaggaataataattttctatgtgaaaagcgagatcttactctcttttccaaaagctgatccgcatcctacatgattttcaaattcttcatcagttgaaacttaatgagatgacaccttattctggaaatgtaatctatccgtattaataacaaaaatgataacatagctcggaaagagaccaacgatcagtgctcaagacatactaagcatcgtttatagtaatttgtacatgaaaatactggtattttttataccataaattgaagaagaagtaaaaatggtaacataccagtcggcaactgataccgataacaacagcctgtgatgatactgactgcattgcatccagcaaactataaagtaatctctgttttccctgcaaagactcgaaatagaaagtaatgtctcaacagaagattcaaagcgaaattttcttccaacacaaggctctgcagcaatgagaaacgaaatgggaaatgatgatgtgccatacctgagcaaacagatcgaattcatccaatatgaaaataattgttttatgagctaatccacactctctaacaacaaaaaaccatacaaaaaattcaataaatatttgataagacaccacaccaaaagctaaaatctttgctcaccgaagcatggctaacatgaactgggaattatcatcaaacgatgcctgtaaaattattatcaaaatcaagatttcacgcattatttacttgtgggaaaaaaaaaagaacaccaaaaagatcccaaacaagatatgcacgttaccatttttgaaaacaaaagctgattctccacgcataattgtctagctatttcctgcatgatcgaaagggaaattaagcaacaacaaactgtttaaagtaaacatatgacaatgtgaaccaactctttgagtttatattttttagaatattcagcataaattgttatcaaattaaggagaaagtaactggataaaaccttgaatgcgcaaatatcatcactgtgcaagagtccacttagcttaatctgaaacacatgtcaatagcaaattagattatactttgtattccattttcaataatgtattccttaggtacggtttggttggagataatgaaacgaaacagaaacaatttttattcaattcttttatttggttgcatcttaaagtattagaatgtcagtataaccgaatgacttttctattactttattttagtggaatcgctattccaatttgaaatagaagaaaacaccaatccttttaataattttttttaagcattttcaatttgtttgcattccattcctatcatcattctcactctcattcctattccttttactattattcctaccaaccaaacgctgtatattatttcttagtagtctccacataacaaaaaaaaaaaaaa

SEQ ID NO: 188834 - DNA, 2415 bp, Cannabis indica
ttttaattttttttttaattaaagttggatcattcattaacattataattcagctattacaatattctttaaatctgttggagcattcagctcattaaacgtacaacttgacataaaacaggattttctagctacacaatgagcgatcctattttgcaatttgttttacaaaaacaaataaaaaaattattgaaagtagataaaacagaacggaaatcctccaccaataaaccaaattgaaatgacatttgaattgaactattaattgcttgaactacaactaatgcatccgattcaacaatcacatcatcccaacctttaaactttatcaaactcaaagcctctttgatgccaattacttcagctattttgggttggacaatcccacatctactaccagaaatagcctccagtaatctctcgttagtaccgcaagccacattcaaaaccaaatctttgttgagcttcaaagataacacaatcgacattcaccttgaccttaaaactttatggtttacaccattggtcgctgccattagttacatcagtaacaaataaggatcccaacacctgagattgagcaaccttccattggccgagaactatacgtgtcgattttattacctccctagtcgaacaagatttttgctgccagaacaacttgttacaggccttctaaattctccaacttatcatatcagcctcaaaaataatttcaaagttattaccattcaacaattcaaaagtcaactacttttttcttgagttgtaacagaaaatgaattgatcacagataaattccaacatgcgtgaaaaatcacaaccaagcaacacataaaatattgtaagatcaacattaacatgcttagtattgagttgtaccttggttggaagatacctcgagcaagctctccacaagaattgtagaactttagggagaactgctaactgcagagtttttttcagccacgatcatcatccacaaacaaccaatttcctgtagaggattgaagggatttatatgcactctttactgtaaagccagatgtctccatactccaaaaccagtgatcatcatccatggtattactcaactcaatgccaacaatcaactctctgtccctatcctcaaacatatcatcaataacctctaaatcccaagatctcttgccaattctcatcaaagtacaaatttttttatccagaagtccctggtgttgactagtgacatatgggttactcacattcgacaaccaaggattgagcaaaatactaacagatttgccacttcctatcgacctccttacacctcttcgaaccagatcttgcgcaacccaaataccccgctaaatgaagcttggattttgtcctaactcagcccttaagaacgagccgttaggataatactgagctttaaaaattctacccacaagcgattcttccttagttaacagccaccaccattgtttttccaaaaacgagagattatagtcccgtagatcacgaaagcctaactcaccaacatgcttgtgcctacaaagcctcttccatgataaccaactcactcccttataaaagactttgattgcgatttccaccaaaaattagacatcatgccctcaagacttgtacaaacttcctttgttaagaggaaaacactcatagcgtaacttggtaaagcctgagcaacggactttaaaaaaaatttcttacccgttttagacaaaaactttgtctcccaactaaaaattctcttcttcattttgtccttaaggaagcctaaaattgcatttttgttccttctcataatgaaaggtaaccccaaatagcgactgcccgcctcactcaatcccataagagcacacaaacgggcacgtagatccacatgcgtgttagtactaaaaaaacactgaggacttagcaaaatttactttttgacctgacgtcatctcataaacaataaggagatatagcacattctcagtgttcacctcattggccttgcaatacacatagctatcattcgcaaagagtatgtgagaaacagttggagcgcctctagccactttacactctgttaaccaacgatgtcgttcatactttttcaatagagacgagaaactctccgcacaaagcaggaaaatatacatgaataacaggtctccaattgtctcaactctcttttaagagtaattggacctataatatgaccaccatgggtcacattgtaagtaactatagagacacaaaacataatcaaatccaccaaccgaccattaaaccctatatgaagaagcaaactctctagaaaacaccattcgactttgtcgtaggctttggtcatatctactttaatagccatgaaaccatccttaccaaagacaaatatatctttaaaaattaataaaaaaaagt

SEQ ID NO: 188835 - DNA, 1510 bp, Cannabis indica
ttacccaactttatgaaaaatatggtgtgtgtctgtgtgagtgaatctgtttaaccaaactaaaaacgaaaaataatcaattctttattacaactatttcaatttaaaatataaaataaataataataaagttaaaaatatctataatatttcaaatttctttatataaaatatctacataatttttttttttttttgttgaacaaaggatgatcatgcattaaagaaggtctcatccattacaatattttgcaaaataggaggagcatccagctcattgaaaatacaatctgacgtaaaataagaccccctagcaacacaatgggcggccttattagcagatcgataaacaaaagaaactaaaacattctttagagttgataaaatcaaacgacaatcttccaccaacaatccaaactgtgatggcatatgaacgaaactatttattgcctgaaccataatcaacgcatccgactcgataacagcatcttcccaacctttatttttaacccaactcaacgcctcttttattctaattacttcagcaatttcaagaagtacaatcccacttctacttgttgaaatagcttcaattaagctcccatttgaatcccgagccacacaaccaaacccaaacctttaatgagcttcaaatatagcaccgtcaacattcaccttgaccttaaatctttcaagtttacgccagtgattgctattagaggagacgccaattgcaaagagagatcctgacgattgctaactaccaatactccattggccaaggactgaccgagccgacttcaccacactagaagctgaacacgatttttgctgccatagtacctcatttcgggtctttcaaatactccaactaaccattgctgcatctaatgtaacatcatcacgattcccatctaatacagcaaaaaaccagctgctaaaatcctagtttaaactagaatttagtgcagcagctgataaataacagcaaaaccgtgcgaattcacaaccaagaagcttatgggaaattgtctcatacttagcattacaaaaaggacagaataaatcaacatagacatgttttgaattaagttgtaccccatgttgggagataccccgtacatgccctccacaaaaagtggtgaacctttggtgggacttcaagcttccacaactttttccagcaactatcctcttgcaaatgcaaccaattaccagtagtagattgaagatacttgtatccgctcttgacagtatataagtctgcatactccatgttccaataccaagaatcattatttgttgaactacttaactgaatgctcaaaatcaagtttttgtccctctccacaaacatatcatctagtagttcaaggtcctaagatctctcacccacaagcatcagattagacacattcttgtctacaaggccatgatgatttgaaatgataaatgggttactatcatttagcagccacgggtcaagaagaacactgacagatgagccact

SEQ ID NO: 188836 - DNA, 1072 bp, Cannabis indica
  modified_base (621)..(621): a, c, t, g, unknown or other
aaaaaaaagaaaaaaaacagagagaataggataaaaggaatatgctgaatcaaatgtattttgtttaaaaaaaaaagtgtttttgttcaataaattaatattacaaatgtggctaatcaccaatcaccacacacgctaataactaataactaattagtcatactaaactgatgacatttttataaggaaaagagaaagaaacgtttctttctctctatataaccgaataacaacagctaaaaaacgttccgaaacgcccaaaaggaataagaatctgggtagagtggatggcctggaacaaaagtcttacccgcgagcccagttcagtttcttaattaagtcttttttttcttctctattttctcactctaaatctcactcactcactcatggagtctctcatctctgatttaaattttcaattttaaaataatttttttaaaaaaatttataaattctctgaagaatttcgagactaattaatggcggcattcgctcccaagcttccatggatcgccgaagacgatcttcttctcaagaacgctgtcgaggtatttttctctgcaattcttcaattgtttccatggcgatttcctttttgcatgtctttttttttttttnttttttttaattttgtgcaattttcgcaggcaggtgcttctttggaagcacttgctaaaggtgcggttcgattctctcgcaaattcactgttggtgaattgagagaccggtggcagtctctgctttatgatgctgatgtttcagctgaagcttctgctcgtatggtggaatttgagctttctaataatcataatagcttgtcttctaagcctagtagtactagtagtagtagtagtaggtttggggtttctaaaggaggagcgagtgtaggactaggaagttctcctgcgaaacgaaatctgaaagtatcgtaggaagtattacgagaggcgtaagagattgtgttcgtttaatagttataatttgtcttatattgatgaaccatagctaataatgagcttttggatgggtaattatgggtgttggagatcagtgttgagtaattattttt

SEQ ID NO: 188837 - DNA, 2654 bp, Cannabis indica
ggggaaatatgcttggacaacctctcaattaaagaacttcatgaatttttcaaagcaacttttgggcgggaaactactgtcaaagacaaattgtggcttaagaggaggattacaatggggttgactaattcttgtgatgttgcaaccacaactttcacaatcaaggacaataaattggtcaataaggaaaatgaagaaagctgtaagaatgcagaaggttctgtggagttggaagttgaaacaatcaacaactccaataattcaccaactaactgtgatgctcaaatggaagatcacaattttgtttcgggaaagagattcaatgaaagtgttgagttcgactttgaaactgaggatcttcatgcagaacagagagctgcaaagagggttaggaagcctacaaaaagatatattgaagagctttctgaagctgaatcaagagactatagcccaaaagtgcatagctctgccaaacatgttggatttggaagtacttctccaaagtcctgtctcaggcctgttaagagtgtctcttttaatgaaagaatcatgttgacacgtttggactctcttggtggatctggggttcaggttccatgcgtttctcgaattcgaagaagccgtccaaggaaaaatattaaggctcttatggtacgtaaaagttctacatgtctcaattatatgatcattgcttttattttaaaaaaagtgtctagctgatatcatctgaaaagtacagggttgttaaatatctgtgacagttattactacattacggatatagaatattagggacttaatggcgattttaagttttctttggaataaatttactaaccttattaaatttagacatttgttgtcttttgactcttgaaatttaggtgattgagcatgtattgtatattgttgaaacttaaaagtgcgtttttcttggcttgggagcttgtttatctgtataaatttgtctaatcaagattttgatgagggtagaaattagagtaggttgtcattataaatttagcattgtctttcttgatttttattcattcctcatttatcatgaaaattaaatagcactagattttatttaatgcaaaagaaagagaaaactgaagtgattttgaattacaattgcatagagattccatcctagtagtgtgggcatgccaactgaagtggtgaggaaggcccttgcagtacctagttctcgacctgatagtgtattaatgaatagagtctcagagtcaatatctgcttcagaacagattgagccactggtgagtccaacttagtatttataatgtcgtataatatatttttcagtcatatgtgggtgaactatgcttgtttactggaatggtaagggatatataatatatttcctgaacgaaggaaaatagggatattttaagacaccatagttcatatgcgcagccatacattgtcccatgatcaaggtcttctggagttctgggtagtcagtgctgaagttaaatcttactttcatatgaagtggcaggatagctcaaattgttagacatgtggtttactacacaaagtctaagggagtccttgcataacaagtcttatagtttttagagacgttaagtgtaaaatccagtattatgtaaaaaaaaaaaaacccaatggcaggttgatataatatgaagttttgtagctcggtggcttcttctggtcccttgatctccttactgatgtatgtgtatgatgcctgattgttttgtctattgtgtagcttacttctgacgcagaaaatgataagcaatgttctgccatcgatagagttcaaacaggcaagactttgggtttaaaacagacagattcatctgaagacacttcagatgataatataacaactgttcccactgtgaaaggtggaatgagaaggaaacatcatagagcttggactcttgttgaggttatgaagttagtggaaggtgtatccaaatgtggtgctgggagatggtctgaaattaaaagacttgcttttgcatcgtattcttaccgcacttctgttgatcttaaggtacttgtttgctgtttgtaatgctatatcggtgctacttggtaacagtgacgcttccactatatgttgatatgatatcatggctttttggcggaaacctgaaacctgattattattttgtaggacaagtggaggaacctactgaaagctagctttgcacaatcacctcctgatgatggagtacgtattttttgtttgttttctctaatcacctttatttatgttggttctggttctaaatttgtgatggtcgaccatgtctgcatatgcattcttgatgttaactcattgcatagtattgagaattttatattaatcatctagtcacttggccaaaactgaatcaaatatgcacaaaatgtccctgaattattacttatctgcggccatcagcactgactgcttattgtcagtcaagtagaatgcacatggaaattggatttggccacccaattttgacatggtgggctattatttccagaattttcgatagatatctggagataatttttttaagtcagactgtttaatttatgatatcgaatccaaatactgggttatccttaaataaataatttagctttgttttgatttaatttttgtt

SEQ ID NO: 188838 - DNA, 3070 bp, Cannabis indica
tatatttacacttgtaatccacattgatcactagttcattatcgtcattagattttcataatttaagcatttgatatataatattgattatggatgataatcaaaataattttaattatcaatgatatagatatactatatatacgttaagaataaaaagaaaattatatatatctatattggggtcagatatggtgcagatagtattatccccactcccgccccattcccgctttggatattgaaatttttcgccaccaccactctattaactaccaagacagggaattctcatcctattaggagcgggtccccatggttacccattcttgcggtataaatttccatctctagtccagaccccaatcgcccaccgttcatcctcctcctcctcctcctcctcctcctcctcctcctcctcctcctcctcctcctcctcctcctcctcctcctcctccttcttcttctttctttcttctaccactatcactatcacaattgagaaaatttcccaaaaccatatctcaatttcttcttctggaaagctttctacagaacatcaccataaccacgaccataaccacaatcagacatcaaagactcgacctttaatcaatttcagctccatcagtaaggtcaacagtcacaagggtgttgacgagagggacggagaaggtaatctcaaaatcacggtctaaattgacctcagattcgatatccatgccttcgaaaacacctaggtacaccatttttgggtttgttgtatttgggaaaaaatttcgggttctgggttggtgagtttggatgtttggttcaaaagttgagagtgtgaaaggaggagagtgatgaagacgagtaaagcagagttagaaatggtgaaatgggctttactgagaatacgattcgaattgcttcttctcattattgaagcaggaattgaagaatttggtgaagaagaaggagaagaagaaaataaagatgagaagagcctgttttttttttcaacaatagtggaagatgataagagttagggaatcgggatctggtatttgatatttgaagcttttaatttttttgtttttttgctgaaattgtaattttctattgatgagttatgagcgacaaaagaaagtggaatggtggtgtaacgagggtagtgataatggtggtggtgtggcggttgtggccatggggaagaagaagaagaagaagaaaagaataaagaggaaaaaaaaaaggaaaagagaaaaacgaaaagaaaagatttttaattttctaatttttgaataatttttttatagggaccaataaaaatatgacacatatacatttgcgcatagacatttcatattggcatttaactataatattttaacaaaattgtaaatagcaaaacataagttgggtttggagagttttaccataaaaaagaaaaaacaatttgtgatttaagtattacaactcctataattcatgtaatttaagcgccaatatctctaatttgtaacataaattattctggtgtattagagtacaattaaaaatattatagtaaatataatatttacttattttatgtatcaaatttagcataatatttacctctttcattcgtgcattcagaaacggtgttattagttactgatttaatatgtatttataatgatcgcttccacaactagatctaatgaaatactccacgattttttcacttataatcatttattttttttattttattatacatcccttttggctttaattttggttcctacgttattattaaatatcatatataagatgcataagctactctactcttctcattattaattggttttgagatggaaactcatgcaccttaccatacactcacctattctactaccttaaccatacacttccacattctaacaagatctaataaaatactccacaattttttcatttataatcatttatttttaatttttattatacatcccttttggccttaattttggttcctacctcattatttaatatgtaataagtaataaactaagttaattaacatgaaaactacatatatttaaacatattcaagatcgtggctcgtagtatgccatgtgaggtggtatattcaaaaccttattaagctatcattatttacaccttttcctttttctagtggaaagaaagaaagaaagccatagattgaaattggacaacttttttttttattcagaggactatttggtgcaagaaataaagagatcccaccatcaccttcgtattactttctgtccaattagatttataattagccaaaacttggccacaccttcaaaagggcaccgacttttttctttttaacaatcataaattataatgagaattcacatcaaattagattagaaaaagaacacaatattaaccgttcaataaaattgaatatgtttcgtttctttattctataagtcaagatctacattcctccaagataatgtttgacatggaaagaaagaagagaaaaaaattaaccttcaagaatcaaaaccatacccattgttttcaaatgcattattgtccaatgaacaaaatatatatatagtaccaatcgtagatacatttatgtagaaagctaccaagcataccaaacatttgtctatggagtagcaaaatgggtccaaagggctctaattgcatttaaggatccatctgttggttgtaaattgtaatttttctcacacgccaaaactgtccccacacactcataacataagccccttgtattacactttctacctcacatttctttcttcttattaaaccaccacaacttctcttcctttcattctctttctcaatttctcttcttcttctttttcttaaacttgttaatttgtgtattatttttcttcctctctattcaaatggctcaggtacttctgaatttccctttaaccaaaattaatatattgcatgctttcccattggggaaaatcttaattgtaattttattatgtaagatctttttgtctgtaaacttttttttttttttttgtcagaaagtggtgttgaaggtcat

SEQ ID NO: 188839 - DNA, 2350 bp, Cannabis indica
tatatatatatctagtttacggaaacgtaggaaaaaaatgtaaggtttctcggaatccgacaatactagttcattggttccggcgtaacaagccggagatttgtatataagtactgacacgtgtacttctacttgtgtggctattggtccctttcacgtataataaagtaataattttgcatggagggcctattatcattgtaatgtgagtttgacgaaaccaataccatacgtgtcaagacaagagcggtgacccttgttaggggaccactttaaaaataaaagggcagtgtttctttttattaaaattttggcatgggtcttgtgcttggtttggctcttttatcctattatttaataccccaatgtcaaaccaggaacctaatgttaattacctcatactggagacacgtggactcaataatacagtttgtggggccttaaagggttttgtgatgtaacttgttgaccacttgatccggttaccaaatgagggaaccaaacgaaagagggggcgggagaggtggggtcttatatccagttgccttttggtccctttttgactgaagacttagattagggaacaacatatatacacatatatatgatatctttggtctttttacaataatgattacccaatatcatgagatataaagtacaatagttgtactgttattagatatatcgccatattccgcaatgacatcttttctctcctagcacttttagaaaaaatcttattgttatatattttttaacaaggtgtgaatttgatttttttgcattcaaactaagagatcctttccaaaagaaaaagctctttacatgaaaaagattccttactttttatttttcttttttttttcctatctagtttactgttaatgaaattcgcacatgtattttcaattataattttccttacaattatgtatagttagtctccacttttattgaaaaataaaattttaatgatattcaattatagcctatatatataggtaacaaaggtcgttagaatttgaaaataagatgaatgagtttttatgtcaaaaccaattagcaatgaaaaaataacttattcatcttatatattacaatttatttctacacaataatataagactaattctaataaaagttctgtaacaaagtccgcataacattataatttataagtagcaccaaatatatttttagttaatttcctggtttgtacttcttattttgaataaagggcaacatcaatatatagtcaataatatatataattttcaacaaaaagtaccataattagtaaaatataatgatgatcgatcatttttattttcaaacttgaaagcacgatatcctgaggccaacacaagccatgggagtactattaattagctatagttaataatttttgacttaaacgatgatccactactttaccaaaatggaagcaaattcaaaaattactttcaaatttcggctacgtacgaattcaactgagttgcactataataatgtggcatagatgtacatctttttcaggaaatggttaatgtatagctttttagcaatcatgatagctagctatatagctagcaagcaaaagttcataataataccatatatatatatggtcctaattcgatatcgtctcgttgaatgttttcggctttggacttattaagaatgatgagttcaatatcaaaaagaaaagaaaacctctttaatttgtctcaaaaagcgggtcccttttgtttttatttatggcatgatcgtcgcgccacaccatatataatcctaaatgtctccaatgaatgtctttctccacacgtctctaacatatctctttaatctttatatatataagtatgtgtatgtgttacactgcttcagtctctactccacacatgtaatatttatcacatttaaatcgttattaattcatcataattttttcttcttttctagatctctataatatttttgttcgattgcgtgttcaatattaatttatattattgacggtgcatacatgcatgtgtatgatgtcaattataaatgaatagtctctgctttttttttctttttactgtgatcgaataatgcatccattgttatatatgttcagtgtaattaatgaatgaacaagtgcaagtatgtatagctgcagctgtataataaatttatataaatggtcaactaaactaacgagacaaacacacaacaaccacaaatgaaactgagtagctacaaagagagccttcattaattccatcactctatctctatacttgccgaatagaaacttagaaggtcaaagcctcatcagttacgtaagccatacatcatttat

SEQ ID NO: 188840 - DNA, 3644 bp, Cannabis indica
ttttcgaatcagttttcttcttcctgttcctcgttaaaccctaaaccccacttcttcttcttcttcttcctcgcacagtgtctgaactgaatttaactgaaaccaaagatttcttttcctttcaccattaaccatgtttttttccatccttctagaacgtcctaaaacaatttccaagcttctctcaaacctgatccttacccgacctatgggtggtggccctcgaacctttcctggcggcttaaacaagtggcaatggaagcgtatgcacgagaagcgagccaaagagaaagaaaaatctcttcttgaacaagagaaagagctttaccacgcccgaatccgctcccaaattcgggccaaggttaccggaaaaccagacccatttagaaaacctcttgcagagtccggacacgggcctatgagccctaacgatcacgtaaaagcactagctgatcggttcatgaaagaaggagccgaggacttgtggaatgagcgcgacggtcccgtcaaacctacgtcgtccacgccggcatcaaaggtacgggagcattacatagaatcgacagaagcgacaagacccattactgggtctccgatagatttgaggaagatggtatcagagcggcgtaatatagccggagaccgcgaaaatttgcatttcagcaatacgaatggcaataacgttagggtcagaaattattcagtgcagcggggtcgatggaacgagggctcttcgactggaagtagctcttgtttagattcgaagggtgattctttgaaacctttcgttagaagtttggtgggtaaccgcgatgactctaaagttgagagaagtgccaatgagctttctgcaaataagaaagtttccgtgaagaagaaaaggagaaatggtggttcttcgagcgacgatgagtcagaatttgattcagaagatgacacagcaaggtcttctgggactggaaggaatatgaggacaatggggagtagtgcttctttagggaaatatgatgtgaaaattacaaaacgaagagtaccattgaatacatgtgaaggggctgtcgatttttcacagcaggttgagctaattaggcatgaaatcagtcaaagaaaattggctgaggaagagggtaagtttgaggaagagtcgattcttagtcagaaaaggcaagtggtgttttttattctttctttgattgagagaagtgattactagagttgttctgttgttgggatgtgcttatattaataatatttagtgagtgtttgtttttgttttaccaggtttgatgagtttgatatatccccattgactgtcaaggcgctatcttcttctggttatgttcaaatgactagagtgcaggaggctaccctttcttttgttctagagggtaagactttatttcggtcacatgtttatgctaattcaagactaaacataggctagcagaggttctgattatgattttgccatgttataattggtgtaatttatggaaatgtttctttttctcttgttgtcaaacaacgtaaccacggttttccttctccacaagtgaggtttatttatctatatatatatagggtaacaagttgcctcttttcctttttctctcttgttgtcaaagaacaataagctgttttctttatgattttctttctgaatggaacagggaaagatgctttggtcaaggctaaaaccggtactgggaaaacggcagcctttttggtacttgtcatttccctttttcttcttttcacagtgtttattttttctttgtacaaatttgctttatctttagtagctttgctaaacacgaacagattcctgctattgaaacagttctgaaggctttgggtagtaattctattcaacgggtgcctccaattttagctctgattctttgccccacaagagaacttgcaagtcagatagctgcagaagccaatgtcttgctgaggtaccatagcggcataggtgtccaaacattagtaggaggtacacgatttaaagatgaccagaaacgccttgaatccagtccaagccaggttagcccttacttttgcagttgaaactatggtctaagtgttgcagacgatgttatgagaatgaacgtttattgtatgagtatttttccagatagtagttgcaactcctggccggttgctggatcacgttgagagcaaatctgggttgtctgtgcgattgatgggattaaagatgctaatacttgatgaagctggtcatttattagatctgggatttcggaaggacatagagaaaattgttgattgtttgccacgtcggaggcagtccttgctatttactgcaacaatacctaaagaggtttgatccttagtcgactcattttaaaaccaaatttaaaatgagatgttatatatcataatatcctctaaaaatgtcagatacaattatgaatatgcaggttcgccgaatatcacagcttgttttgaatcgggaacattcttttattgatactgttggtctaggttgtgttgaaactctttctcaggtaagaacagtgaccattatttagccagtcatgattgattaataaaatgaaatacatgtctgctatattccataagtgattacaacagttgttggttgtatctgaaccttataaaaggtgtgataatcccatcttatttcactaaatgcaggtcaaacaatgctatcttgtttcaccacttgaattgcattttcatatagtgcatcatcttttgaaggagcatatttcaaaatcacctgattataaggtttgtattgtgacttctcaattttctcttcagttgcagtgttgcatgtgccttgtggcctaacgttttaccctacaggtccttgttttctgtacgacttcaatggtaacgtcactagtgtatcttcttctccgtgaaatgaaattgaatgtgagggagatgcacaccagaaagcctcaacttgctcgaactcgtgtttctgaggagttcagggaatcaaaaagactgattcttgttacatctgatgtttcagctcgtgggatgaactatcctgatgttacactggtcattcaggtatttgaaaaatgttttttttttctttcttttctcccttggcaatttatggttgcacaataatttctacttctgtgatttccattgaattgataatggcgtgatttgtgcacgcttttataattttcaattaatttagtcagtattgatcttaccaggtgggtctaccaatgtctcgggaccaatatattcatcgtcttggaagaacaggaagggaagggaaagagggagaaggcatcttgttgcttgcaccatgggaggagtattttcttgatgaaataaaagatctacctctggaaaaatttacattatcacgattggacccaaatgcaaaacttaaggtcattaattctccctcttattgtctaattacattgttttactttcattctttatgcttgtaaatatttgttggattagttagtagtttatagttgagacataattaatgtctgtacctagattttttttttgacttagcctatttaaaagtttttccaataatgatgataataacattcaagaagagtatatttttctacatggtaaactgaaagattggaaaaaaaaaa

SEQ ID NO: 188841 - DNA, 4253 bp, Cannabis indica
tcctttatttagatatatagattaaaaaatttaaataaagttaaaactttagagagagaagaacatgtgatttgatttttttttttttttgaagatttttgtttgttctctcttgtcaaccgattttcttttttattttatttgcaagcatcagtgttgttttctttttcttgttgcgtcattgtacatttgagtttacttgttatcattatgaaacgattcttcaaatggctttacaaaacttctacatacacaaataaatgtcattgagaaaaataattaattatagtttcaaatacatctaaaataattatagaaagatgagattacttaaagatgaaatccaaaaaatctctatcgcccacgaagcaaaatatttcaatccttttttattttgtttttttaatctgaaaatccttttttactgagagataatgatccatatacttattgggcacactagtgtatttactcactagaatctcctgtaacacttttaacaaaatctgaccccaaatttttaatattctgccaataaacataccctaaaatgagtgaaaggaaatgagtcatcaggaaaggagtgaagaacatgaacagatatttcttttttaaatatagctttaactaggtgaatcaatcatataataatgaataactaaactgaataaccgatgatgctctctaggagcttaccccagtgagggaaaagagatttgctcttcttattgattttcttatcagttaaccaaggttactgcattgaaacttcctgttccataatggaaccttctaagttttgcgacctattcgaagattcagttcagatagcacaagacgacatcacgtttgcactcaatcctggagaagtggatgaaccacaagaagcaaatcaggttctgctgggaaagatcatcagccgaaatcgattggggaaggctgccatccaagggtctctcaagctctcgtggaacgctatcaaagggtggaaatggaaggagattgaggacggaatcatccaatttacgtttgcaagaagggaagatgccatgaatgttcttgcgcgcagaccatggttcgtttgtggctccttattagtcattatgccatggcctacttggctctccccagcagaggttaagttcgataaaacacctatttgggttcacattgagagtatacctcccttctattggaacctgtccaatctgaaggaattggcctccaaggcctcccctgtatacgaacttccatctggcattgaagacgccataggaatgagtacactccggttcagagctactatcgacttgaataaaccgatattctctggattcttccttaagcgtcaacgtcttaaagacttatggctgcaatacaaatacgaacgtctccctaaggtttgcttcaagtgtggtctattaacacatgatcaaagctcatgctttaaacccccaacaatcatcaaggatgtcttaggtaacttctaccccatgttcggaatctggcttaagagtgatgcagccgagaagtctaccttcacttcgccactggctaagtggtttcaagactgggttctccaaaagtcactctgtagggatcccactcttagaaaccagatgaaagtgcagaaatcaatccgaaatggcgagaatgacgagataagggaatgtagaagacaacttccgagcaaaaaaaggatagtcaccgatgacgatattcctcccggcgataatcagtccgaactggttattacccaactccccctggtttatcttccaggtattggggagtttgccccttttgggaacaattcaaaatgcgtttccatccaagaattgcaggaggcagccgagaagtacgctgctgctatggccaacaagaaagcatgctcttctggagaccaagagacatcgaacgggcgttcctctgttctggtatgtagcacgacagaggatattccctctttggtgaagaccacagctcaagaggtcgaaggtcgtttaactgttaacccaatggagtccttaaatcaaaccaatacatcagaggctgggaccacttctatgcatatgggccctaaagatcccataactaatcaaacggtcccccctaatctctacgggggctctattttggggacccaagcccaagttctacaatggccttctaaggagtgctgggccgagcccaaagcccgtgaactgtttatgggagctctaaccgtggacaagttctttagagagcccaccctcttcaatccaattgttgatatagaggactttagagtccaagaacacttaaacgggcctagaaagaggaaagcttctgatggcatagtaattggacctttgtctcagcccaacccacttcccactccgcctaaagtgaacatctccactgagaaggggtctactgggcaaatccaaacagatgacattggctcttatactgcaaatacaacccaggcgttaaacttagaagtagtcctaaacgaagggagtttttcacctggtctcaatgaagattcgaagtctcaaaccaagaaagggcggggaaaaggaaaggttcagtcaagccatggtgatctgggcagtcgcaaaagaagggggagacccccgaaatcgcattctcccttggccgccacttcgacatcattcaagagaggaaaaaaggccgattcgagattgagtggcaagttcaattcggctactcactgggatggaagggacttcgaactccaggtaaatctagataatcattttgtcgttgttgataaacctgggagacaaggttctacctgtacgataactgaaattgaagaaagcccaaaggactcggcggtgttaaatggacatgattttcattttggggctatggagacttgcccggaaaagtctccaaggtcgccatgaaaatcctagcttggaactgtcgtgggctcgggaacactgcgacagttcggcaacttacgcatttagtgcgtcaccataatcccgacttgttaattctttctgaagttcgtttgtcaatggtaaggtttatgagaatctgttccaaactccactttatggatcaacattatttccctcccactgggcaggcggggggcctaggaatgtgctggatgaaaggagtaatgtgtaatgttcaatcctcctctaagtacctaattagtgctgaaattacctctgaccctccaggaattccgtggcttttatggggcttatatggccctcctcattgtgttgataaggaacaattctgggctcagttgggagattgtgttctaaacgctcaaagtccgattctcttgttgggagatatgaacggcactctaagtgatagtgaatgttttaattaccgcggcaacacctccagatatgccttcgactttcgtcgcatggttcacagagtgggtttaattgacctcggcttccaaggccctcgctttacttgggtcaagggtggcagtaactccaatgggaatgggggcatgaagcgagctagactagatcggggtcttgcttctccagattggagaatcttattccctaatgccatcgtcaaccaccttgcggccatcgaatcggatcacagaccgcttctcatggataccacgggggggattaagagtaagggccgccaatttaaatatgaaaatatgtgggctcgggaccctcgttctttctgggtggtgaaggaagcttggcaagcgagacgccatgtcaatcccatgcttaattttcacaagaaagtcatcgttacatgtaaaaagcttcagacgtggaacaaaacccaatttcgattgctctctcatcaaattcagcaagcaaaactcattcttgagaaggcagagagcaagaacccagataaccttgaagagattgacaaagctaagaatcacctttcggaagtacttttaagagaggagatacattggaaacagaaatccagggtgcaatggcttcaagagggggatagatgctcaaaattcttcatggcctccactataattcgaaggaggaggaactatatccaatgtattaaggagtccgcggatggggattggctacgagatcaagaccagattgctcactgtttccttaccaaattcaaagatatctttagcaaatgctcaagcggcactactcctctggttgaaggcctattcgataaaatgatcttggaccatgacatgatctccttaatgctatcccgaagggagaggaggttatggcagccataaatgc

SEQ ID NO: 188842 - DNA, 2540 bp, Cannabis indica
tatttattggttaacaaatctaaaagatgaaataaaatgagcgtatgatatagctagacgccaagttgttggggagcttttctcataaaacttttccattaaaagctcctgttgaacccccattcagtgattccttacaattcaacatatatgtgtatataaattaataaacttaataaactattgcaactgtattaactcttcttttttttaccctttttttttttttttttgtttttcccttttactttttctgaaaacattcttttttccttggaatgcaccattttcatactacgtaggctaccttttatggccaactgaccatgttaaaggcttatttattagcttccgaagtttattgttgggttatgacactgaggaagtaaatggtattaagtaattgaagtgtaaactttttagcaagatataaaagagtagaaatattgaaaacaaatgcaacttaacacctaaaattttgctggaaaggcatttgaattagtttttatggctaaagttgaaaaaggcaatttaaagggattctctttctttagtctttccctgctcttcgttttcttattcttattttttcaattttcagagtaataatatgtgcacaaacaaattacacacaaatatgtgacatacatttatatatgaagttacctcaaccaattatttttattcaaaatgaattctacttatctaaaatgatttgtcacgtgagtgtgatttatatgtacacatattatcaatccttttttaatatccttctatatgctatataatagggtgtacttgctaataatatactttttattataatttttatttttatttgttataaatataatatgttgtcacataggtataaaagaattatcaaatggctgtgcaccataaccgaataactgaattaaggaacgaatctttctcttttttttattaatttttctcaccttccccatgaaggttccaaaattacatacaacgatcacaaactacaattgcttataaatttgaagcatagcaaccaatacatttcccccttttctgctctttccctccttttaataataattgctgactctttgttcaagaaagatttacatattttctttattttcaaccaaaacccattaaagatttaacctctaaaaaaaaaaaaaaaaaaaaaataccaaaatgtcacaagaaagattagtcattgtaacctttgttgttcttgctgtttttatggccatggtatcgactggatcaggggttggagtgaactggggaacattagctagtaatcaaatttcacctagaaagatagttcgaatgctcaaggaaaatgggttcactaagcttaagctgttcgaggccgatgagttgattttggcggctttaatggggactcatattgaggtcatggtggccatacctaaccgtatgttggaagaaatgagtgacgatcctaaggctgccgcttcttgggttcaagccaatgtgaccagttacttgtacactggtggagtcaatatcaggtttagctacattatatatatggtattaatgtttgtgtgtgtatgaccttcctcttttcttgttcatcaagtgttctactaaatttcactctgaaaccctcttctatctaatttgggtaattggttttcctattatggtaaattagtttcccttttttttttatatattaaattgttggtttattaagactaccaacctctaatgtcaacccttttattcacataaattcaacgtttaaaggctgtaattaattaattaatgcttgaagattccttttccagttttttggttttggttaaattgtgaagactaggtgtttgctttaatacaagctgtttggagtgtttactctttgttaagaagcattaaacttgaaatgggaattggtgtgttttttcaggtatgttgctgttggaaacgaaccattcctagaagcatataatggttcttatctacatactacattgccggctcttatgaacattcaacaagctttaaatgatcaaggtgtggggtcaagggtcaaagcaacagtccctttgaatgcagacatctacttctctcctgattcaaaccctgtaccatctgctggagatttccgccctgaaatcagagacataacaattgagttagtccagtacctccaagtcaatgatgctcccttcactgtcaatatctacccttttcttagtctctacagtgatgaatacttccccatggactttgctttctttgatgggaagcatttcaagcctcttatcgatggtgatagagtgtacaaaaacgtgtttgatgccaatttcgacacccttgtttcggccttagagaaagcaggtttccctgacatgaagatcatagttggagaagttggttggccaactgatggtgacaaaaatgccaacataaaaaatgccaagagattcaatcagggaatgctgcagcatgccctgagtgggaatggaaccccagctcggaaaggcaagatagagatttacctgtttagtctcatt

SEQ ID NO: 188843 - DNA, 840 bp, Cannabis indica
aaaaaaaaaacataaaatagaaaggtctaggaagtttacttagtctagccattctttgatctcaacaacctttactcacttctccaaccaaattaaattttaccaagcctcaaaatccatacaaaccacaaaacatttcagggaaagacttccatggacaaggttacacattcttctaagtctttacactcttactatttggcattttcacaaacatcaaatatgcttgcctaattgatgaatctccaactttgcttcaacaaaattttcctaagatggtatcaaatctcaatcatatcctctcaaactccacacacttctagttcaatgcaatcattcaaaaccatatgtttacaaataattatcttggttgaagttactaaaaatttgtattagcatttctaactctaattccattaaaagaaatcccatttagattatcacctaactatgcctttcatacaattcaaaatgaagtctttgtcaccaatatggagaataaccataataacccaacccaacaataatatattacatacataatcacacacacacacacacatatatatatatagagagagagagagatgtttagggaagaaacctgaagaagatgacgagcatgataccgagaatttcttggtttgagaagaaactaaaaaccctctgagactagtagaattgagatgaatctgtgaaaacaaggtcatagatttccatcctaaagaattacaagcactgcaaaaaacaaaatcaaagagtcaaaaccacaaataaaatcacctaagaagctcaacaaaaaaaagagagagagagagagagagagagagagagagagag

SEQ ID NO: 188844 - DNA, 1783 bp, Cannabis indica
tttttttttttcttttacaaaaattaatacctaagataccaggctttgcttatcaaaaccaatgattcattataaaaggtaataatactaactaatacagattggtcttaaaagaattcctttataaagttcagaaaaaataaaatgccgaattatgtgaaaagctaaattgcctaaaaaatactgctaatttcaaagttaaggacaaaaatctaacaaacttatttcttttgaaatattagatctggattatgtctcctttctgatttctaaatttgtatttatcatacagatttttctcgttcctcttgcattaatgatggattataatctggccctttggtacattgttgccttttcaggtaggcattattttatctcttgtttcaggtttcctttaaggcaacatatgtcataataatcgttgacagaaaacttatttatactgtatgatttaggcttgtatatttacggaagtaatatacttgtgattaatatgataaagtttctctgtttcatctttgtaatagtaatttcatcatcctgttgaacctttgaaatgagaaaagctaaaattaaggttttctgtacagttaagttgtttggaaggaggctgttaaatatccatggattatttcatggctgattgtttttcgattggtggaagtggaaattccattttttttattcagttttaacctgttatcatttctttttgtagttatgtatattttaacacaacaacctgctttccaaggatcaggtatgatgtaaacacgagttttaatagtataattttttcaatttaatactatttttgtcttatttactttctcttcagaacttttcttccttgtaccaaatgatgataaattttctgtacttagaagtctattcgtttattccaggtacttctagtaaattaacacctctacagctagaagccttgttaactgaagggaacacgtcaagattttggctggttagtttaatagattttctgactttttgttatcattaaatacacacttcgactgttaatttgtgctgcaataatttcctaggaaaataacaaaatggtaccgaaattattcaacacatagtacatctaatagattttcttattttttgcatccctttactcatttgtgtaattgcagtcaatgttatcccatattatacttcccttgaggctagtcctatctatcttcataccaaaatatatacattagttcaaacctaccctcgacctcattcaaaaggaaacagaacgaaactcacatttatttcagcctaataccaattactgtgctggattttaggtccctggaattacaatcttaaactcaagtctcacaaatttttagattgagaattaaaatagttggcttgctggcaatatctttaatttatttcacattatgctgaacatttgagtgacactcttaatttgataggtagagttgcgttcctcctattcatctgattgcatacgcacaagtcggttctttcctgagctctcaattacgtatgcttcttgtctaatgtctatcatctttataaaaagctcttattgattattagtgttaccaactttataactctcgtgaggttcatgatcgcttatgtttctctgccgcagatactcaaacaaaaatttatcttttgcaatggttgaccttggagtattcccaaatgctgcagaaaagtttggactatttcttggtgataaactatgaagaactaagcttttttttttctttaatcttttcaaattcacact

SEQ ID NO: 188845 - DNA, 2930 bp, Cannabis indica
tatatatatatatatatctctctgatttgatatacttggaatgttaggtgctttggtgatcataatttctagcctgaagtaaaagagatcaaagagataaatagtactacaaggtatgtatgatcatcttccttttgcttgtgtaatcattatgattttgtctaatatgtctcaatttagagtgcctttaaagtttaaacctttttcttttcctttttcttgcattgatttagaaaggtttagggaaagaacccataactactcctctccttgtttgattagctcagtcttcttgtcttatactctgagaacccagaagaagaagaagaagaagaagaagaagaaagaagtatgtgtttagtgattgtagacttgtagtagtattatttggaaggtttagttctgtttacttttttggttgctttagttcttagatacttgagggtgacttacttgcattgtttcatggtaaatactttgaataagttgtcctttttctttcaccatgaaacaatatcttgatgcaaatatactcacttatgtgaggaattataatacctgaatggaccatgtggaggcagtgagaacattttttagttcattgtttttcttgtggatgtgggtttatttcatgcgtctctgttttaaattgggcagaaagaggggaaaggttgctatcttcaagctgcttcttgttgtgtgcactaataagtttgtaagattcatcacatttagtttaaagtatgctgctttattcttcataattttgtcatgattcctatatgtatacacacattggcatatggtttgagtttagtcttcttatcttctataactgaactattcatatcatcaaaccatcttctttcttaagctatacatgtttacagctggtattgatatgtcttctccttgtagaactcaaaataagttgcataaataatgaaaaaccaaatttcaccatgtaacaatatctacatgcaaaaatctcacttatgtgaggaattatagtagaatggaggttgtgagacagtgagtgttagatccctatctctctttcactacaacttaattcttgctgttctactgtatttctgctactgttcttgtaactgggtttcatatcagaatctggttcttatcagtgacaacttgttttagttcatttttgtttgtcatgaatgatcaccttcctttgcttgtgttgtgtatgcatgatttgatgcttttttgtaagtttagagacttcaatatccattttagactgtattgaaatggcacaacaagagttgttcaagctaagctatatctatctatcgagatttctctttctttattttgtgtgctattgtagttgtaggaatattttctcagcctcttggtcttgcaaatggagaagttaacacaatctttgagatcctttgagcagcaacggggtgatataggaaagacacttgaggacctacaatccatctttaacgagcttgtagagcgtgagaaagaaatcctcactgaggaaaagcgtatgaaagatcaagaactgaagtttaagatagagtatggaagaatttctgagctgaaagaaagccaattgaaaaaggtggaagcatctattcataattgcttgaaggaacttagtttaaaagaagaggagttcaatgttgttgctagtaaaacaaaactagaggagcaaagactcgaggcgattcagaattctgtgaaggaatgctcttgtcaattggaatcggaaaagaaggaacttgagtatgttaaagcattcaaagagaacaatcttgcctcactcaagaaaacaatggttgctttggagaagaaaaaggtggaattggaaagcattatacaattgcaggaagaagaaatggagtccagattgaaggagcttgaactgatggagaaacatgtccaagatatccttaaagaggcacagttgaaagaaaagagtgcttcttctgctagaaagtttgttgctgaagcccaaaaaaatatagatcaacaccaacaaaaagagttggagtttgagataaaagttgatgaatttcaacgaaggctgcaacagtttgagcttgaaaaatcagcatggttggctgaaaaaaacaaaatggttggtgttgttgtaaagattgaacaacaacaagaaacaaggagtaaaggaccactaccaggtaataaatttctctagtttgtactagtttttgagtatttgccaaacttaacaaataatctaattgtcattgtttgttggtctcttcagatgttgaagtaagtattcaaaacctcatcgaaatagaggaagttattcatgctgttaagctcatttgtcagctgaaactaactaacaagttttcacctgtgtcactactgcttgattacatcaagaattctgagaatcaaacctccattgtttgtagaggaaagagatcaaataaagacaaggtaatgttatagtaaaccaaacctctcaaacactgcaacttaatcatagtttctcattctcttatctctgttctttttctttgtatgtatgcagattaaagctgctaacaaagagatagctatattgaaagcagtgaagaattgcattcaagattgcaatctcgaatctgtgttcccaaaagtcaaattctaccaactgggtcagcgctgtattgaattagaacagaagcttgaactctacagcctacaagaacaatcgggaaaaagaaaaaaagacgattcaattgttggccaaaggattaaaatcaagtattaatagaaatattgatacagttggtgcttcatcaaaccactcttaatttacagtgttaatactgctactgccaaggcaacagacattgcttgtatatagtttagcctataatctattaaagttatgacttttaatgtttagatttgttaactaactaactgttttg

SEQ ID NO: 188846 - DNA, 1373 bp, Cannabis indica
gattagttttacatgtcaatcaatagtggggattggatggacgtacacctcctaattgtaaagattagaaaagttggtcaatacttagcctaatttgataaaaaaacagctaaattaatattcccacagcaatttggaattctctgtcgttctatttggaattcagagtctgtcggagctctttttctccggccatggcgacgacgctagaaacgatttcagaagctctccaccagatagataccaagaaagaaaatcttaaaaaagccttcgacgagcttcaacctcattcatctctcatcccctcattctccctcacctggtccgatctcgattctcacttcacctccattcagaattccctcaacgagaaatttcaaactctcaaaaccctagatttttcaccaaaccaaccatcttcatccccacattcaaccactcatccccagcctggcccttcttcttcgtcgccctcatcactcaacgagaagcgtgttgacacggtttcgaatggtgattcggatttggtgccgcctcggccggaattgatagcttactgtgagaagatggatggtttggggttaaggaagtatgtaagcgacgccacgaaggagcggaatgagattcgggttgagcttccaggtgcgattcggctagcgccggacccggctgcgatgattcttgacgccatggaagggttctttaggccgaacgagaagaataagggggataaagaccttgagttgagtagtgtaagaaggagttgtgtactattgttggaaaagttatcggctgtttgtcctaatgtgggagttgaaactaaagagaaagccaatactttggctttagagtggagaggaaagatgaatacaggtgatgatgagaaccctttggagtcgttgggattcttgcattttgtctctgtttatgggttagtttcagagttcaacatggatgaacttgtggacaattttgttatcatagccaggtacaggcaagcagttgatttgtgcagaaaaattggcttgacggataaggtgccaggtaatgctttgttctataaaactttgttgttatttattaacaagtttatatttgttatatagcttgaaaggtagtcttcatgatttccaaaaaaaaaaaatattcttcatttcaatgtgtaagcaatgtgtgttattttggttgcactatcaacatttacgtagttaagaacttaggaagtatgaaaaagggaaaaagattgcaatgccattttgtaatatgtttttagtttttcttatcttgcctatttttttgtcttaaacagttttttccctttttttttgttttctgtatcgccatttatatgttggcgatatttccacagtttt

SEQ ID NO: 188847 - DNA, 2769 bp, Cannabis indica
tattaaatactcttatttatgtgaattttgataatattatgaatgaagtgggtgaaaaattgacatactaaccctctctcacatcacattatcacttcttcttctttttaaaacttcaaagccataaaatgattcaattttttgatgggataattgggattttaactttgtgtttactgttagattagataagataatgggttatcttgatattgaaatattattcaattctttacataataatttaatttgactaaattgaccagttttgattgtttgagctggaaattatttgacatatttaaaaataacccaaccctttggtaaactatcattaatcactttgtgggtataactcgcaatcttttaatttcaaactagcacttgacctttgttcaacctaaaaaaataaataaatactagtgaattcttcaatcaaagttaatgtccttttttataactaagatttgatttaaacctaaaactcatgtaatgttagtgtttctttaaattaagataaatagtttgtttcaaaaaagtatcaatcccactctcgagtcaaaataacttctaacacttcatgatgatctaatagtagtaaaaaagaaattagatatattaccaaacacgcccaaataattaattaatttagatctggaaaaaactaaaatatgttttattttcatctaaagctatttaatttaatttatgcaaagcttaactaaaaatgtcatgccaaaaaaaggtattacaagaattgtgtcggcaaagttagaaggatgtgccacgtgtactaatcactaatttttttttttttcttttttgaaaggcactaattgctttagagacttggatagaaaccagagacatattacatacaaatacaatcttattttagttttaatttttttctgaaacggacaatctcaaattgttgtctgtaaatacttgtgtcgtgttagtttggtttatatattttttactttccaaatataaattgtgttgtgcttattgtaaaaaaaaatgtgactcgtatcgtaccgtgtcataaaaaaaatataagttgtgttataccgtgtcataaaaaatatgaatagtattgtaccgttataaaaaaatataaggcatgttgtatcgtgcaatcattttatatgataggcccgacatgacctacaaatctagtaattttgtaccgggcttgaattcatatagtactttatttgaaccaacctgtttttcttaattagacaaacttgtctttttatagggacttaaatttatgctctacgtttttacatttctattataattgaggatctaaatgctaaaacatatatatatatattttcagttgcacaaaatcatattaaaaaaataattataataattataatttgaatataactattattttaattattaaataaatatttatcattgttattatcatcaaattattggacattttaatgtgttgtgcactcgagctaatctcatgttgtactttcgggtttgttgtacctacgcctatattttttcatgtcatgtcatgcctaagtctatattttttcctaccgtatcatgtctaattcatattttttttcatattgtgtcgtgcctaagcacatattttttgatgtcaaatcgtgcttatgctctctgactcgagccgatttcgtatcgtgtcaaaaaattcgcccatatttacaccacttttgttgtcaatgtcatgccaattggaaggacccacatagtgcatgcctttggctttttctccgttagtaccatggcattttcattcttccatttatgtgctcttaaatatgaaaaatatatttaagagacatgaatatgatgatgacataacgtaaaactaaaacaatttcatttttcttatcttaggggaattacacttaattattcaatgatctgatctaaaataaaatagaatagaataaaaaccagttccaatccaaaaacgacttccttatctattattgggctttgcctttgactgttgtaccaaagtcatgggtcgaaagaagcccattggtgaatacagatgaagaaatgaatcacaatctggccgtgctgacgtggtatcatagatgccattgagagatagacagctttaaatggggcccacagtaacagtgtttgggttgtatgatggaattcattatccaccgtcagttcggttcatcaagttagccacccaaatcacgattctgctctgctcaaaatttgctaattaattaattaattgctcgaaagcaaaaaaatgtggcataatgtactgataaacataggatgcgtgaaaatgaacatatcccttttttcttttttcgatgaaaaaataatcataaaaccttagtcaatcaagaaaatgagtgtaaagctgtaacccccagtaaacaatgaatcgttttgctgcattacaacaatatataaaatgcagtcctcttcttgtagtgtgctgagcttattttatttattattatttttttttactttcttttgaacctatcaactactacaagccacgcaagatgcaatcaattcaattccaattttaatagttggtaaaccaaggtcaatttcagtatcttctgcaagtaacattattatgtaattcagtactatttggagtacatcatattaacgtagacatgagaaagaaatgacaataattgaaaattaaagatgataattataaatgaccatcattattatacaaaatcatgacatccaattaaccattgatagttt

SEQ ID NO: 188848 - DNA, 3049 bp, Cannabis indica
aaaaaaaaaaaaaaagaaaatcagatttctctatttgcttactttgttaacatgtatattcaattttagttggaacaaacattggtgatgtcatgatctatgaactttcaacccatgaacggattgctgtgagaaatttcaaggtctgggaccttacatcttgctcaatgcctctgcaggtaggttgttgtaatagtaatttaatttagtttaactttaaatgcccagtagatacttgtagccttatttttctgtacttctttttaatgtgaaattcgcttttctttaggcttctctggctaatgattactcggcatcagtccaccgtgtagtgtggagtcctgatggagccctatttggtaattctagtggttttgttgatttattatactctgtgagcgtatcagtactgtttctttgtaaccaaacaaaactattgtttctttgtaaaagaaaaatattaacaataataataataaaaacaagattaatgtttcatcccaaatgaaaatttatgtaaaaagacagaaaatgggttttaagttatttgtctaaatcatcttctttgcttcaggtgttgcatactccaagcacattgtgcacatatactcgtatcatggtggtgatgacttacgaaatcacctggaggtttgtgctgtcagataatctttgtttagtctttctgctattattttgtcttatttgtccccctattattgttttatttatgttattgttatgtgtataagtacacatattttttaaatttagtaaccagtagagagttagaagccttatagacatcctatattttacaacttaagcatcgtttcaatattgatttttcagattgaggctcatgctggcagtgtaaatgatcttgcattttcatatccaaacaagcagctgtgtgtagttacttgcggagaggatagggtcattaaggtttgtttttattaatgtttgatgtgattggtgatgcatgatgcaattattaagcattcaagcttgtgcaggtctgggatgctgctactggggctaagcagtatacttttgagggtcacgaatcaattgtatattctgtgtgtccacatcacaaggaaaatattcaggtgattttctttgcatttatcatatttgcttgtgtcactgaatttacagacgaaaagataaccctcgtaagcagtgcattgaaggcaaaagatagatttgttgttttttaactttaaattaattagataaaatattctgtatttttatttcataaaatgaagcaaaacaaatttcagcttctcagtctgttaactgaagtactatatatggagtactattatttgttcatttgcatatattacagtatttgccatctgaattttactcaagtttctatctcgatttttgtcaccacaacctgggttgccataagttgcttactagaccatcaatttaaaattttttgcattaatagaggagtgaagttaactttgcattctgttttatatatctatttaactcaattaataaacgaggaattatatattttaactcagaaaattagcaatccaattttttcttcatgctcattaatttattttcaattttatttcttgcaaaattaaatatctctagtggatatgttgactatataacataggttgactatatatgtatgtatagctttttggcttaataattcctttttcccagttcatcttctcaacagcaactgatgggaaaataaaggcatggttatatgataacatgggttcaagagttgattatgatgcgccaggacattcagctaccactatggcatacagtgctgatggaatgaggtatagaacagtaacttgtgcaactgtacctttttacctgctagccacatgagactaattgatctatttttgataggttgttttcatgtggaacaaataaagaaggagagtcatacttggttgaatggaatgaaagcgaaggagctgtcaagcgtaattataatggtcttggaaagcgatccgtggggattgtgcaatttgatactacgaaaaataggttcttggctgctggagatgagtttgtggtgaaattctgggacatggataatgtgaatctgttgacaagtattgatgctgaaggtggattaccggtaggcatctttttatttctttcttatgttatgtaatcgatttattgtatgttactcactaataatatataaacacgtgttgacacatattgtatatgcatacatacacacttccaacacttagttcaggaaaaacattctttttcaactttagattgcagaaagaaattttagtctatcttcataaaatcctcttaacaccattgtttgagtctagtatttagcctaagttgactttggaaagaaaagcacctagatcattgttctacggcttccctgctcaatactctaattaacttgacctctttcttgttcttactttatttatttattttgcaaagttttattttgtcttcttgttatggttttctcttcataatagtacacatttctaccttttagtttttgtatttctcacttggtttatccaattcttgtctatatccaccctacaactattttttttttattttgatgatcctacaggcttctccgtctattagatttaacaaggaaggaatacttttggcagtctcaacaaatgacaatggtgttaaaattctggcgaattcggatggatttagactgctacgaaccatggaaaatcgtacgtttgatgcatctagagttgcttcagcagctgtagtgaaggtgagtctttctgctttagactcttgacaattatccattacttgaatgtgaaactgaaaagtctttgggggtattatggatttcatttttgactcttaaattattaatttatatgcagcagcaagcggctcctgcaattggcacattcaattcttccaatattgttgggacaagcatgggagatcgaacccctccagttggggcaatggttggagtggtaactagatcatctctattctctctctctctctc

SEQ ID NO: 188849 - DNA, 3406 bp, Cannabis indica
aaaaaaaaaaaaagaacaaaatagaaagagcagtattaaaaaaatcaagaaatcaatcattttataaatcaaaattgatattagaaagtaaataaataaaatatcaggttgcaaaaaagaccccaccatgtcaaaatgtcaaaaacttaaatggaatgaaattcaaccataaaccctttaaggtcaaccacacatgttttcagttaatactccattcacgttgaagttgcatttcatagtaacaatgacaccaattatcaaaccaacataaaaataaataaataaataaataacgcttcacaataattttaccatcaagatcaaaaaagataagtatctaaacaaaataaaataccttcttttttttttttgtatacaagtgataaatattgagaatttgagagaaagaggaaggaaattaaatctacctttctccgtaaaaataaagaaaaatcagataaaaatccaaagatttaagaatatacaaatgcacctgtgttattgagcagtgggaaaattgggagagcggtgagatgaagaagaaggaaggaggtggaacatgtgtgaaatacattgtcgatttcgttttttttttttttaagaaaagcgaagaaatatattaataagaagcatatttagacctcgcggtcattacataataggttcaccggaattgacgaaaccggaataacaccaaacttcttgtgggtgaacacccacttggccacgttatggcccgcaaaattacaggttctactaacataagaaaaattacaactagaaaataaaggagaagatctattacaaaaagagatgtagttcgcaagcgcccattgaggatccttcccaataagagcattgataatctcactcgagtcattctccacaataacaaatttagccttgagatccaatgccgtttcaatcgccaagcagcaggccgccgcttcttcacacaacgcatcagcaaaacctaacctagttgtagtaatccccagcaccctgccaaggtgatccctggccacaactgctgaacacatgctttcttggttttggaagcctcctctttgaacctcttgatgaagttcttcaaggtttctatcagtagttgcttgatgttagttaaggcactaacttcaaggtttatctttctggctacaacaaattgcctcctaaagttagtttacaatttgtttcagcaatctacagatccatgttctaaatttttgaactattcctctgcagatcctcctaatgttaatgggaaacacaggcatttagcgtcattgatgaccctcatgattgtcatgactctattaaacctggataagtgatcgcttagatctgtgtcactagtgtacatagtcatttcaagcattttgaagttttttgggagctcaatctctagtatatttctcatgcaaggctcccgatcctcgcaatctgactccgagtcatctcccttttgtcttcgggagacccttgctatatccttctggagaactacaagttcgaccaaaattccttcattaaggatactcacagaaactggtgcagttttctttatttgtttaagtcgtgccctcaagtccccgtgtttggcattgagtttgtgtcttggatcaacatgtggatctttcctggcagagcctttttattttcccgactcctaatgcacggatacgctcctttaatctccccgatcttggggactagttttccttttgggaaatctaccccctgtgaacatttcccttttgggagatcgaaacaaacttttcgtggatcatagatttttttgtttttttcaggcacggtcgtaggatttcacttcatggtaggcttttctggaggatacctaatgggactaggctccttactattttgtttccgacctctttcaggttgagtaggctctccatcagtcccttcccacacggacaggactgtggtgaaatccatttggatgcccgcattttctattgcctttttcatggcaatcaatttctcttgcatcatcttgttttacactataaataaataccaaatgtaattaataaatttttacattttatttatataattaatataatttttatataattttaataaaaaattaatagttttattaactttttatttgcatcttcctataaaaaaaaaagtaattttacttttgaaaaattattgtaaaagttgagtctaatgtaactaactcattttgagtcaaatataatttttatatattttgaataaaaatttaagatttttattgactttttacatcaattaatagcttctgttataatatattaaatcaatctaaatataacacatcaactaatttgaaaatattttgaagataaaaaaattgtccacatgattaatagtatttaagaaaagtaattagttgagttagcacacttatattggttttttttttaataaaatacaaacttcattaattcaaactattcatcaacaaggatgagattacaaatggtaaataaaagccactaaaagtacaatcagcctcataaagagaagatcgtgccaaaacatgcacaactttataagcaaatcgtttaacaaaattaaaagatgtatcattaatatcaacaaacaaagtcttacagtcagctaaaatatggccataaggtgaagccatatatttaaagcattgtaaatctcttatgactcttaggcaatccgactccacaacaacatgactccacccattagtcttgatccaacttaatgcttctttgattctaattgcttcaacaacatgaggttgtaaaaccccaactttattcattgtcttaacttggagaaccaaactagctgttgttcgagctactaatctaactccaaaacgacgctcatttgcaaaaagtacttcgtcaacattaactttgattgtaggaaattcgggaggagggggtccaatgctccaaagctatcacatttgagacaccattctcaacagcagccgaaaattgtttttgagcattataccaatcaacaaaatttagtttagctaacgaaatcacttccaacattgcaggttgtttggagtttcaaaccaggtcattcctcattttttatattgcccaacatatcatagatacttcaatgacagtagcttttctccaacactttcattccttttttgaatcagcctgcaaaaaacattgcactagcaacaaccgaggtcacaccagcagcaatccagcagctttgagcagaaacacacctaaccaacaccaacacgtgcaagattgtctcaggtgcaacacaacaaaaaggacatgttgtaataatgggcacatgctttgtaaaaagctgaaatcttgttaggagacaattcgtggaggctctcgaaagaaaattttttactttggga

SEQ ID NO: 188850 - DNA, 1079 bp, Cannabis indica
catatatgcgagatatgttgtctgttagaacaaaaactccaagtaatccattagttctttaaccaatttacaatgattaaatcaaactaattacctcattatcgatagagtttcgaatttgaaggcacaagtgagaatcctcacagagccatatttttcttgaatcgtcttactccattccaaataattcgaaccaaccaatttatggtctgtaattttagacaccacgagaaccacattagaaacaactagtggtttttgatctaattttgtctctgccataacttcaaaaacaattatcggaagagacaagacagagttgaacaacaaagaacaaataaagaacacccaactacaaagtagggataaaaaaaacaaactacaacctgagacaaacgcgagtaggtttaagaggagctgaaaacgaactgaagaagatttgccgttgaagacaccatcacatgcatctccacacgccagcgcgtgagatgttcgtagaagaaagaggcggcgcttgagccacacgcacaaggaatccaacaaccagactttgaggtttggcagatcggcagctggacaatcctcctgagtgggcggtgagacaaaacttgcactccaaatagggtttccgaaaaagaaccctaatctctttttttaagaaccttaattccgaatttcgaatcacaattttaagtatggctctaataccatgtagagaatggtgaatagaattgtgtgttgtatttcatagaatagtatatatttatagctaggagcctaaatggaaaactactaaatacaatttttacaactaataatctaagaaaccaaaacaaagcacataaaaaggaaagctaacacacaacataatccctacattattattttctacccttcgctcaaatccaaaaaggaaaggtcgtcaaaatgtttagttttatacacccaagtagctgttcagaattttattttctcccaatcaccttaactttcactaccatcaaaaattctagtttttttccaaccaaacagcccaaattaatgccaaaatcgttgttctattggatatggttttttgg

SEQ ID NO: 188851 - DNA, 3716 bp, Cannabis indica
aaatcaagcacttcgaagcccattataaaatgatcacctattaaggcaaatacaaggaaacgggggagaatttgaaatctgcacaattagtttaaggcaattcaagaagacattgactttaaacttatccaaataaggtctcttgaagaggatgtttggactgcaattgtagagcgagatcgtgccttagcggtggaacagaccttgactcttaaaaatagggagttgaagactgaattggaggaggctcttgatgagcaagacaacgccggattgcagatgaaagaggcagagataggcttatattatgccttcgagactgttgcttagtccatttggcaagcggatctgaacatgtccctcgccatttatggtgcagatgcgaagggttgtgaatttcttatgatgtgcaagtgtacacaattgctagaaaataatataatgaaagtaatattattttcacctcaaggattgttcgagaaagtattgcaaaaattaaacacttaaaaatttgacatgaaagcaatacaatgtaaaacacaaataatttagagtttgagtttttttgataattgaaaagaaatgaatgtaaataaactttaaataatattaaacaaataaggtaatgatagatcaagataggtgcaaagctagagttactaatccccctaatatgtacttttgggcaaataatgctacacaataatgctacagcaaagctgtatttgtcagcaacaaatcaattagttcataagctagcctttttcttaagtgttactgagactggtagctgcaacatttcttgtgttcatggtgttccaatcttattttaagggcaaaataagactgatgcctgaagaaaattgttatttgaaggacagaacactgagccccagaccaatgtcgacctaggcacctaatgtgcttccacactagcgcctggtgatgcttaggggcttaacttgcaactcgaacgatattttctcctaattccaagtctcatatcttgattttagagcaaaacaagaaaaattcctgagatagaatcgcaatcagattgatgaaaccaccagaagtgtggctacgtcaacctaggcacccagtgactagggtgatgtcaacctaggtgcctagcttttcatttgggggctagatggatttttttccttctcgaagcacttgtatcttcctcatggatgaaaataagggaaatacgcaggcaatttctctagaaaaaagtcctagagtgccctcgatggagatacgtcaacctgggcacccactatggcctaggggcatgaactgttttcccatgtagggttttacatctttgaaattggttttgttgatgttcaatcttattttagatgaaaagtgctcaacaaattttagttttgttaaattttcactggcaaaccttggtaaaatgaaattggtgccaaggttgaaatgtcaacctcggcgcccataattttatatgggctcctttgaaatgtcattgatgaaataccatgtcctttcaatgttccttaatggatttgaaaaattggggtccaagtatgtccctaaaaacctaaactctagtcacggtgcgcccagatcgactatatgtcaacctgggcacccattagggcttccaggtgcccaagtaccattacatgtagactcatctctaaagtctgaaacttggttggggcatgtctctcatgtatgttaagataatggctaagtagatttcccataaaaagttgatgggaacaaaatctaatgcgagacggtgcacaggatgtcccctgggcgcccaacgaactgatgttggaccccagttaagccctgggatgtccacgtgacatcattagcctcatggttcatcgttttagagtcactaggacctgttcacttgaactttgtcgaaagattgcagctagaaatgccttcattggatcttagtgtctacttgagtgcccactactgtcaaccagaacactgacacagttttcaatgccaaaattaaccaccattagccgagtgactggggcctaagattgttttcttcttgccacgtgtcaaaagtgttatccatgtcatcaggttaaattctaggcaaacacagagtattttttttcacaaaagtatatactagtttaagtatgcaatcatcagattaaatttctctcctgataatttgctctttaacatatactactatctgattcatttgaattagtccattaagcacgataaattaattattataattattttttgaatattaatttttaacaaaatttggtggaataatttgtcatgttattttttttagaaaaatatataatatatattaaatttgaaatttgataaaatttaaatgctaaatggcactagtagtgtctagtctcctctaaggtgcaataacgctattagtattattaagtatcggatctcatataatttaatataatatttttatgaagtatctcaaagctccacttctgatggtgctaaggacaattggtacctaatgcaacgctcttaaacaaaatatatattatacaaaatttaaaattttaagagtaatttgcaacataaatacttaagtttaacttccagttgtaaataaatacctaagtttaatttttggcggaaataatacctaagttataattctgaaacttttgtaggtacctgactgttaattattaagtaaattgccacgtggcaatttctgattggtacaagtcattaaatttttatttttaaaaaaaaataagttaaatataccaataagaaaataacacgtggataatgacataatatttaacggttaggtacctacagagttccaaaaatataacttaggtattattaccgccaaaaaataaatttaggtatttattttcaactgggattaaattttggtatttatgccgcaaattactcaaattttaataaacaatagcataggaaggcacggattgttcccacttcccaggtaagtgataaatctaattaacattaaatgaataaaaaaattattagaaaaagaattgagcataggttcgaaacaaagggttaaaaatagattattttgatgagagactatacttaaagtgtttatatccaactatattattagataagctttagaactcaaaaacagttttatatccaactagattattttgatgagagaccatacaacttttccaagaacccaaccgctgattgtgcaaggagtgacaacacagagactatataggctatattgcagccttaacacacaacaaaaattgtgtaattgtactactataacattaccattttcccattccaataacataaaagcccacacaaataagtatgttctctaataaaacatagtatctttcatactaaaagctataataatattaatattaaaggttaaggaaaaaaaaaatatacccaatatttttgtacctcactagaaaagtgtacacaaaaatggatccaatattttgtgattcttaattgactcgttgtaggtcgagtctgagaaacctggacaatggacattgcgcgcagcagtgatggtagttcttgttgctttataactcataaggagaataagtttaatgctgatatggtttgaagaaaaaagactcgtacatctatttgactatttctactttagcattattgaataaatatcaatttacctacaaaagaagaaagaa

SEQ ID NO: 188852 - DNA, 2920 bp, Cannabis indica
ttaacataaaacttatctcactgatccaccattcaaatcatcctagagcattattcagcaaacataataggtccaaaaaaaaaaaaatctaaaaaagcttatttacaaggtacgttacagaaaaactacatgaggcaaaatttgtatgctcatctatgcaataattcctaaggaactaattttcaccaagcaatgtacatgtatttcttgggacatcagagcttttcctagtcattactattgaccatttgaaaagagaagaaagaatcaagcattttagaactgatgcaagataatttaaaactaataagagaaaaggattttatctttaatgcagattatagaaataattacctgtaagaagtcatcatatccatcggtggaattaccacataaaaaaacaaacttaaatgacccccctggatctttccttctagtatactttattagcaaaggtcctattgtatgcattgccacagcataatcccatgatagctcattgtaaaaagtggaacttccaactacaagaaccaacaaatcatcattgctaaatccattattctttcttaactgaattttggattggctcttaatgtagcgttctgcagcccaaacatctagtggagatccgggaatgacaaggaagtttccagagtcgagcacactatataacatctgattagggatgcaggaagcaattaaatttaagaaaagtaatacaaataagtactggaacaacaggcaacataacatttaaaaaaaaagaaagaaagcagatctaccggcagactgaaatctggaaacacaataacattagctctgctaaaagcacttctccagtaagaaattaggtgcatccaacccatttcctcatacatcgaaagacgctttgcaagggtatcttcttgaattatccatatcaaaggtactgaacagaaaggttcctgcataaggctgcaaatataaaacttaacgatcactgaatcttcaaataaaacaaacttaatattgatgattgtcacaaagtacatatttggtcattataagctcatctcattcctacctcttaactatcaatgtaagtcatgataaattcctaaactaattcactgaaagaatatccatccctctccctttttcctctcaaatatgaaaataatatttaagataaatagctcatgtactaaagaaatttatcgcctaaaatattaaataaaaggaaatgcaaaatatgaaatgtaacaagatccgtcaacaaggacatcaagaagaactaaccagtcggttgaaaggaaataaaaaaaaaagcaatttaacctaaaatgtaaacgtcaaggaagctacaaaaatctatcaaaccaacccaccttgaaatagccccttttgcttcaagcgaatcaacaataacaccttcaaagctacagagaaatgaaaataaaataccactgatcagtctatgcaaacaaagaaacagagaagaccctctctagaattgaagcttccctgattgaccaaatgatagatgttttcaagccacaacagtgaagttgggaaacccagaagcaataaataaataacttcatcaaaaataaaaaacacaatgatagagtagaggaaaacatacattgaccaatcaatgtgtccataactctcagaacctacaattgaaatctggcctccaagttgctcccatattgaccgtgcatttccatcctctacagcaaagatctgtcaaaaagccattataaagagacacaagctttcaaaccaaattgaaacactgtatattaaagaactccttggccccctttttttattataatatctaataagaaaatagatcgcttctactacagcatcatgccataccatttatatacaatcattgaaacattttttctcaggaaacgagcaatatttacaataccaattataaaagataaataactaaaagatgaaatgtgtaaaacctcaccttaagcacataaccaagcttttgcatgctctttaacacagttattaacagcagggattgtggatttttcttcatgtttcctaatatctgtcattcaacaaaatgaatcccaatttaatacaatgtgaaacacacacattaaatccccatttctgcaggatacaaaaagtgatgtggatatcaaaagttaggaatctaagctaaattttatactcatgaaagtacattaaaattataatttaaccatgatcatacgctaaagctataatgtaatacctcgataacatagatcactattggataataatattgcagatatcataatacatagataaaagaagagcagaccaaggagggaaggttcatgatcatagccttctccctgttcacatttccataaaccattgaaagctctatctacacatattttcaaatgctgaaggactcaagtatggattccaggatccagcgggacctttatatgtatgtccacgttccaaggttaaggcaatttctaaactgtctctttcatcaaaaaaataaagctgaacacagacaaatgcaacggtgatgtactaggaaacaatactttgaagtatcaaacttgcctctctcatcgaaataaaaaggaacttcttcctgaactaaaacccttgtttagcactaaggctagctcagtactcagtagtgaggaggggtaacctagaattgaacatgatatttctaatttgtgaattataacaagtgtgccagctatacttaaaatataagaaaatatgcttaatcacagtagtcattccctgcttcaaactatcaattaataaccataaatcatatctaacttcataagaagtagtactggtccggactccatcagagaaatttcggaaatggaatccagaaatctaaaacccgacttcaggagaaaaagaaaaaaaaaaaaaa

SEQ ID NO: 188853 - DNA, 1485 bp, Cannabis indica
atggaccaaaagatggaagcaaccagtgtaaagcattacacaagaaattttcatgtgtatcaacttcgcaattaaatggataaacaccgtgattgtacaatacgtacacacaaactataaattcagcaacaaggaaattgtacataggaaagaacagaagagcaagacaagttccaaagaatttccaactcgttgtagtagacagaacaaagaatatagcaagtaagcaattaagttgcctgtgcaattttctaaagtgaacaattaattttcatgagtaattttcaaaatcacaaacactgttttatatagagaaagaaattaaaaaacagagaacaagttccacagatattcaacctccagaaaacaaaagaaacaaaaaaaagaaagaaaatttggattaggaagttcaaggcaatcaatttccatgtctccaattcatgattaaaattacacatttaaaatatttaaatcctctaaagaaattaaactgtgtcttcaaacctttatataatacttgaaaaccccacttgcttcacgtagaatccgtgacgtctcgtcaagtggattgtgaatccctggatatttcggcccaaacgacaaatcgtgaattatgtggctcacatttacattcttagatccttcaaatatctgcaggagaaaaagtgtattgtataaagtcaataaagaaaacacaacagaaggtgttctaatttaaattgccctggaaaattaagttactacaaaagattaagaaaatctattaaagatgaactaaccatttgtgcaacaaaaatgtttaatccatgtactgaaatatgaaagtttccagcaacccgttggacatctaaaaccccgtaaacctgcaagttaaccaaaatgatatgcagttattagggaaaacaaagaaaacaaagtgataaaaggactatcaaatgtagagtgccacgatgtaatacccggcatccttctccatttgccaacgcttgcttcacctttttaatcatattctcagaagtttgatcaaaggctccatccatatgacttccgtggtcagagtgctcatgatcttattaccatcacccaaggttatctatcagatatttgactctctaatacaacagactaaagaataaggagttttaaagcaagaatgtaatacacttcagttgctggttttcaagcagcttaccttcattagtttaatagacaaatatgaaatgagaactaacaatgtgattagtattcaacaggtgtaaacaatgagcatctttattagtttctttagaaatgtgatgcaatgatctgacaatatggtcaatccttaacaagaaagccagcaactgaagtgtatctgactcgaccaagtaagcagttagtaaagaccccatatcaaatgcaagaaaaccaaaattcatttatgaaaaacataaaagtttgtttattagttattttgggaggaagcttaccatgtttttgttcatg

SEQ ID NO: 188854 - DNA, 2266 bp, Cannabis indica
ttttttttttcttttttgggtttttggtttttgaaagagtgtatagtcagaacccttctctcgtttttccacgaatgcagaatgggaatctctgtgtttcgaggctcttcgaaagctcattttcgttttagctttttattattatttttttttttctgaattagcccagttcagcatataataaagtctcttcctttggcatcaaaaggtgaaaccattttgctcttttgttatcttttttcattttttttccttctgaattttccaacgtttcttttttaggggttttgggttaatttcaaatctggggttttgaaaagataaaaaaaatgtgggatttgggtgaaagttacttattttagcttaaatggagtttgaggttgaatttttgttactgaaagtatgagatctgggttggcagctaaagcttaaatagttctttagtcagtaatggatattactcctggaagaaggaagcattggtgatttttcttttacttgtggttttttgcagttgatctgagcttcgagtacaaaaagaagaagaagaagaagaagaagaagaagaagaaaaaattggaactttaagtgaatttcgttggtgggttttggagataatgttgcatacttgatcaaattcgtcttaagaaattgaaagccatttcgataaattcttgttgctgaaccaaaagggtattatccgttcctatcaaatatgtcaggagctccacgagtaaggtccatgaatgtggctgattccgagtcccggcctgtgcttggtcctgctggaaacaaagccgggtcatggagtacgaggaaacccacttcaaagacactgagaaaagtagacaaatcacctgaagagggtgctacattggctgaggagaagaagacccgtcaaatgtcttcttcttccaccactacttctcctaagcctcattcttccaatgttccttcggtccttcgccggcacgagcagctacttcattctaatctttccttgaatgcttcatgttcttctgatgcttctacagattccttccatagtagagcatcaacagggaggttgactcggtcgtatagtacagggagtaggaggaagcagtatctttccaggactagaagtgttgcttctgatggagggttggattctctgcctggtgattctcagcagaagaagagatgttcatgggtgacacctaatacaggtatgttttattccttggattcaaattatgaagtgtttgactttgtagattatttgtagagctggtaatctgaactttgtacatatggcattggatttagttataatgatatgcattgattgagctataccaaattacaaattgtatgtacttgtaagtttgattcatcataagcaattaacgaaattccatcatatatgactaccataccatccactgcatttttggtctcaccttggctaaacgggttttgatctagtggggataatgtcccaagttggattttagtgaatgcatatataaatgtggtggaaatttaatttgattagcactctgcttagggttcaggctttgtgtgtaattaaagcttattaataggttggttttctttctttctttcttttcttttccttttcaaggatgaactaagaatcaggagaaaagactgaagaaagttgtttagtaaatcaagttggaaaaagaaaagaaaaaaagcttggtcatattcataagtagaaattaaatatgagtttaaactggctatatcaatctcaattcaagttgtgatcatcccctctcattgtttattaattttctttttctttttgttgaaattaatgaattaatttgacacattgaaaattagttatgcaatgtagagatatgttatcttaatgctagttagaatctatgacacctccccctactttggatcgctgagatgaattgggtgttttaacaagcctttccttgaagctgtctaattttctaactgagttttcgtttgttcgttacagagccatgttatgttgatttccacgatgaagaatggggggttccggtacacaatgataagtatgtgctgataatttcttcacatctgtattgatgaaaccagtctatcctaaccgctaaattaacagtctgtttgcttcgtcttcttgatcacatgcaggaaattatttgagctgcttgttctttcaggtgcattggccgagcttacatggcctgccatattaagcaaaaggcacatttttaggtattgttttattcatata

SEQ ID NO: 188855 - DNA, 7646 bp, Cannabis indica
aaatcaatccattgctttgctattagaaaagctgtagactttgatattctaaagccaacattactagagttatatgctgattgcaggagactaagtgactgtgagaagattcttcttacaactggggagaagaatattgtgcagtggaatacacttatttcgattcttgctcgcaagggtcttttggaggaggcattattagtttttaaacagatgataacagaaggactaatgccagactcgtatagccttgcaagttccctctcagcttgtggaaatgtgggccaattacatcttggacatcagatacatagtcatatcttaaaaagaagctattttgacgagtttgtccagaattcgttaattgacatgtactgcaaatgtggtattatggattcatcatacaaggtatttgataaacttaaacagaaaagtgtagtggcatggaattgtatgatctgtggattttcccagaacggttactcatatgaagcaatcagtctttttgatcaaatgtactttgaccgtcttcaaatgaatgaagtgactttcttgttagtaatccaagcttgctccgaatcaggttacttagaaaaggggaaatggcttcaccacaagctcataacatgtggtatgaaccaagatacgtatattggtactgctctaactgacatgtatgctaagtgcggggacctcaaaactgctcgcagagtttttgatagcatctccgaaaggagtattgtgtcatggagcgtcatgattgccgggtatggcatgcatggtgagatcaatgaggccataacactctttgatcagatgatggaatcgggaattaaaccgaatgatgttacatttatgaatgttttatcagcttgcagtcatgcaggctctgtcgaacaaggaaaactatatttcaagatgatgaaaaatttcggtattgagccaaacactgagcattttgcttgtatggtcgatcttatgagtcgagctggtgatctttatggagcatatggtgttatcaagtccatgccagtgtttgtggaagctagcatctggagttccttgcttaatggttgtcgaattcaccaaagaatggatatgcttaataatattcaaaaagacatttcggacataagtagtgatgatcctggatactatactttgttatctaacatatatgctgaagaaggaaactgggatgaatttgggaaggtgagatcaaggatgaaacatattggcctgaagaagattccgggatacagtacaattgagcttgaaaacagaacttatcgatttggagctggagatgttcctcatccagacatcaaggaaatctgtagttttttagacaacttcaagtgtctggcacagggacaagattttgtagcatagaatacaatggcacatcatcttacatttacatattctcttaggacaatatagctatgaagtttttaaagctgcctaatacattccagcaataaaccattcacatactcgaaaccttcacgctctgaagcttttctctaccttgactgccaccgcctgaagattgcaacccctgagattttttctttctttctcctatatagagtccggatcagatctaacccctccttcctcctctagcagcccacttatccatgttattttttttgttttcagtctctctctctctgttaaattgttaataacttagtaatgcattgttgctgtttgtaatgtgtatatctggtttggaatcaaaatagggtagaattttgtttttgttgttaaaaaatggcatgattgaaaaaaaagagagaaaaaaacatggaaacatatatcacatccttgaatgaaatggttattttattacataagaaaatcctcaataataatacagtactattgatactttatgagttgtgtttccttaattaaactagataggtcctgatctcatgtattcaaatataagatgatactaataatcatttgattgttttctctactaggattattcttctcattctgaagatgtcaaagtatttaaagatgttaaatcattacatgaagaataaagattgttgtaagttttttgtttctctagctattaattttcttcttctttttcatgtatcaattgttctaatatcagtccttatcttaatttaaggatcattctttaaacctcatattcagaaccattatagtcttttatttgttctttgcataattgtcagtgtatcattaaagctaaagaaacaaaagtcactctcaaccaagttggccagcattgttttctttgtttgatcaaaatatttggttattctagtcttgttgagatttaagagaataagaagctaagctagaattgttaagtatttaacattgatgtgtggagactgtttgttgtattttatttttttaattttatatatatttactaattgttgcagaaaattttgaaaaaggagagaagaaataagagtatgaagaagcttggctttgctttatgcttgaacatattcaacctcaacaatggaggtgtattccaaaggaggactctcactaattcaacatattcagaactgcctcagttttctcaaaccatagcttcggtacagtccatcttctccaatccctatttttctcttctgggtatctgcagaaacattgactccctcaagaaaattcatgctttgctcatattaaatggcttaaccgaagatattatatgcaacaataaattggttagtttgtatggttcctttgggtatattcgatatgcacgacaactcttcaatcaaatgcctaacccggatttttattcatggaaagcgatgcttaggtggtatttcttgaatgagttttattttgaggttttaaggtttcataatcacatgagaccgcgcgtgaaagagaatgataatattgttttctcgatcgtgttgaaggcatgcagtgagttgcgtaatgttgaagaagggaggaaggtgcattgcctaattgagaaggcgggaaatcctgatagctttgtgttgacgggattggttgatatgtatgcgcgatgtggatggattgagaattctcgagctgttttcgatggaattcttgatcgaaatgtggtctcttggactacaatgattgtcgggtatgtgcagaatgactgtgccaaagaaggtttggctttgtttaataggatgagagagggttttgttgaatgcaatgaggtcacattagggagcttaatcaaagcctgtacgaaaataggatctttgcatcaaggaaaatggtttcatggatatgttagtaaaagcggctttgaacttaattatgtcttaggtacagctcttctagacatgtacgtcaagtgtgacagcattggagatgctcgttgtgtgtttgatgagctatcaacagttgaccttgtgtcatggacggcaatgattgtcggctactgtcagactggtcatccggacaaggctttgaatttatttactaacagtaaatgggttggttttcaaccaaattcaatcaccacagccagtttgctttcatcatgtgcacagttgagtaatttgagtttggggatggcaattcatggtcttggggttaaacttggtttggaagactcgatagttagaaatgctctggtggacatgtatgcaaaatgccatatgctcggtgatgcccgttatgtctttgaaatggttttggacaagaatgtgatagcatggaattcaatcatttctggatactcgcaaaatcggtatgcatacaaagctcttcaaatgttccatcgaatgagatcagagtcatttgtgcccgatgctatcacactagtcagtgtcctttcagcttgtgctttccttggttatcttcgagttggttcatcgctccacgcttactctataaagaggggcttaatgacaaacaatgtggttgtggggactgcactgctgaacttttacgccaaatctggggacactgaatctgcacgtatagttttcgatggaatggaagagaagaatagtataacttggagcacaatggttgatggttatgggatacaaggcgacaacaatgaatgttttacactcttcgatgaaatgttgaagaacgatattcaacccgatgaagaaaccttcacaactattctatcagcatgtagtcattcaggaaaggttcaggagggttggaggtatttcaatctaatgtgtcaacactataagtttgtgccttccatgaagcattacacatgtatggtcgatatgttggctcgtgatggaaaacttgaggaggccatggagttcattaaaaatttacccgttcaaccagatgtgagtttgttgggagcttttcttcatggatgtgaattctattcgaggttagatcttggagaaatcgttatcaggaaaatgctggagctcaaccctcagaaggcttgttattatgtgctcatgtctaacctttatgcctcggttggaaggtggagtgaggttaatcaggtgagagagatgttgaaggagagaggattcagtaagtgtcctgcgagtagcatggtggagatgaataatgatatttcggttgcaagagtggcatgttttgcttagttatgtggtctcttttcgggatgagatcctcacacgacacaaggacatttcggcgaggcatgagataagacttcaatcactcagagttggattgatgaattgagaaagacaatgtactataaatagtgttgggtagagtggacagaatcactgtgaagacctgtagagtagacaccctcaaagaccgttcatatgcgtagaaaatattggcatatgagatgagatgatatgattttgtgaaaagcagtcatattgtgctaatgaaaagactccaaatatgtactgttatattctgccctttcggaagcttggtgttttgcgttttattatacataaaagtaaggaatctgaactattataatgtttttcccttatcacaagtatgatattatggatacttttttttggagactctttctttctgttttaagggccacatggcaccgtcttcatctgattctggcttatctgggaatatcataattgatttctattgggcaagtgtgattcttcagtgatttctgtttttctattaactaaagttgggatgtagtaaattaggagaaaactgtgatgggtaaagattaagaaggtgcatgcatattcaggaatgttgatgccatgttccgatataacttcatctaagtttactcaataggataggttttttggagtgtgacattctttgtaagcatattgaactgtctaaatactaattataaatagcaatagttcattgcttgatttattcatttgtctcttctttaatttaaaatcaagaataaaattagcactagtcttggcaccaactgtcaaaatgactttgagtggaattgtggtggtggtggtggttgttaagtttttttcattgtcatttttactatttcaatttgctggagaatatgagccttgtagcatcttaagctctgctggattaccaactatatgtaattgttgtcattattgaaaacttcccgaaccataactacctgacacctttctttgactttcactccttgttaatatccttttaaatttaattgcctttctgcagggtatggaactctatcatcgcattggtaaaaactttgacattaaagtttttacaaattccagattcggaatgatgtcttgggcagttttagttgtaacctattgcataaagtaggtagcgtctatgaatggtgcctatttatgtcagtaattattcatcactttgtttatgtctagtgttggttgatgtaccaatatgttttagggccaaaagtttgttggcttacaatttgaaatatgtgggagcgagtagtcatctgatattgtgatcttatactgctaaaattttattgctttgcaacaaaatctctacaatccatttccagtggccgatcattttccctcttgttcaaggattgtttctctgtataatttatttggtcaaaaagaacatttaatcttactttactgagtgcctgtgcagttggtttggtggttatttcttacctctaaatcagactcgaccttcctgtttaaaactttcacaatcagattgctatatggacacactgtacgtttcttttgctagtatttaacttatttctttttctttttttcctagtatgaagtgaatggtaaagttgctgattcgatgcttgttaatactatattgatgctggtgtatgttactaagtttttttggtgggaagctggatactggagcacaatggatattgcacatgatcgactatgaagttattatcattatagtctctttcttctattaaagatcatagttactttccctttaaccttttccatctattgctgtatatgatccaattacttggattggctgacatggcataccaaattgttggcattaatttgagcagataaattatttctacaacttaagttttaactcagaataggagagaaaaagaataattattaaacaaatgctgaatttatctattgtttctttccctttctattgttttgttcgtactttctctcatttggatctttgtgcttatcgctttgacaacttgtttttatatttgctggggatgccttgtatgggtgccttctgtatatacttcacctgacatgtacctggtcaatcatcccgtacaccttggaactcaggtataaagttttcttctctttattttatttggtcaataaaatgtaattgctaatatgtagatacttttctatgttcctaggctagcaagatatagcaattgctatgtaaatacttaggagggactcgaacttcagatcttataggagcaaccatttgagctaacttcctcttgattataccaataatattattagcagcttataaagctttatgttggcaatttgatttagaagctgaaactctattataccagccaaatgcaaaagttgaacgcttataagctgccaagcctatgagctgagcatggatttgagtttttttttgcaaccaattagtctcattttcccatgttcctgttaaattagttattaattttaattctctacttggctttgtcacagctggcactctatatcctagtagcaggcattctttgcatatacattaactacgactgtgataggcaaaggcaagagtttcgcagaacaaatggcaaagctttggtttggggtaaagctccatcaaaggtatatggctctttgaaacttgtctttcggttcttgttgtacatacaattttttgtgtatctgctgctaactcctgcattgttcttccctttctatttcacagataactgcctcttacaccaccacaaccggggaaacaaaaagcaacattctttttacttcaggatggtaagttttcaggctttttcatgtaaatacaacgtaagtgtattatgttttatttttttggttgagaatgcttttgttataaatgagcattctaacgatgtggacgatttggttttctgatagaggagcgtgctttcttcttcttcttcttcttcttctcgttgtcttaatttgtgaaatgttaaaattctaatagaacaaagtttt

SEQ ID NO: 188856 - DNA, 1157 bp, Cannabis indica
aatataattaagtgaaatacttcgaaaatattagatatatttactaaaaaagaaagtgcaaaagtgtacataattcttaaaaacattagatattttagcctcagtttaggttttttttacaaaaacagaagataaagcaattacacatgcatacacaaaaacaccatatgttagctaaggttgagtagtgcatgcatgagctatatatatggtctatatttagaaccaacattaataatataactcaacaatattatataacatttcatacatatatatgtgtatgaatttgtgttatttcttgtgttatatatataacatttcacatatatatatgctctaaaaaacttgtgttatattgctttgcatgtatatagctgtactatttatatatttcaatataacgttgtgaaagagctcccagcaccaaagagctgaccataatatctagctagagaaagaaaaaacatggtgcctatatatataatatgtgtacgtgtatggtgatttaattggctaaaaataagcagaaaatataaaagtaatgtcgtaaacaagtagaagacttagaaagcttaaatacatgatataagcaaaaacttacttgaacagatatccgaaagcaaaggtttttgatagaaattggtagccgaaacctgaagtaaatctttgggatttggatttggatttggtaaccttcaaatccaattatatatataaatagatgggaagtttgttgtgattcatgtggttgatcagttgagagagatgtttttttgtgcctccgaagtttctttctactttccttactttggcaccttgtttcacccaggtatttcacatgtgtcaattcaatgttgttttcaaatatgtttattaattagctcaatttatcattaattaattaattacaactactctcaacctaattttttctttgaaaatacatattgtgttaaggtatataatttgcggctaaactcttttgactttgaagtttgctacggtctaacctttggccatacttgaaaaattatggctaaactctccaacctctacaatcgttttggtcggctgttaatttttggctgttaagtgtcaaatagacttgccactatatacacaagtatacaagtggtaaaattttattgggccac

SEQ ID NO: 188857 - DNA, 6326 bp, Cannabis indica
aagagttaaatttaaatatttaccacacaaattactctttacttattttggttactggtaacagtatgttactcctttgtatatttattaattattagtaactaactggtactgtctatatgtttatgtattcatttcattttcacttgtacgtacaatatcagtactattctgagtattttcttttgttctaaactcttctagtgatttgtgtagatatatacttttcttctgtttgctctaaaatacattaatataatttaccctatattatttcatgcttgcaaaaatacatatataacacaaactaaaactttgttgaaaattaactgaaatatttgatttgattttcttcttctcttttatatataatcacatatacaaatataagaaaaaaaaacatgtatatgtaggcttgggaagggtgtgttaattgtggtttttttttttttttgatgaaagggtgtgttaattgttaatttcaaagttgaattactttatttttatttttggaattcttcaaaagctagaggtctcaattttgacgaataacaaagaaaaatcaaaagcgagtagagactattttttttttttttccttttcaattatatatataaattaatgtaatatatacttatttttcttattatttatttaactttttctctttctctctaactttttattttaatttaaattttacatcctaacctttattttaatttattttaaaaaacaatcttatattttaaccctcaaataaaaaattatcacaaaaatagtaattgatttaaagcactaacatactaaaaattacaaaataataataaaaaaaatactaatattaaataaaataaaaagaacataacactaagttataaaactaaaaaataacataaatttcagcagttgcttggaatcgtagcatgattgacgtcggggctgcggctgcaacattcagcagctaaatgttggggatcttcggcagagggcacgaaggtgaaatggaggaagtggctgtggtgagttgggctatttggcgcgcggaatgaatttgtttggcaaaagaagagttggtctgcatcaaatatcgttgcatcagctagaatcgtgcttgatcattataaattttctcaaggaaggaagggtctttcgttggctccgttggatgatggggggcaaaatcttgagcgttggattgcacctgagttaaacaagatcaaagttaatgttgatggggctttatttgaacaagaggggcgctttggcataggttgtgtagctcggaatcatcatggtgctatggttgaagctttcaagaaggagaagtttggttgtgttcaacctaaaattgctgagataataggcattaaagaagctttgagttggattgcaactcattcatgggatagagttatgttggaaacagatagcttggtgtgtgtccaagcgattcaaagcggtatttttatgccttcacagtttggtcttattgttcaagatgttcgaaatttacttttggctttatcttttgttgatttgtgttttgtaaaacgatctgcaaataagttggctcattgcttggtaagagactcttgtttctctataggtcgtgtgcttcagctggaggactgttcctctgaagtgcgttctattgttttgaacgaatttattaattaattttattaaaaaaaaacaacataaataaaaaaaaatattaagtaagataataatttaacaatcaaattgattacttgagtatcttagccttgaacaatattaaaataatttaatactttcttgactgacatagacaaatcaaagatacagatgatcattaattatgtcatctaaaatgcattaattgtctctcctttcttctttagactttttgaattgaccccggtccaaactttcgattgaccagatctccctctactgcttggtgatggtactgatgtcaccgaagactcagtaaactttctcggtctccccctctttctctttggaggctttccttcgttggaccctggggagaaagctgcatgatcgtccttaaccaccaaagactcctttgagctactgttcgcacgtgatgcaatcactgaagtggaggcttcttcgtgagaaggaagcactccagggaccatataaaaaccatcaatggcctttctttttctaggcccctgttctatttcctggcacttaaaatcttttatatccagaattggattaaaaagggtaggctcaatctgaaatttgtccaccgtgtttgaccctgttaagggcccaaacgctctagcccaacaagctctagagggccagtctaacggttgggcctgaggcccaagaagagaattaaagaaaagccccactttaaagttattattcaaatggaagttctccctatcaccaacggctagttcacaagtatcagctaaaaagagttcattctcaggatcattaagcgcgcccagactgtccttgctatatccaggtaagtttcctttcttgcattgggtgtgaatactggggatttcacccttgttgtttgcttccccaaaatgggaaaggggcacagagccatcctcaggtctcacttcctccgtactcatcgtctcagtgacggtattggttggagtgtcatgcgcggtcaccatcttctcaggtggttgttcagggatcactttttcaaccaccccctctgccgtgttctcgaaaggcgtaatttcacccgttcccagtagaagcactgtcgcaaaacggtttaaaaccacttctcatgtctccactctgttttccaccaccacctgcacttgtctttgttttcttggcatttgcctatgtagttctcacaactcagtagctttagcctcatgccatcttctctgcatcttcgattgatttcttacagtcggatccttgagcgcttcctgttgggtgatccaatcgttaaaccatttcacgagggggaggtgaaacggagacttctccacagcttccttgtccatccaagaaccaaacataggaaagaaagcccccttatcatcttttatcacagttggggttttgaagcagtgtttctgatcatgtgagagagctccacatttgaaacagatatttggcaatttctcgtattggtattgaatccaaagatccttaataccttttctccgcaaaaagaaacccgagaatagaggtttgttaacatccacggttgcacgaaaacaaagagtgcccatgccaaatgatcctcgctcgaagtttttctcaatgagccggggaagttcatatactgcagaaactttccctgcaagttcttgcaggtttgtcttgttccaataaaaaagtggtatgctcttaagacgcacccagataggcgtttggtcaaaggacacctccgcgggagtgagccaagatggccatggcatgagaaccagtaagtacccacagacaagccacgatcttctatgcagaacattctcagcatcaaaactcgtttggaaagtgaactggagtagtccatcttctctttccttccaactccatcccgtcaaggatatccaagcattattcagggagccaaaaatggctttgcgtcccagtctggtgtagcaataaagtttgccaagtaggattcgactaggtttctcatttcgatcgacttcaccagggttaagatcacatgtaagatccttagtagtaacttgaaccgagtctttaaacaaagagctaaggtttgtgtccgccataccaatacaacactaaaaccagaaaacttcaaacacgatatcaatggtaagctaagacatatgatcaaaagcttccacacacatcaaataactagagttagctcaaaacagagcacttaatccaacaacattaaggtcatatttggctcctttatgaaagagagaaatttaaagaacaaatatttggctcatttacaaacgtgtaccttaaaacctataaaaatgaaattttttcaaaaatacaaataaattaatagcacattataagtatattcatatgggtatataggaacatttcagcatagatttttgttttcatagctagccttacatgtttatattttttttagcactaaatgaaattataatttaaatttcttgtatatatctttgtgtatactataattataacatatattctataaatctttgaaaaatttgaaataatttacagtaacgaaaacataatttaaacattcagtttcaagtttcaagtattattattctttttatacgggtacaatcgactattttaacctatgtttcctgtatcgaaaattatttaaaaaaaattagaaacgtataaaatacttactataattataatataaaccgtcatatgttaattaaatagattacaatttttttaaataccaaaaacataaatacttttactctgttgataaggataaaagtaatatcgctaatttaatgctctctttttatatatatatatatattatatagtatatagagttcgtttgataggccgtataagactagtattatattaaataagaaataatataatatttgaataaaaatttatattgtattaattatcacggtcataaattttaatacattacgaacaatattatttcatacataaaaatgatttgtatatagcttatttataatatttagaaatggtcctaggtcggggttcgcggtctgcagtcggaattgggtcctagggcctagggttgggtctgtggttcagactaggtctgattttttagtccaggtttgagactaaggtccgagtttggggtttggttatggtaaagatagtatagttttacagaacctattaatataaatcaatacttattacaaaaaatcttacttttagttgcaacaaaagttacgactaaaagtaaaaaagttgtgactaattataaattatcattactatttgtgactaaaaggttcgtggccaaatatattagttataaaaatcacaatttgttattgtaatcacaatatttgttgtaactaaaactaaattaatcacaacttgtatctaaatttcgtgttttattcacaagtaactttttgttgtaactaaaaatcacatttaatgacaaaaaaaatatatattatgactacaaatttatcactaaaagtaattttttttgtagcaactaaatataaaattatattaaataatattatacaatataatacaacacaatataatataatataatacatgaaaaggacccataaacttttaaattgaagtgatcatttatgattgtttagacatgattctatgtgttcctacttcaaaagtccacctgtagtgcactatacatagtttgtgggaatcttctactccatctaagatctttttctttttcttttccaaattatagattttcttctccttttgtgtaacctaaatatataaatatatgatatggaaggaagattcctctcaattaacatgaaaagtaaatcaaaatgcttattgcccatccaaacgtggtatccatatcaacaaagataccacttgtctctattttatgacaaaacaattatgctaagccaaaaagtcactcaattattttttgtagtgtagcgattattacaatcaattaatagtttggagtttaaaattttgagttcgaattcatgatctctcctttttcttcatcccctattaccactaaactagcttaaaaagtcactcaattctatttggtttatttttacttttattcataaatgtcagtatcatataggtttctcaagatatatataggactataacacacataaatgacataattacataataaattttgaaaaattatagtttaaattacattgatattttcctcccttcaaatcttccctagtcacctcgatatatatatatcctaaaaattattgtaccaaaagttccacaacattagacattaatatagggcatttgttaaataataattatattataatattgattaagtattaaacactaggaatgattttcaattagtaatataagaccatcttcaatacaaaatatttgatttttttttgaaaaatataagcatcataatttttgcataacgcggatgcttgcctgcattgtagataacctaaataaataacaattcaaattaatttagttattttgttatgtttgatagcttaaataatataaagtgtataattgtatatggaactttgattaattttaattttgtacattatttaaattaaaaaaataaaaataaaaagaacaaaaaaaatttaaaataaatagtttggttgtctaaagtt

SEQ ID NO: 188858 - DNA, 3666 bp, Cannabis indica
aaaaaaaaaaaaatcaaaaagagtaaaaaagttagtaacaaaaagctacaagtgaaataatcacacttagaagatccaaagcatcaaaagttgcatttgctaaaaacacttttcattttcaaaattaatgtaattctctcacctaaacacacacaaatacattatagtttgtactataaatactttcacttttgttcaagtctcattctctctaagttctaagctaaactcttattatgttctctgtcttttccttggttgaaactactcattctacatagccatatattatatggacaatcaacttcaaccaataatggaaggaccaccacccgaaatggttgactcgaatcgctatgctcatcggtccatagagacattggtggtggttttagctgtgataaccattttgggtgttgtagctggaatcatagcgcgattatgcggtggaagacactttggtggcaatggggagcatgacatagaaggatgggttgagaggaagtgcaagagttgcattgatggcgggattccaccaccaccgccaccacctccaccaccaccgccgccacctcctgctgctgaagaatcgaaaccggtagctgaagagcaaaagaagtgaggtaaaaaaaaatggacaatatacttaattggtgtaaaaaaaagaagagtattgaatgaaaagcaaaagtagtagtagtgttgaatatggtttatttttttagttagtacttttattagatatagaatatggtcaatattgaagtgagaaatcccatttgatgatattgtttctatgtaccttattgtaatgtagtattaattaaaatataaaactgatttatgtgtcctcctcttgtgacaaacttcttttatatgatttctgaaatgttctgtttttttttagcccacattagatttctaattagtttaacaatattgatatctttgtttgttttgcatatatgaaaatctacctcttttgatacaagcaaatctagcttaatcaatgcaaaaaaaatggattatgtattatgtttttaatctttattgttttatcacatgatatactttctcttgaagtattgctaatatgataaaatacactcaatacaatttaatatcgagtctcacatgttaacatagtcgtctttagtttttatatggcctagggcaaaaattttaaaacgggcctcttgggctgaagggtcttggacaacagtcttgaccaccctaccctaaaaaccacactgtaaagtatcaaatagcaatgttgatactttccaagccaagaaaatcacatgatatagttcctcaaagggacattagccatcataatatatcattacattttgagcataccatggcactatgttaggtactttttggcatatttttaggcaagtatccaatattggatcttctttaattggcatatgaccaaaagtttcctagtcataatgttttactactactcaactcaactcaactactctcttttaattatagctttggaatatcataacacaaagcatttcttttgcatatttatttaccaaacaacatcaaaccgttgcttttccaaaagcaaaaaaaaaaagcttttgaaagcttcatcttcaagggcttcttgacacaacactcactaaccgttactagttttaattttctttttgtaaagaagataaagtgcaagtctttagtatgggccctagtgttactaggaaagtttgtctgagacaattagtttattattttaattagaattattacaaatttcttgcctttattcatttttctctttggtttcaaaattttataatatatatatctgcatatcttgataaatatataccacaaatgtatatccacataaagaaacataatggattgaaaaaaaatagaatccaaaaacagttccaacagatatttaaaaaatacaataaaaattatttagtagtacttctgtagcaaccagaacaaactataaatttaataaaaataatttgcgacataaatatatctaagtttaatttttgattacaaataaagatttaagtttaatatttgacggtaataatacttaagttataattttagaatttttattaagtattaagtaaattgcaatatggcaattcttaattgacccatgtcataatatttttttttaaaaaaatttaatttaaatatactaataagaaaatgacacgtggataattacgagcacatacctacaaaatataacttttatatattattatcgctaaaaaataaattttagtttttatttacaatgaagagttaaaacttaaatatttatgacgtaaattattcgtttgatcataataatcataacaattattattaaaaaatatttgtagtgaaattgatattttactgctaaaaagtaaattagatacataagtactatataatataataacttaaaatatgtcttaaaactataatgaaaaaataaaataaaaaaaaaacccatatgaaatatctgcgaaagaaaacttcacaaacaaatttatttattaattatttctgatacaatcaaataatagatgattaatttgttcttattttggtatagcattcaccaaagtcagcctaagctattattacaatatgagaaataatggtccatgaagtctcagcagctagccaaaaaccaaactgaaactacataaccatgaataataatgaatgtaagaacatacaaatcactatctgaattgtgttaattttgaaaccatttatttcctctcaataacattgtggagaaactgttccaatattggacactttaacattggtgcacacagctttgacttgttcttcttcaccttctttaccttccaatttcagatcaatgtcttgtaacacaatcccttgacatggagacacctcactgcaatcgaattttattgcctcttcggtcgcgcttgtcccgcttatgctcttgtagatcacatttttaacttgaacagcacttttctgattgaaccaaatcaagacttgattaaggaaatgaatggtaaagaaattgaaatgattatgaaacttgtttttttttttattgttagttactcttacctgttctttgcatggtttatgttggtcacaatagttttggtctattataatgggattagctacattttccatttctatattctcaaatgttatgttggttgcagttcctgaaccaccctgaatatgaaaaaaacaaaaagattaattaattaatgaatgcagactaaaattttgaaaaatttatgatatgagatttgtttattggataaataataatattttaaactaagtattttgcaaaagttaaagattgaaccctttattttgttaaataacaattcagaccttatttttgtcaaaataatatataaaatagacgctgagcttaattttcgtcatttttttcctcaatataactaacttgaaactaattttagtacaaataaatacaaaaaatgtaactatttttgtcattacacttccaggtcaaattattataaagctttaatttaatggaaattaaatgtctattttgtactattttaaaaaatacaggatcaaaattattatttaacgaaatagagagttcatcaattgctaactttacaaaacacaacgtct

SEQ ID NO: 188859 - DNA, 2515 bp, Cannabis indica
ttgtaatttgagaggatttgtttttgggatccaacctatcgttccaacttctgctctgcatgcttaactcttacttgaatagggtcccacagtagaacattctcaatgaatgtgcttttactttctttttaattatactttgcccatcaactactttcataatcagtagcatgtgctattttgttttataatatcgaaggtatggaagtaaacttcggtagtttcattttacaaaattaccgctagaaaccagttttatttgttgaaattaatcagtaggcattaacttgtcgtcaaaaaaaaaaaaaaaaagaaaatagcaagtactagtttacagctttcaacacccctttttcgtcaaaaaaaaaaaaatacccctttttcggcattataggcttgatgacacattaaattagcctagaacaattcatttttttttccgcaaagtcaacacataatttagatttgagtaatgatatgttgatgctgtcaaagttaattttttttgtctcattataccatctctaatggagtgtggtataataatagtgtattgttatttttaagaacattttttaatgaaaaaaacatctttattaacaattaaattttattatcaaactaagtaatagttggaatagaatctaatttaaaacgacaaccatgaaaaataatagagatcttaacaaaactatgagtcatcttattagttgattgtttgatgaaaataattgtgacattaaacaaatcacaaaataaagttttacaatcttgaataatacagccaaatagagaaagcataacaatggagctgcgtaagacaatcagcctctacactatcgcttgtctaacatttttctttaattcaactaagggcctctttaactcctagtgcttcagcaagaattggttctactttgtcatagttgaataaggtgtaaccctcaattagaagacccttgtcatctctggctactacaccaatcccaaagccacgacctccttaaaaaatcgctacatccacattgaccttgattctatcaacaaaaagtgaagtccaatgctttgccccattacctgcccgtaaactagaccatgacgactcatcatcagagttttgagcatttctccgttgattaaggtaacctttagcacatgcaacaacattttcgacaataaaactcttcccttgccaaaccatatcatttcttacccccaaatagcccaaaatatagtagcaatcaaatatttttgctcattaccaacattcttaaaagaattcatgcaccaatcaaaaaaactcatacttggtaaaaccaaggtgccgatgcctaatctgttccacaccaaaagcaccttctgacaagtgactaggctgtgaataatagactcatattccatattgtaaagaggacaaagagatgtcacctccacatgtttagtgcgaagttggatcattgttggaagacaagtcgtgctagcacgccaaagcaagttcttaacttttataaggactttcaatctccacaatttcttccaaaaaactgagttattcgaatcctcccatctttcttgatgttgttggagaaaattgtaagcacttttaaccgtgtaaatgtcgaaagttttttttgtccaacacagatgatcaaacattaagcggtatactcaaaatcaaacatccgtctctttcctcaaataaatcatttaggatgtccacagcccagactccaccatccactctcaacagattacttaccctcgcatgagacaaactagggtgatcacacgaaacaaaaggattattattgtttggcagccaaggttcaaacaaaactccaatgggacttccatcacccacacaccaacgaacaccagctttcacaagttgttgagattcccaaattcttctccagatgaaacctagattattaccaagggaagcatctaaaaaagaactatttggataatatcttgcttggaagattcagccaactaatgtgtttttacaagtcaagagtctccagccttgtttacccaaaagagctaaattaaaatctcggagattgtaaatacccatacctccaccacttttatgatgactcagcctatcctaagacatccattgaatgcctttatttgatttgcttgaagattgccgccaaaaaataagtcatcattttctcaatatcaagagtgatttccaagggaaggagaaacatgctcatggcatagcttggaggagattgaactatagacttgataagaacttcattgcctgctcttgacaaaaaaattcctccccaaccttggagtcttttctgtacccggtccttaagataacccaacaaagttgatttttttcccaattgtactaggaagtcccagataaaaactacccgcatccgctggtctcatatttagcaaatgacaaatgtgattttgagtagcatcatctgtgttagaatcgaagaaaattgatgacttagcgtaattaactttctggccagaagca

SEQ ID NO: 188860 - DNA, 7017 bp, Cannabis indica
tttttagcatcactatgttgagtttaaaagtttaattcttatagcaaattctttttaaagctctatcgaattagccttattattctttgttctgagttttgatctctttgcatccatcataagattggcatctctatatatgcaaaacacattgctcttctctccatcaaattaatatctcatttgacttgtgatataaacaaatatatattgtttgtttgaattgtttggtactgatcagttagaatttattacaaatatatttgtatgtataatttctagttaccgtagcttgagtacatacatatggaatcttttcaccgacaataagaaaaatggcgccttgctaatgaataatattcccactgtttaagcaattgaaattatatagtgttacagctttggcatactcatattattcaagaagatacaatattgaacatataattgtaactttaaatatattctttttctcctgattttatattagggaaaaagtttacaggtcacaagtattgtatattttggcttttattcatccgttacttaatctaatatgtttccatttaattactgtttgatcgttatttatgttgatatatgtgaatttatatgctggtagatacgataccctgtctgtcaaccttaatttcgattgctatgttttttgttgcagaaattgaaatcatctgtatagtgctctatatgaattaagagagcaagagatacaacccttttttctgcttcctctcccttcctcctaccaccacctctatttttatatatataatatatatatttatatacatagtatccaccatcgttgtgatatctgatatattctgggggtggggaattttctttatatttatatctatatatttatatttaaaatacattttcgattgagctggttgaaacctaattattcaacaagagaagagttacttaggagggagaggtagagtcacacggagagaatgtcgaagaagaaagtatgtgggaatactatgaccctcaaggacttccatggtggctctatcccaactgatcttcctctcccttctgctcctggtgtgtaagtcccttttacccgcgctcgaagtttggattcaatcttatataatttaggatctatttctttattaagaatggttattgttattgctagattttgcccttgtagttgattattgttaaatttcaccttttttttttgcagaattgttaggccctcagatcgtcctagttatgatcgatcagcatcgtggggtaaccaaatgggacggtccgatcatcgaagttctcgtccgcacacttctccagcgatgaggaattttgatgacaaatcccctttcctcactcatacttcgcatatcggcaggaactttgatgaggatgagcgcaagccccttgacggggtttctgctccgcggaggactattagtgatgaaagcattcgagtggccccgatccgtacggagcaaaagcaagagtctgcatcagttggaggaggttcatggagtcgacagggattggcttcaaattcacaagtgcctagtgggactgtcaattcatattcagggagggtgtctgagatggctcatggaggtgtgccttatcagaatttagattcccatgatgggcatggtgttggtggcactcatccgaatgcgtgggcagcgaggaaagaggctgcgggtggtactgagcggcaacaatctacgtggtctgctccagtggctgtttctaagttggctcatgccagtgcgctcgaaaagatttcttctggaagatggcaatctaagccttgtacaaataatcagacagatgcggagattatgagattgtctgaaacagaaagcggtttacacaacaagggatatggtaataatgcctttaacaagataggctcagttgctgacatagaaagttatgacacaaacttagccaggcatgctgagaggggacttcacattgaagataatgttcagggtggtaggaaggaaagtcctgattatgagagggccagaactcttattaattctgaagtaaaggacaagaatccatcaggatatcgagacaggggtcaaccagatcacactagtggcaggtttggtggagctaaactgcagactcaaatgcattcagaaccttcagagcggcccaagttgaagttacttccgagaatgaagccacttgaaactacagagccttatagtgttgatcctattcaggtagtaataacattcacatatgttaccctatttttgggagaaaaaagtagagaatcagcccacattgggtccaacaggtgactgaatatttgtatttggtttattgcagggccatcaacaggtgactgaatatattcatactgataactttaatgagcctcgtgaaaattcaaactctttaaagtcgggtgtagctagcactgagattgagaagcaggccgtagagcgcccaaaactgaatttacagccccggtcacagtcagttgaacgactggaaggaacagaaaaagaaaggttagcaatgctattcaaaatcttcctttggtagttgttgtgtttgattcgatgtaatggaattgtaggctaggacttatttgttaccactgttttcctccgctataagtggtatcccctaataaatttgggaggggctcagtcttagatatatgacctttgttcgtatctgatttatgtgtcatgaaggataacaccgtggggtcaggtttatgtgtcaagatcaggatgagaaatgccttaactagatactcgtgtacagttatattgtagctagccggctcgaaaactttgacctcgaggtgtcagatctccctggcccccttttttgttttttaagcacattgatgtatatgaagcttagagatatccctctgttcaataccacttattattacttacattttaaaaatattttgattggtgcaggaattttttgtttggtggtgctcgcccacgagaactagtgagtggttttgtttgttttcgcttgtgatatcaccgaacaagtttatgatacatgtcggttgaatttgtcgattggatcattgttgttctgcttcaaactctctcattatctccttagtccatagtctatatctttaggatcataagcaattcttggtccttatataatgttttgtattattatgtatggcttatatattttcaggttctgaaggagagagggattgatgatgttgcaattaaccatgatctgattcagcagtctgaaaggtattggcaagaaccccatctatttgccccaacattgatttgttgttcttaaatacgaaaaatttatttcggtttcataaaaattgtgtagggttgaagttcatgctccaaaggcagaaagaatttcgggtaatgctattgcatcacgctacaatgaaagaacaaccgagtctcctcctgttgttgatcaaaggactgcagcaaagaaagtagatagaagggagagggatcaccgagcagacattacgagaggtgatgctcagaaaaggaactggcgaagtgataacaacagccgtgagaatcggaggaacaacagagagatagagaagcaaccacaacagcccgaaagggctccatcaccagagacctggcgcaagcctgttgagcagccaaaaaagacaaccgctgccgacttggtcgggatgcgatatgggaaagcagcttcagccgtcgagcttgctcaagcattctcgagatcagcctccgagccaaatgcagataaccgacattctggccaaaggagactgcctggccgcactcagatgccattctctcggttgatgagtgcgaccacacaataaagaagaaagaaaagttcaatggagtttccttattaaaaatgttttaacattcaaatctttaatttttggaagggatgttgttcttatgtttactgatgagatatcaaatcggtttgtatttttttctcaatttatttcactataaaaggaagtaatcgagattgatattcaattcagtgaagcatgaggcattcattttgtttagtcattttttttatcacttgactatttacatatctatatatgtaaatatttacatatatagaccaattctctcacatagaaagggacataaatgaaaagatagttaagataatttgtttgatatatagtatagtattgtattgtatttgttctcatatagttaagataattggtttggtattaactttattaacgctccaacaatattgtaaatgtaattttttttaagaaaataatatatatgttatttgtgttttcgaaggaaggacacatgtacctccaagatccaaatacaattaacaaaggcaaagtttacaggccgaattagaataacagaccaatcttactaagtcaggtcatcagagttccagaaagacatctcgtccagacaaaagaagagtctagcgaagagtgcattcggacgccttcaagcgatgtttctggaaaggtaattaataggcctccggatgtcaagactgattcaatgctcatttggtaccgaatcccaccacattaggacttggtttccaaagttaggtccaaaaatcatgcattccgtaaaaggaaagataatgattgtcaattattcattaagttatctttataacacgcgtagatggcacacgttttctatcccaagccgattccacgtgtacaaataaccattgcctcatgagttggacctcactaaattggccaaatgtcaatatattacttatatttaccccatgaatgggctataattacatgcaaaccctacctatgtatacaaaaaatctcttcatgcaaagggttcgagattcatttcttacatgctaaaggttaaaattagggtttcataaacaatacaaaaatacgtgtatggtacttgaaggattttttcagctaaataatattgacatgtagactataattcgttaatacttgaatcacgtaaaaatccttgtcttaatcttgatatttatttagctttattatattttatatcggtttccgaaaaattcagtaaacatatatttttaaaatgaactctgacccaagccctagctctaaatgccgacctcggatcccaaccgcaacctcggactcaggccatggactctaacgccagacttagaccctcacctaggactcaaaccctaccattgatctgaccactcccctaaccccaacctcgccccagatgccgaaaccaacctcgaccttagactttgatcctggaccctgaccttaaagccaaaccacgaccttgaacctgatccccatccccaacccccaggccctaggctcgaccctggaccccaactttgatcccaaacacttgccctaagccaagaccctaaccccgtatcccaaccccaacttcagaccttttcccatgccccaacctagaccttaactttgagttttctacaatacaagttcgtaagtacgaaaaatattaagatttttaattaataattaggcaacataatagtgatttatgagtatttatttattatattttttaaggtgtgaaatttagttgttagtagaagagaaagagagagtagcatgaagggctaactcatacaccaagagttttaattcataatcatttttaaatattgttaagaatattttcacctaaattttggttggctggtttgtcttgtttctcctctaccaacatgaaaaaagaaaacaccacttaatttgaccattaataatccttaattttcttgacaattttgatcggttattatgagttagcattttatatatatgtgattgttaatatacaattatccatttcgttgaccaaacctcaaatatattatatattaactaattggttattttggattctgtattttgcaaaagttataggttgaactttttgttttgtcaaataacaaaataaattttgtatttttttaaaatggtagaaatatgattttgaactcaatttttgattttttttaatataaccaacttaaaaacaattcctaatacgaatagatacaaaaaatttaattattttttccatgaattattattaagttttattttgacaaaaagttagttcatagtcctatttgtattattttaaaaaatatagtctattttatcatttaacaatacaaaatgttcaatctacaatttttacaaaaaaacaggatccaaaataatatttacacttaactaattaatgtgacaaaacaacaaacaaacacacttatttattattaatctctcacacaagaacaaataataatctcttaaaacaacatattttcgatttgctcgaactttacattatcaatgatattcatattagtatagtttttacaaaaatcaatttattaatctaataaacaagtaccacatagaaatgtatggaaaaccaatcttaataaaaatgttatataaactattaagtttaacacatgaaattaaaaattggttattgaaaaccaaaaaaaaaattatagaaaatttgtaaataaattagaaatagaaatatgggaggttgtctatttttggatatataatatttaaatattatatatttaacataagtgtacattttttaaacatttaactatatttcagataaatatccttaattaataagatagtgtatatttaatttagaaacaaaacaagtcagtttagatcactctccatagttttttttactctatcctaaatcacaccatatatcaaattttttatatttgtactttatattattaaaatattatatatttatatattatttatttattcaattaaaaaatatgagagaaagaaaaagaatagaaagaatacaaaaataataaaataagtttaaagaaataaatattatgtacttatatttaaagaatgaatagtgtttagctaaattgcttagttattttagctcacttgatggagagtgttttgtgaatgatcctttaaaaaattagcttatacctcac

SEQ ID NO: 188861 - DNA, 6036 bp, Cannabis indica
cagaaaaaaatcgagttagaaaattcaggagaaactccgaccatggaatcggagacgaccaccaccaatccattgaattcttccaccaccaactggtctatttcccgcggttctctcctaaagtcaatcacttttgactcatctctttctccaatcgacggcgatggagatggcgattgcgaagacctcagttcaagttcgaatgaccctcttgttctgaaaccttcggtgtcagattcagggccatgtgagatcacaagtaagtgagaatcactcttcttgaagtaaaaatactttcttttactgaatattgagtgaaggagtcttttttttgggatttcgagttgtttgttagtatggtgtttatagtggatttattcaatcagtttttctaattgctttgctgattttggatgtttttgttgatgtaattgttcttcttgaacttgttgtgattggttctttgagtgaatgtgaataaacccttttgttttgtttttggataagataatctcagaaatgacaattttgggattactttctgagtaggcatatattttgataacctaaattcatactaagcgaccctttttattagagcttagagaattgatatccttattttattggaagttcagtttgttttgcacaaaagcatgaggtccagcagatttatgttaggagcactgctcgagtgtatgagatatattatgagtcaaacccacaaaacggcaaagaatatctttgcactgttcggtgtggcattgctgctagagatgaacaagtgcttcaagcaattgataaggaggatgtggcttctgcgtcttcgaagggagcttgtgatggtgaatcgaaagaaaacataagaaacgatggtagtcgaagcagtgaagatgaatgggtagatgttaaagtcccagataattctaggccaatgatcacacaggtaagaaatggaaaagctgcttatctaaaacatgagagatcgttagtttttatcttttgtttatgtattattcatggctaattggaggaaaatgtcaggattattatgaggctacagcacagatcaacgatgcagatccgtgtatatctattactattcgtctactctcagttcagaataaggattctgtttatgttgatgaggtatatgtgtttgctgatcctgttgaatcggatgactcggaaaaggaagtggataagaaggaaaactctactgggaattctcttatgacaatgctgttacctacacttatgcaaatgtctaaaacaaagggttccaccagaatggaagataaacagacttctgaggtccagaaaaaacagaattgcgttgaaagtggatcggaagcagctcagtttatcagtgctgcgactacaattcagagggaaggaaattccagcgttgctgatcgtcaaagagttgagtttcgggacataaatagggctagtgtaagtactgcacagttacagactcctgtgcaagtttctcacagtgaaagcaatgatcatgttggaagagcattagaccaactttcttctcggatgggaagaatggagaatttattcttaaggtttgaagagagcttgttaaagccaatacatagtattgaggcaaggctccacaaggtcgagcagcatcttgaagtactcgccaataaacagaaggattctgaactgccgacttgctcgagattttgtgctccaaatttttctttggtccagtctgattccaattccaattccttgatcaatagtgaaattggttatgctcgttgtgaggaagcagaatcgaatattaagagtgttcattctgaattgcaaaccaattcagttaatgatttttctgattctgttaatgctactcagttgcttccaagtcttgtagttactgctcccgaattttcaactgacgaagacgaagaagaaaattgtgtatcggaaacaatcaatgattcttctgttgataaaccaagggaaagaatgacagttgatgatgctttagcttctgcacttgctcgattagtatcttccgtttcaatccagacagaagacaattctccaactctttccgtcaaagctcctgagtttccaagtgaagaagatatcgaagaatttcgtttaggaactggtgagacggcaaccataaatgtggttgataataacaaccaatctgagaaaacggttgaagaagttgatgaacaagaccagcatattgaaagagtagagaaagatgaagctggttcggaaacaagcaatggtctggtctgtgataatgatgatattcaagatcactccctccaaattcagacagatgctattgactctgatacaaaacaggaagatgctacctctgattcagttactgctgttgaaataatgaaagagggagaagttggtactgattcgaacaacggactggtccatgataagattgatgacattccagatcattccatccaaaatccaacggatgcaactggctctgaaacaaaagaggaagaggggtccgaaaaagatgttttgaccgatatcgttgagctcccactcccacatactgcttctgtggtggatttcgaaacttcagtcctggatgtgaagtttctttcgctgaatagttgtgacagaaactgtcccctcgaaacccttttgtgcgacttgccaaattccaaatctgaagaatattttgtggaggaaagtgatgatatggatccaaatgatcatcagcacagtgacttaatttcggtggaggaagatgagccaccacttgggcctgccactaacagccaaatacatgttgactttgactactgtagtttaccagaacctttgaggagcagtgatggtgatgaatccccactaacttttagtatctcctgcagtcatgaaaactcaccatacagtctcatttgatcagagctgattaaggaagggccattttcttcttattggtttgtaaatttgtatatataaatctgactttgcatgttcttttaagttcctcaactctttaaggcagtttaaaattttttaactgacctgccaaaaaaatgttgagactataatatgtttgaacccttttggtgttgtgttttgagtatcagttgacttgtttaatgctaaatcaatatcatcactgtgtttgtagagttgataccttttttggggtcatgtgaactggataatgccattattttgtgggttacataccatgcacatgaaaaagtttagattattttgggtcatgtgaactggataatgccattattttgcttttgtttattaaccatttattttctgccatgataaaattaagtgataaggcaaaaattggaaattagtgtccacaaacaaatgagtgctaaaagacactattggcctcacatgttataaagataattaagaataaaatctcatataatttaatttaacaactttaataaaatatcgttaactatttgtaaaacgtgtcttcgtaagcaactaggttgacccgggctaaggtgagctatgccgtgcataggatccacccaaacccaggacccaaataagtggacaaataaaaaacttcacttggtacaacaaatatgaaatagtcaactaaactaaacaatgtaaaagtttttaccaaagccctcaatccaagagaaaccttgttttcatcggttcccaaactgtgaataattaactgataaatcctccccaagtgtttctattttagtttcttttttctgcaacttgcataagcttcttcctaaagtaatgtcttcatttgtcaaacatatataaatatagctaatctgactctagtttagtaattagtgaattaggaaaagaaacaaagttttgttctgtgaatttaattttgtattgggagttgtattacggcaactccattccttgccactatgtgtgccttgtcttgtggatctcattcattcctcttcaagttttcaagagaagacaaaaattaaagtaacaaaaaccaagaaaaactgttaaacaaaaaaccaacttgcttatcttatcttattatcaatgttcaatacaatttgttactacgaaatttcttcgttttcctaattctcttttcttaggactctggacaattgaaatcgcgtaatgacatacctgttagcttagcttaaagttttctatttaattagttggagactttcgaggtagatggaaaccttgagttttgagcttgtcacaatcgcttctcgcctatgaggactttccagcttgcgaaaggaccctcgcttgtgtcgtgcaatgcaggcacccaacctagggcactagcaatttcttgaagttcggttattatagatatcgagtcacgtatataagcccgaccaccaggtctcatcatccgatcgatctcgaacattatgcttgtcatgttgcatctgtactcaaccaaatatttcaataagttgcagagaaaatagggtttatttgctcaacatcatagggctaagtataaattagtatacctttttttctcaagagagaagagaccagccgcatgtattaagtcgtatgtccttggataagtgtcgaaaggctcgcacctaccaaagcaaaaaagagttcaaatttaaagccatgacaaaagtatagtctagaaaaacttgcaggagggtgcattaatgccataccaatcatgcatagctccgatgagtccacgatcatagataacaggtaaggtattgaacccgctaacagggacaacattcataacccagccatcatattggtgctcgatgagagctgctgcaaacctgccatgaaaatggagttagaaatggcactgaagttaaaccgaactaattaatgataacaagatttgtataccctccaaatccagctctcatgtctaaaatatttctaaagttcaatttcttccagtgataagcattaagatagccctttatattctctgcccagtacttcgattctgctttaagaagttcttttctagatatgtagccatccatagttatgctctggagtctttctggtggagttagaagacgttcaggccatgtagtaaggttagctccataaccattatccggcaatcgggtaatacatggcttcaaaccaacatacctaccgaaaaaataaacaaataataatagtgagcggctgatcattaatttctgatcacgaaaaatgtggaactatgcaaccatggtggttgcagttgaaaatgagttcttatgaagttatcggcatgaaatgaaataagacataccaaacactatctggatcatcagtagtatcacatagctgcggctgcacttcgggttcgcgattagaataacagctgttgtttaaaggcttctgccatatagcaatatacccttccttctttacaagtttccaacatatacgactggtgaggtcttccatttctgtaaaatatgaacccgaaaatgaatcaaaccaaaataaagaacacgaactgaaaaaaaaaaaaagaataaaaaagttaactcgatgaacaaacctttccattgttcttgcaggttttcttcgtgtttataaacaggctgtgctgcccaaacaaagtatcctccggcccttaacaacctgttgacctcgagaagcaaaattccatctattgtacatcacaagaatcagaaggaaatgaaatgaaatcagcaaaaaggaattgtctacaaaaatctttagggagacaacaatattttttttttccaacatgaaaaagatgcaaaaagaaacgagtaccatcacgagtccaattaactctgcatcttgagcaatgaatcaagccaaatgcctggcttggatacaacaaccgccttgtggcaaatgcagccaccatagcaggcacacctcgctccaatgcaaactgaatctggttctcatgaacatctttcggtgctattgacaaagtggtcacattacgttgcatcaaaaaggctccaaaacttgccactccacaaccaatgtctaaagcaactcgggtgtttcgcccaaatgcaatttcaggaaccatctatt

SEQ ID NO: 188862 - DNA, 3707 bp, Cannabis indica
ttttctgctccaagattttagtatccctatagattgtgtcacatttttagtagttttgtttaattttgctgtggtgggtgttttagctgttttcatgtcaaaaatggcaatttttgtgacacaaggatatttagttgtcattggaatgctggttgcttattggtttactcttttacctgaatggactacttgggcgctcttagttgctatgtcactttatgatcttgctgcggttttgctgcctgttgggccattaagaatcttagttgagcttgcaatatctagagatgaagatattcctgctttggtgtatgaggcccggccggtgactcataatgattctggtttaaatggtcgtgtggttcaaagaagggtatggagagatagaaggaatgacatttcaagtagtggggatgattccaatataagcacaaattctgttttggttggaaatgagagtgagaatcatcggataaattccagtttgaatgtgagtgagagtcatgagatttcagattccaattcaaatctcggtcaacataatgttacaagcttggtgcgagctgaagaggggcaggtggtggacatagactcagagcttgttgttccattacttgaacaaagaataagcgtcccacgtattgctcaggaagaaaatggtgccacagttgagaatttagtgttggagggaattgggttggcttcatctggtgcaatcaagctgggcttaggagacttcatcttctacagtgtgttggtagggagggcagcaatgtacgattttatgacagtttatgcgtgttatcttgcaattgtggctggtctgggtatcactttggtgctattggctgtataccaaaaagctttgccagctcttccagtgtctgtactactgggtgtattattttacttcttgacccggtttctgcttgaagctttcgttgtaggatgttctttgaatctcttgatgttctagatatatgaacagttttattgatgtttgatgctgaaagcaaaaattatcatattgtgaaactgatgattaagtcttgcaacctatacaactttgtatcagttgctttcatattatataaagattttatttagtctacttggttttctaacgttgttaaatttattaaagtcaacaactttgagactctctgtttcaacaaccagagaatgaatgtttcattctccagagactgatttagaaaccaatgacagcggaagctactgggtaattggaggaaatgagacttgtttgattgcacatagttttatttaattgtagtgctgctgctagttataagcatgtgaagaagcaacaaggagacaatccgcgggttccgtttatgaaaacttgggacaaggaataaggaccttgagcaccttattgttcttgtttaactattcacctctcagaagtaagaatgcagacatataaagctctaatctatattagcatgtcatttatactggatatgtacatctatattagcatgtcatttatactggatatgtaccagtccacaagatattgattgttctagctgtcaatgcatgttaagaggtattttccttatccttgttactggttttgagcattaagtatattctgatatgtatttggcttatgcttagacactagtgttgatacttttgccgattcttattatctatgtgaaatttgaactcagaaattttcattatacgagataattttcaattgtaactagtatagtttaggctaaaatatggatgctaggtaaatccttagatgatatcaagtcaaatcagtggtattattctcaagaactgatagaacaaccaggagagaaacaaatagaagtagaaaagttaatagagagtgagagaaataagcttttgagaaaatctgttattcaaaaattaaaatgaacctcaatgagttgattaaataatacacggctgacttgtctcacatgagttgcaatactaactctaatattgacacctgggctaaagataaaatacaacaaatattaaacataactgttgacccccaaaaattaaaaattggtaagtgtaatttttggagatttttagattaatgagagagaaaatcctaaaatacactataaacgtgtatgtgtgttgacccctaaaatatactaagtataaattttggaggccacatgattaaacagaggaaagatctcaaaatgcaattaagtagaagtctatgggcaagaacatgggaggccatctctctcctcattactccccattcaactaagggagctcccctctactttcctctctctcccctttgcttcacgttcaaccaagggagctcccgactcccttcctctctcttccctttgctccccattcaatcaagggagctccccactccctccctctttctccccgttgctccttgttcaaccatgagagctccccgctccctccctatctctcccctttgctccctatccaaccaagggagctcctcactcccattactctccacatgtaccaagggagctcctcactcccattactctccacatgtaccaagggagcttccctctcctaacacttagtcaaattactaagtgttgctccctcttccaacacttagccaaaataccaagtattgctcactttcttaatacttagctaaaataccaagtgttgctccctctctctacacttagccaaattaccaagtgttgctccctcatcataagtataggtggtggaaagaataccaaagagatgtacgaccaatgatgcgatgtagttattagttaaacctccaataaagcctaaagagagaaggtggttgtacaacgaatacaacaagtacaagcagtgaagacactatttatctaactctaggtacaagctgacatccaaccaacactactttactacccatcagacacgctgaccctcatggtacaaaagaaattttgtcccttaattttgggaccacttgtattttggagccattagagctctctataaatacccctctcttcatttgagaaaggggttgacaaataatcatttgtaagggagtttagagattcaatacaacattagttttctccattaatgttctgagtttctcttaaacttttcatcttcactcctttgcattttattttctaattagagtttagttgacgaattcttaccgtcaacaataactaatagctacattgcatcagtaactaaacaaatcttttgagaatttttagctttacaatttcatgatccttaaatgttaatatatgagataggaaatgacatcctaaggcagataatgatacacatgaataaagaaacgatttcttaaatgtgattaccaatgtgaagatgccagtttaatagcttttgttggattcaaatactattaacaataaagtgattgttacagttagttttagttacacttagttaggttgagccgtattcttcttgtataggtataaataccttgtaactgctctttttccaactaataaattcattcttctatttatgtggctgtatgagctaatacaatatcagagctctaggtttccatcctagtttgatttttttttttttccgtttcttctcctttcttctttgatttagtcgcacgatggtgcagactcgttctagtggtgcttcaaaaacgaattcctttgttaatgtcgactctattgctc

SEQ ID NO: 188863 - DNA, 1342 bp, Cannabis indica
tttttgaaattgcaattattaaataatgaccccaaaattctgacttctgtaattttccacgctacagcagcaaagacagagagaagcccaaaaagttaggaaaaagagtgtgtagtagatgatgtttacaataaatgggaccaatataaaattttccttttgattttttagagtatttgttggcaaagtaatagaacttctaaaaagattttttggtagagctttcactactttgtttgtttgttttttgttttgttttttatataaggttcactagtttgttatttatgatagttttttagttttattttttctcaataatagtcaatattaaatcttaaatttttttgataatttatttattttattatatcgattactttttttttatacatattattgtaaaaaaaaattatttaaattttatttttagcaaaaattacttaattttttaaaaaaattaattggtaattataaataactatattatggaaaaaaagatgaactataaaattttctccaaccaacatttatttatttattttgcaagaatcaacatttattaaggtgtgctatttgttatttgctcatttattattatttagatctcaaaactaatattcgggtattttaaaattaattgattataagtgaagtagtttatgttcgagaaatgttaaatgacatttatggtgcttaacacgcttatcaggtgtaatatcgctattggtgcaatttaatatcgagtctcatttattttaatttaataaagattataaaaaatcgttaactaattataaaacatcatatatcgtgtaataatactttatatatggcttaatatttttatataattatctcataatgcaacaaaagtatatatttttcttattttgattaggaaaatttggttcaatatgctcaaatgtaaaatatggtgtttgaatatactactaaattagaaatagtatatttatacttttgatatctattcttcctaaaaatacctttgcatttcaaaaaaaacttctctctctaactctctcactcttcggcattgaaccccaacctagattccctgttgtcgaacacacagacccaaaacctcggttgcaagcccctgtcgtcatcttctctcacgacctctctcgttttttgcgtttttttcttttagttttgtaattttttgtgatatttgcgatgtatttgcaatggtagactaaatctgaggttaggaatgaaatttagcaatgatgaatgatatttggtaatattttgtgtatttaacgatattttttgatataaatacacaacacattgctaattattgtgaaaacttgag

SEQ ID NO: 188864 - DNA, 1369 bp, Cannabis indica
ccaatattccttcacattactctcttgatatttttctaataccacaaaagtaaatataagtatttacaaaaagaaaaaataatgagtgagtgaaagtagatatggtggtttagtaatgtttagatatgatgcaaagtgagtcgaatcttcattaatacgcgatagaggttgagtttatgggaatggtataataattattgatatcaacatatcatcgtgaatcattgaatgttaattgtaatcttttttctttaattagcaagagaataaataagagaatcttaaaaacaaatagttcaatatatcatgaactcgacaactcattatctcttttttattgattataactgtattttgtttaatttactattaataaagtgtggaagttaaatcatatatggtaaaataggtgatgctcgatctcatcattagcaagtataaatgatcttgtattcttgaccctaaaaaacttatgatttttaagtataagtatgtatgggtatatttgtagttttcagtgttctacaacaaaagccaataatattaatattttgtcaaattttgagaaaatacaaagtatatattaatgataaccatgaaccaaaaaagataattattatttcttttataaagtcaaattaaaaggaaagaaattatggtacaaagaaattatggtactcggttactttcaatatactacatcaaaaggttttgttagtttgtataacagcattcctaatagattttctgaattttttttttaaaacctgaacttggtgtttcactaaaataatagagaatttttaaagatgggcaacctttgggcccatgcatataagcttgggcttttttacctgggatggttttacgactacatgtattaaattctttatctctctcttgtacgtttattggtaatatttattcaattatcaaaaatataaattctttatgcgcagttttttttttattctttattcaagttatgtcttggtagctataagcttaatagaatataaattcttttccacataagcatacagaagaagatttaaagatgtaaatttatccaaaaatatatcatgcaccacattatattttacaataatggataatattgttgttctttatgtggagcagtactatttaatactaaggaagctaaagaagtcagggagaaagatcctcagaccattcttccagaagatgagaacttcgaaggatatgtccttatagctgcagaaatgctccgactagcgaggttccagctttaagtaacattccagccactgatgttccagctgaaaaccagtctgattcaactcagcaagcaatcagtccagcttagccatgaactcatcattgatca

SEQ ID NO: 188865 - DNA, 1595 bp, Cannabis indica
gtaataataataataatagtttccttttttatatttaaaaaattatcaatagtttaaaataataatagaaaaacaatacttaaaatgactttatttaattgaattataggaaggggtaatttaactctaattcatctcattaagatatttattattttttagagataattatgatcgaattataaagatggaatttttccaaaaaataaatttggtctcctaaatttaatcttcttccaattctctttaattcacttaaacctcttttacaaaaataaataaaaaatccatttaaaaagtgatttccaaactttgatattagatcaattttatagagattcaaggtcaagaactaagtaaaaaaaaatatatattactttgtttattaagaaaaatattacgttgcggctgtttgcaggtacgatttattttatttggtagaatcgaaatatttatacatttaagcaaaaaaaattataattaataatttaattaaaaatgattttaaagcgagattatttttaattttgtttgtaacatgtaagtaagtctgtccttggttgttttataaatgatgacgtttgtagttttgattaataaaattttctcctgtcatcaaagaaaataaaaaagaatattacaaaaataattgaaattaacacaagtgaaaaattctttcactaccaataatctttacatgaacaagtaccatctttgaaacaatggaacctgttcctatcacgtacaacaatctctctattcccaatagttgagatcaatttaaaagcttcatgacaatcctcacaaactcgaagatttttcataaccctaatcggtgttctagccggggtgttaatcaacccgaaaaccacagcaagtttctcactatgtctatacaaaaacctctccttttcggtttcttcaatgtcaagcaacacaacagaagtgttaggtacataccccatcaccttcattttctcaactagtttgtcccaagtttcgaatatcttcttagcttggggatggctctcatccccggctacaaactcgtggacaactccatccacggtgattgagctcgccccgggagtcttcctcactcctcggtctctcatcaacttcctcactcgcgcagcctcttcccacctctcggcctctgcataaatgttcgataaaacaacataataaccatcattaaaaggatctaattccgaaaggttttcaattgcttcttcagctaattcaatgttcttatgaactttacatccaccaagtaaagctccccacactactccattcggttttataggcatgttcttgatgaattcccgcgcctcttgaagcaaccctgctcggcttaacaaatcaaccattgaaccataatgctcaatcttaggaacaatgccataatcactagtcatactagtaaagaactctcttccttgttcaaccaatcccatatgactacaagcatgtaataaccctaaaaatgtcacccaattcggcttcatcccaactcgaatcatctcatcgaaaagcttcaaagcttcctctgctttaccatgtatagcaagaccctgaatcatagccgacca

SEQ ID NO: 188866 - DNA, 1479 bp, Cannabis indica
aggaggaaattgggagaaaaatataggcaaagtctcgaatagagtaatattattattaatgcattttctcaagggctccaaaaacttagcttaattggagactttttttttatggttccaaagggacggttgagaaagttgatttattatttatttattttatttttgggagtagaagttagatttaaaaaaaaaaaagtttgtaaagaagttaaatagataaaaacattagatgagttacaattgaatgaaaccaaaccaaacccatgaatcttctataaatggagttggtgatacaatttctatctttttcttttcaaattctctatcttaacattgaaaggtgatgatcaaacattcaaaattagagtgtccttaattggctattttcatttttttcttcttcttcttctttctctttaccaaatctacaaaactagaaatatctactattctcttctcttttcttttgccattttaaggagtaataagtcttcaaagtggagttcgtacatgtcatcattttgatggttaggtatgaacataaaatgattttcaagttaagctttgctattcatttcgaagataatgttagaatttaggataaggtgaatgagattctatctcaaaaccaattagctatagaatgagtaactttttcatcttatatattctattatctttccacacattaacaatgtgagagtctatctctaacatataccaaacaatcaaatccacataggggttggttagcatgtcaaatttgattttaaaacttaattagattcgattggatgataataggtataacaagtcctcttcgagacagaacgaatcttcaaatacactcttcgagacaaaatcaatctcctaattaaacaaataaagttcaattttttcatttcatatccattaatctctaagtaattacatatttataggttttacacactttttgcaaattactaaataaactcttatagtatttttatagtgtaacatataataattttcaaaatctaattactaattaaattagattaaacgaacataaaaaaaaatgggaataagtcgaatattcaccgttacatacaaatatatttagagtattgctattaaacgataaaaaatattacagagataacaatgtttttttttttttttttttagggcaagcaagattttattgcccaagaatgatttttcatattacttattaaattaaaatatacaagagccaatattaaattagatcaataacaatataatatataggtatgtacttacttacaataatcattcttgaatttctcatattatatttattataaatatctagttatacatttatatgttgtaataaaaactaaaacaaaggacaaaagagtgtagacaaaattcacatgtttgaaaatttggttttaagagagtttagttggaggaatatgatggtgatagtcaagtataacaatgtca

SEQ ID NO: 188867 - DNA, 789 bp, Cannabis indica
ccataaacaaattattgtgttaatattcagtactagtatcaacgatcgctatccacagcaacttgtatattttgtcatgaaagaaaagtacgaaattttccagggaatcagatcctaaattttagagaggaatcgcatggaatcagatcttgaattcatagttttacaaataaaacgaaaatgaaaacgatcacaatcataaccattctaaacaactcagtaacttaatcttctacaacaaaataataattacataacataagtgtatatcaacgtacgcaatacataaaggcgaaaaagaatagaatagaatagaataccccgagaataggatcttcaggagcttgaacaatgtgagcgaagactgaatcgaggccattggaagcagaagtaggagaagcagagacaggagccatggcagaagaaggatcggagttctcagcaatcaagtgtcgagctaaagcgtttagtctccgatcagtgggtgaagaagaagaagaagaactgtgggcgacaaatgatgaaaaccttgggcgcattttattccgtttctttctcccttccttttcccaacgtttattttttccttaatttttatttttttttattttgaagaaaataaaaaaaaaaatggtaaataagtataaaggaggtgagatattccacttttggaacatgaatgaaccatgcctgttatgtttataacataggacggtttgtttggtctccaaggtggagatgccatggcgtgccgcttttttttttgtatcaactcaatacgtccttatc

SEQ ID NO: 188868 - DNA, 5007 bp, Cannabis indica
cagcagaactgatgtataaagaacttggtagttttgtaattaaaactataatttccccaaattttatctttgttttagaattgggccaacttggtgaacccggtgcatagcgggtctataatattcggcttaataagcaagctcaacagagctggcccataaaactcatcattttatactactgattgtttgtaagattacaggaacgacaaaacaagaagaaacagcaaattgagtctgttaaaccctaagaaacgatgcgaagaaagggaaggagataaggaccctgtgcggtgtcaatggcgcttcctgcttctactcttttgcctacttcttcttcttcttctttttcttcgccttctgaggtacctcactttctttctcactcactttctttgctatttttagtattcttgcacttggatgatactcttttcttttctgtacttatatatagccgtccctttgtatgtaattcatagataacttatttagaaactaggctccccaccgaaactttaatggataatttatgttcagattaaagttagttcaaacttttttattttttttttttttttttttttttgaagcaatgcaaatttttattcaaatcaatggttatgaaagtgagttttaattttattttatttgtaacttatccatatattatttcttaattggagcgagtattgtgctgtaaggttgtgttatttagttataccaaacatccggaaaagtggagtttttatattagagttgacagtccaaaactagtatggtatttgatgtattctggagaagaattcaagtgtgtcataactgcttaattttttgggacagataaaactatttgggtaccaatcatgtcaagtccaaaagaacttggttctactagggacccgtcaccaggctttgtccagatgtgccttgaaagtatcaatgtcacaatctggtggaccagaaaatgttaatatgaaaatcaatgacgtcaaggagaaattacagaaagccattcctgactcagttaaggaacttgaatgggagaaaggggctgatatactggtgcagcaattgctttctcttggacaaaaggcattcaaatggcttactgttgttttgattgctgtgagctttttatcagatgttatattcactatctctaggaaccaggaattagtcatgccatttggtctcttggctggttgtttattggctgatttctttaaagaacatctattgaagtgtttccaaactcacaagtacgttccatagtcttctcttgactcttcaataattatggatgcaacaatatgagtaaaatgctagttttgtttcttggcagggcaaaaggttaaactggaatcttatagttattggctgcttctttgttctggtcaagttcatctctgcatttttcgggatcagaggaaaggtgtttattttacatgttgctaatggtgggtttctgcaagttttgtggctttggaccactttgcttaaggggaaaaatgaaggcaaccaagagaactctttgtcgcaagaacatgattcattagccatagaagcaaatgattagttttgaccttaaagcttgtacattgagaagccttactctttcttctctgaatcctataaacaacaaatttgccaggacttgttctgtttttctgggtaaaaattattggttcattcataccaatttagttgtatacaatctaaattaacttttataacttaatgataattaatttcctcatggccttgtgcatttacatttacttgcctgccgaggacccaaagatgcatggacttgatgcttccttacttgatgtcttgattttcgtttttctgttttttgtttgctccctgtcgaaagatttagttcatagagacaacaagaaactacacatttccaaagataattgcagttttagtgaaataaaagatttgtataagtactatataaacggagtatctcacagaaaaaatttgtggactcttcctttgtgtaattttccaactttactgttgtttgttagcacgttgcattatgccagcaaaatgccttacgccatcatatatctctacaaggctatctgacataagaatttctcttccaagcactatatattcactcttttttttttttgtaaggatatattcactcaacttgatgactatagtttttacaaaggtgtaactatgcacacaaaaatatcaagaaaaaaatattaaaaaagctcttttcacttgtggctagctgattctgctggatgattcccctgaaaagtgaaaagcaaagacagccatgaaattgtatctttgattccgaaaagaggaagtcttccaagcattggatgaatcaaacctggcttcacattttctggaacccggacaggaactccatcctcctgatgatttgaacatccacatttgaaaaggtcacgaggatttactgtaaactggcagtaggctgattgcaacatttgatggatttcttccatcgctccagactgctcatctcgctggtccatatcaataagaatctgcattgacaattatcaataatgaaaaggggtgcatgaaggaaacaaaaaataaaataacaaaaaccaagcacgaaactaacctctgcaacatggttcacaaatatgggattaaaccgctgccgacagtattcattaaaaagaatagtgaaaataaccagaggaatggtgaaacctgatgcgactggagactttcttaatccaaaaaccccaagagcaattatttgcatcaaaactaatgaaaagatggtcgtgttgtgaactataggccagtactgtcctccactttcgtattttgaaacatacacgttcagaacctgtagaaaaaaaattaatgtaatgaaaaagaaaaagaattttctttccctaaccctttcagttgctttaatcagcaaatatgtagggaggtaaagggataacaaattgaataagccctaaaggaaatttttttgttatatgtaaaatgaacaaaatcaatacgatggatgattcattttaagcttgtcgtagagccccctccaagatagagagtatagcatagcatacaaacacagactgaatttagtttataccacattgcaaatcagaagaagactagagtgtgcacctgattgcgatagacaaagaatgccattataaaataaaccagcaagaagggcaatattaagggaaccaagatggaacaggtgaagccaatgaatccaaatagcaagagtcttggaatttcagtatgatatggaaaagacagggcatcatttgatgagtctgacttgattctgagtataaacttttttatcaaattgcaaaggagaggataaagttgcatgacttcacatgccaaacttgcccaaccagatgacaaaacatatgtcaagaagaaaccggcctgcaaatttcataatcatgaatgaacgtaggtaagaaaataatataatataccaactgataccttctatcaactaagcacacaaaaccacaggttaaaacagaagtattacaaaaatcagcaatcaattattattattgctttaaatacacacaaaatatagaagggaaaatttgagtttctatattttgtagtatgccttactaataaatatatcagccttaataattattgaaaaaataagtgtatgtttctaaacattggacaaaactgcccctccttaacaggcccccctctctctctctcacaaatcgtctctcaagctctctaccatgatgccgccaccaccaccattgacggagccagaaaatataaaatagggggtaaattgtaaaaatattaatttagtagaggcaaattgttatcactatacattttttttatttttcttacatattttatatataaaaagttatggcccctttcggtgaccattttataattgaatttttgtttttttaactaaaaagttgagaatacaagaaaaaatcatgttcggtaatatttttgtttttaatttaaataaaattcaaattttaaaaacacaattttttcacttctaaaaatttttaaaatctcttccatggcccactccgataaagcatctctctctccctccctccctctctaagaatagcatgacaataaaataggtttttagggtggaaagttttctacaattaaaagatatgattatattgttaaaatatttgggtatatatataaatataaatatatatatatagtttgggtttacataagagagaaagagaattgacaataaaacaggttttcagagtgtaagattttctaaggtatgtttatattattaaaacatttgggtatatatatggacattcgtttgtgtttacatgattttgaaggcattatctgatttctgttgttaatatctatcttttattgtctatgatctcttttgtcaatcattcaatgattccatgggattttggttatgggctgtgtttaatctcttgtatttatctgattttaggattttcactcgagtttgaatagaaatgggtaagcaattagaggagtgttttgtgtgtcttgttctttaatgtatttcgatccagtgatcttatattcagcttagccattttcaataatctggtttgttaatttggttttgtttcaagaacccatctttctgttttcatcatcaagctcttaattatgtccagttttgtactaaattcattgtcctctcaagctctttacaattagttatgcttggatgaaagttggttaatttttgttgcagctcattgttgtgactattgaatagtcccttgtgatttcgatgatagtaatagtagtacttgtagcgaatggctgagcagttctaggcttttgacaacattgaaaagaaggtgagacacttatgttgctgaagttgaattgagaatgagttctttctccaaacacattttgatacatgttctgctatgtcaagaatgagttcttttagcacttggttgattaactttt

SEQ ID NO: 188869 - DNA, 1560 bp, Cannabis indica
tcacctaatatatctgaattgagctctttgccattaactcacctgcgtacatactaagttttgaacataacacaacacatacaaaacaaaactcaaaacaagaattcaacttttgattatttgacactcacaacgaccaattttgatctttattatatctctgggttgggtttggtttttctcttgttctgtttcagaaattccaagctatggcctctgatcctgagcagcacactctctcttctattggaaaggtttgtgactcctcattctcaacttgggttatcttctttttctctgtttctgggtttgtgaaagtcaactgttttgagatttcgtaatcgaattctaatacgtgtggatgttaaattgctcttctttctcttcttggaaaaacccaaatggggaatttctttaatcttgctaaagaaatgatttttattgtttttttttgtatgtgggaaaagtcttcgggtgagattggaaatgaaaatgagcctcttctcagtagggttcaacattcagataactactctgttactgctgcaattctcccgtgagtatctctctacagtcctttgcttaatgtctcttaatgtttatattcatttatggtggcttggctttgtgctcttcagatttctgttcccagctttaggtgggctgctctatggatatgatattggtgccacttcttgtgctacaatttctatacaggtaatgaatgatatgataagattacatattttttgaatcctttattcttgatgtgttctatttcctggctttgtttgttaatctttgcagtcagccacatcaagtggagtatcatggtataatttgtcttctgtggatgttggtctcatagtaagttttttacagctgattttcttttccttaaagtttgtgtacaaagatgttgaattttagaccaagaaactgtttgtataaatgatatgtatcaattggattttgcagaccagtggctcattgtacggtgccttgcttggctctctgttggcttttaatgttgctgattttctaggtttgtgatctaatgtagttatacaactgaagttcttatgatatgcttcatttcttgaacagtgttgatgattgattttgtatgaagggcgaagaaaggagttgtttttatctgctttggtgtatctcattggagctataataaccgcagtgtcgcctaacttgcctatcatggtcgttgggcgcattatattcggtataggaattggactggtaattcattggggtttgaacttttcttattgaagtagtactagtgtgtaagaattttagattgttttcttagtttttttggttataatatagaatcctattcaatatgtaattgaattatcatagtagaagaattagtaatcgaacataaacatccaaagagaaaataattgctaggaatcaaacctttagagatgtaaaacttctaactacatgcatttaagaaaaacaaatcatgaaatgcttcatgcttgtcttatgtgtaagataattcacttcatactcctaatgtttgtgttcttg

SEQ ID NO: 188870 - DNA, 2487 bp, Cannabis indica
tttttgtttaataaggaaaggagagtccaactccaaactcagtcaccaatgctccacagaggatctacctggactattctttttttaacaaataacaaaaaataaaagggatgaaccaataagaggacgccacgtctaaattgtttccctacgtcccttcacatctgaatccaccgagccagttgcgtcgggttcacaacatccggaatgtgggccccatcactcttcaaaatgctcgccacctcaccgtaactctcgtgctccttctcactcttccactcccctccgccgcctcccacagcaaccgcctgtgctcgacccggatcgaacttctgcccgaacaacgtccccttactcagaaactcgtaagccatgtacccggctaagagcccgttcgatgaggctggctcctccggctttgaaactggttgctgcctcttacctgcggcttgagcttgagcttgagcctgagccgaagccgaatgagttgacgacggtttacacgaatagaaagcttctctgtcttttctctttcttgagggtccaggtgtcaacatccaacgagagttataattcatcctgtggccctcaaatcatgccatgccacgtcagaaacgaatgaatttggtgtgttgtcgttgtggcactcgaggagggtaaaaaagcgtcaaatcacttttctcattttcactcaagagggttaaatcagagaattcatgcacagtaacaaaatatcgcctgcctctgtctagactagtcccacaacgaacaggggcaaaatcgtaacattaaagatagacctttcgaaaatgaacaaaaaaaaattagtattttaattgaaagataagaatgtatttgaatggtggggtgagattaggtctaagtcaagtggtgaaattaatcggatcgcgatgactgatgcggcggatctcgtcagtgagggaaaggcggagccgctgagattggcggagaacaaaaacagaaagagaaatggacgaaatggagaaagaaaaagaagatgtatttatagtgagagagagagagaaggggagagaaatgaatatgaaggagcagcgtggtgggtctttctctttatatcacatttttgttacatattaagttctctagtttggggaaatatcgataatgccattctcaactcaactgctaattacataattctccttatattattatttattagttattacaacagcttttattttagagttccaaacaaagaatctccttcaacgtttttgttcctaattgaaaattacattttccaaaattgtgttctgttagttagtttttttagatattatattataaaatatatcacacattttgggatacaaataaagtaataagctaaaaaattattggcaattggtattgtctttttgccaaacttgacaactttgacgatgattaatacattttttttgataaattcaattttaaaaagaaacacattattgataaatttcagcctttggagtttggatgttgaatctcttggccatgactgaattgaaagataatgaaacagaccaagaacaaaagagaaaaagattgaaagaaagttacaaagagaaaaagaaagagagtaaaggaagattgatgaagcaaagagcaatttcattcatttagtgttaatggtacacggttttatagtgacagagattagagctagaaatgaaagaattagttacaactaatctaacagatttgttgtaacagattaactgttacaactgccactaacggtctcaaccgtatacccttaacacggcccctcaaggttacaattcgaatcgtttgtgacagaagtaagatcttgaattgtaagcttggatcgaaagtgtggaaatcgttgactggagattgctttagacaggccatcaacaagctgatcaacagctggaacatgtttgacatgaaccatcttttgcagaaccttttcacgcacaaagtacaaatcaagttctatgtgtttcgttcgtgcgtgaagaacaggattggctgtgagaaggatggtgcttaggttgtcacaccacacagtggggggtcttggaagctgaatgtgaagttctgtgaataaagagtgaatccatgtaagttcagccatagtgcttgccaaacttctatatccagcttcattgcttgaacgggagattgtttgcttatttttacattgccaagcaacaagattatcaccaaaaaagatggtgaagcctgatgtggatcgacgatcgttggggtctgtggcccaatcagcatcgcagaaggcaactatgtcatgatatgtgggtctttttagatgtaagccgtgagagattgtgccactaagatatcgtaatctacgtttcacagctagccaatgagtgagcaaaggattgtgcataaaattgacaaaaccttattcacactaaaatgacagattaggcctggtgatgagtatgtactgtaatgctccaacaatcg

SEQ ID NO: 188871 - DNA, 4437 bp, Cannabis indica
aattttaataaatttaaaataatgtagtataaaaaacaatatttaaacagtttatttcacacttataataaaatagttacacatgtaacatactatttaaactctgtttttagtgtgttaaatttttttcgtaatttttaaaattttacagaatagtttaaatactataacgtacgtgaccataaaaaaaatttaactaaaaaattatttggaatactaaaatatataaaagtgcatccatacatcattttaagagagtatattataaaattttatatatatgtatatataacatgtaacaccgaaagttgaatatgatcacatgttttcatctaataatccaaaaataaagagaaaaaaaaagtctcactcttacacacccaaaaacacagccatattaattatagttttgccctaaaaaaaagatatgcaagactttcgtgatacatggccaatattacacacacatatataaacatatcttttgtaatttcttatagtaatcatcaaagttgattcattagttatttcaaggaaaatccaaaagttttataccatgtatatatttataaatatatatatatatatatatatatatgtgtgtacatcatgtatattaatttgtggggctacatattaattaatacatatatatatatgtaatattaaattctcaccctaggttgcgtgaacagtaattaactatgaaatattcaaatatataaaaaataaattagattattaaattttattgcaattaattctaagaaagctactatggatatatggtagtttttacttgtaaaatttagcttcaatgctttgttttctttattgggtcttccctaaagtgacctaaaatatcattaaaattatatatataataatataaatacatatatatacacaccaagacacgcatgatcaagtaattttatatttaatattgaccaaatatataatgttggtaactataacatatatataaatttatttatatatataacttgatcaataacattaatcaacaataaattattaactcatgagagaagaaaaaaaaatattaaaaaataagtactccacaaagaaagaaattagcttaattagatgaaattaattaacccaactattaatacaagaggttacaataataatgaaaaaaagtgaaaaagattccaacttcttgaaatctcaaacaaaagcatatatataatatctgcaattatgaaaattaattattgagaaaaccctaattaattcaacaagggccacagcttccttttattaatcttttcattaattttctctaaaaagaagctgtgtacacttattgtcaccaccatgaaaatacaaacatatatataaatatatataaatagatatagtattaattataattaatataattagctagggttagaacaatataggagacaactccatcaactcctccacttgactagccgttgtagcattactagttgtacttgtttcatccaatagccatttctcaagaaaagacaatggaggcttattattatgattattattatgatcatcatcatgatcacgattatgatcgtaattatgattaatcttttcttttcgatcgtgatcataatcatggtaatcatgattatgatccatatgagttgttgaagatcggtcccacaaagaaatattattattattattactaataataatattattcacattattttcaaatgacaaaatagactcgaactcttcatgagataccaaatcaccactgccgccaccacctccaccaccatttgttagtagtacctgttgctcggtttttatcccgttgttgcttggaggtactaatatgctattgttgttattagtactctttggagaagatctcatccaaccttctagtaaacgagatatgttctcggtactagaagcataaattgtagaagaagatgatgatgaggattgcttcaggctcagattattatctgatgaccctcccccgcccccgctcccacccccacctcctccaccactactcccaccaccatgactcgtggaagtagttggaggaggtggaggcggaggaggagggggagttttgttagatagaaagcgatgagatgatgatgttgttgttgagtgatcatgagacatattaatatcattattaggttccaaagctgagtgaaacttcttgagcttcttcttcaaatgagtgttccaataattctttatatcattatctgttctttgtggtaggtatgaagctatggatgcccatctatatataaacataaaagaaaaacaaaaattaactttttttcgctaaataatttagacatcgattttaataagtcaagatatataaatcaattcacaaaattttagacatcaattctaataatatgtcatcataagatgatgcttattattagtaataaaaacccgagattaagacatcgattagccaatgaaaaataagtttcttatttcgatcgatatatcaaaaatcataaaagaagaagatgaattaataacattattaatatctacatatctatatatttatataaagaagaacagttcgaagaatttattacttgttacccaataaagcttgcaaatgaataatcattccttcttcatgaggagtgaaattccctctcttgattcctggtctcagataatttgtccatctaagtctacaactcttactacatctcatcaaacctatttaaccataaaaacaaaaaccctaaataattaagtaataaaattatgatcatattcatatataatacaaacaaacacataaataattaatattaatattaattataattaattaattaacctgtgttggtgggaactgatctccaatttccaggaccatgttcttggatgtaagagacaagaatgatgtcttcttcaggggtccatggacctttcttaatgccaaccttatcacaacaaggaggccttcccatggcaactcctctctctgatctatagccctagattaacctagctattatatgtatattttcttttctattttcccaacacccaaacactatactactatactgaaatgatatatattattatactatatgtgtgtgtgtgtttggtttctatttccatctctctctctctctctctatctttaattttctatattgacctttaatttcatcatcatcatcaaatagtgctgtcatcaacatgtgatttatgatcttttatatatatttatatgtgtatatttatatacacttggtgactataaatgaggtagataaggacacttttctttattaataatatatatatgtataaataattgtataagtattttaaagttttaagtttataagtattataaatttaatattttttagtaacataataagtattcaatgtttgtaaaactgtatttttttctctaatttcgatgtcagtacaatttctgttattatcttaatatataaggttcagattctatattattgggtgtaattacttccaaatttttcttttaataaattcaaaatgaaatctgtacaaatcataaaattggaaaaaattatatttttacaaatttaaatattaaatttatgctgcttacaaattcaaaactttaaattcttatcgctatttaccctatatataatctaccttggatgactcatcaattaattaatatttcatttctttacctctctcttattaatatttattagttgataaatatatgtatagtactttttttgatgaagatcagctcagcaaatttatacataggtttttaattaaatgatgtcccacattagggccacactactcttgtccttttcattactaaatttatttaacatgcaaaataattatttattacaataaatttgatgttatagctcactactatatatatatatatagttttgatgttattagtcaaaaactgtaggtaaaagatatatattagattattcgataattaaaagatattacattaattgttggttttgttataaacaaacactaattataagttgtattttatgttatttaggtttcaaattatgattgattattgtcatcttattattaatctaatcaataatcaaatggacgtggattgaatataattcacaaaataaatttgaaaatatatagaaaaattattgaattaatgaacaaataatgtcgaaaggcaattcatcttcaaacgagacaacatatttttatatggactactaatcataaacataataaatccaaggaattatgaataattatactcaacaaagattttcatctttttgtacaagacaaaatcaaaaccctatctgatctatgtacatatgaagtcaatatagaaaaacaaaaagtcataattaattagtacactacaaaaaattttacttt

SEQ ID NO: 188872 - DNA, 2753 bp, Cannabis indica
aactaattttaaaaataccttaaaaaattctcaattataagagtaatttgaggttaaattcacttatgttttaatttgtatatagttaatgcgtgattttttcctttttgtgataataccccattagcttcacttttatttgtaaatttgaggtatcaattaataatattaaatgtcaaccaagactgtcactatatgtacatgtcgcatgttttaattggttcaagcaattttaattattcaaatataaacattattttaaatagtttctatttaatcgtgaaatttaattgatatctcaaatttacaaataagaataaaattaagaggtgttgtcttaaaataaaaattcaggaggttaatagtatacaaattgaaatattagagagtatgaccccaaatcactctaattataaatatgtctttttttaattaataattataattataataatatcttacacgttgtcagatatatatctgaatgttaaactaatatatttgagctatagcatattttattatttatttatttttttaaaagaagtttattaaggaatagcctccgccattacaatgttcttcaaaaagataggagcattccgctcatgaaacaaacaacctgacaaagaacaagatgcccgagcaagataataggcagccttgttagtagatcgatacacacaagaaattaaaacattctttaaagtagataaaatcaaacgacaatcctccaccaacaaaccaaagtatgaagtcatatgaactgagctattgagtacttgaacaacaatcaacgaatctgtctcgatgatcacttcctcccaccatttcctcttaatccaacttgttattcattaaaataaaatagaaatattcataaacaagtcaagatgacaacaggccggctatgatcgagtgcaaggtgggctactgcacagggcctaaaaaaaataaagggcccaatatattttttctttaatgcccaataatttttttaatgaatctaatttttgaaagagctaacaatttgtcattagtcacttctatcccaatgcccaaagtccattttcaattctattaatgcttttaagtaaaaaaaaatctattactgctatttattattttttttcaaattttttatattctttttttcttatatatttttttttgttatattggaatcaataacaatttttataaatacttggagttttttggtgttttgtaaaatatataactgaatgataatatttaaaaatattatttataaattatatttttttgtaggggcccaaattttaaattagaacagggcccccaaaatatttaagacgacccttaaaggatttaacttgttaaaagtatcttaatatactgttaagtttgtgaattatatgttattatttgtcttcaaaatataatgtggtattagaaaaaaaagaaatgaaatgaatttaggtggcgtttagttaggaagaataaaaacataagaatagaaataaaaatgaaaatgagaataagaatggaatagaataaaatgtaaaatacataaaaaaaattattaaattttttctcatcggaatgactttttcttccatttcaaaataaaattgatattctactaaaataatagaaatattattctattagaatgatattccaataaaatatgcaaccaaacaaaaaataaaataaaaattatttatttcccattcagtttcattttattacttctaaccaagacaagtagtggagaatgagatatattagaatgaaaatgcttctattcttcgaccacaatagtacaccctaataattacaaagtttgactttagtttaatgaatagtgtccattccaatgttgataaaatccaaacactaaaatatagaaagaattaaaaatattaataataagaatatatgtaaagttaaaactagaaaaatgtgctcatctgatatgtgtcagcagtaacaactgagtcactgacccatcaattttcattgctctttgtcttacgtaataccctaatactaattaatttaaattaattaatacaaaaatgtgtgtagtcccatcaagaacgttgtaacaattgattataacgtgtgatatgagttttgatgtgtaaataacagtaagctatatatatagatagtctggctttgccagattagaataattcccccttttcatcagaactactacgtacgtttgtatattcattttactgcatattttcatacattattataaatatagtctatatatatatttttatattctattttcataaaattgaattctttaacagtggtgcggtttaaatttcacacatgttaaaaattatattaaatttagcaaaaaatttacactatctattgtattatttttaaaaaattatgtgttgttatatttaacacattttaaaaaaaaaattactctaataatgttctaaataatgtgttaaatttgtcaattactaaaagttatataaaaatttagcacaaaatttagccaataaatattatttttttcatttactataatattactaattattataattcattactttacaaaaaattacctaatttatttaccatattgctattatgtaaacataaaaaattattcactcacatcaaattttttttgtgactacaataaaaaaaaattacttgtgagtaaatatagtatttagatatcagttgtcattaatttaattttagtcactatgagtattgtaact

SEQ ID NO: 188873 - DNA, 2802 bp, Cannabis indica
ttacacacttataaatattaagaaactagttgctagaacaagaaaaaatatcacaaatggtataaaaaactaaacattataaatatgagggaaaaaaaatacaataaaaatgtaaaaattaaaaatacatcataaaaaatttcataaaataaattggaactttataagaaaaaaaaatctatatttgatgtgatttgttcttttgtcaccttttttaatttttttttatttttgagaaaaagtctgtatccattaaaagaagagcataatagtacatgatacaagttacaattgtaaagagcaactcttccacaaagcttcctgatctaggcctgaagctttcctatctaagcaatgggcagcttcatttgcccctctttggatatagctaataaaagctttacgaaaagaagatagcgagctattaatttcagtaacaaaagtattgagatgcagattgtgagtatcattattacaaatataatccactaaaaccttgcaatccgaaacaatactatccggataaaaggaatgagcatgacaccaagaaagagaaaagtgtaaggcttgtgcttccattaacaaagatgtgttaattccacgccatggcattccgaaatttgaaagtacctcccctttgtttgtttgaatggacatgccaaaatccattttgttgagttgtgtatcttgagcggcatccactgaaagttgtaggttgtaagtgggagcagatggtgcacttccattggacatcgacgaaacatcttgaggctctaatagtggaaacttttttgttgcagctttggtattggtcgatgtagtctgttacctcacggagtacctgagcaggagaagaagagaaaccagcatgtagccaactgttcctgcagttctaaatcttccacaacaagcatacaaagtagtgataatttccaacagtaaaaaaagtggcagcaaggtgtaataaatccaaacaggttagcttttttaattattaggcatatgtgatgtaaaatttcattaatggtcatattatttagtctatagttccttctagaagtataaggtagggtgaccatttgtctttttatactttattgctccgttctgagcgtctttctgctaacattaagcttcaggagcaagcttctcaacttaaaggtgtctctattgctcgtaatgatccttctatttcttatcttccttttgctgatgatagcttccattttactattgctacccaacagtcttgtcttgctttattcttcgcttatataattttgctactagttaattggttaatttagcaaaatcctctatgttattttgtcctaatacttcctccttgatttcaagctatttctgtagtactttaggtttagatactgtaagccttttgttagtaaatatcttggtgttcctcagtgttttgagtgttctaagaagcttagttttatttttttcttttgttgataatgttagctctcacatcaatgagtgcaaccaaaagcttttttctagggctcataatgaggttcttcttaaagcggtaattcagatcattccttcatatgccgtgtcctgttttagacttcctatttttacttttcgtaaaattgaaaaaatgatggaaaaatttttgttagcatctatggagaataactctgaaatttattggaaaaagttggtcctatttttgcaattctaaatttgttgagcgccttgggtttagttttcttatctattttaactaagttatgcttgttaaaacgaccagaaaggtgtttaccaatccttaattccttacttacttttgtgttgaaagctagattattttaaatacaactcctttttggatgcttcgaaaagttattctctttcctttacttggccaaatttgtgctggggtagaatctacttaagggtcttatttacaaagttagtaatgcacattctatccaaactttgaatgattattggatccctaatactagccacatttcttgcaaggataattgtattccaccttctgacaaagttgactaattcataaatgatttaggattctagagtattagtaaacaatgattatattatatctcaaatccttaaggttcatattggcagtgaggataaggaggattccctcatttgaaatcttcatccctcaggatgtttcactcttagaacagcttatcattttgctgatattgctactctaaaattttattaggaaataatggactacactatggactttgaatatcctccccaaaatattttgagaacattcttttacactttgcctacaacttcaaacctttactctagagaatttattcttagtctttgagtaattctaatgaaactataacacacctatattgttccaaagctgaacacattttgagagtttcaccttacaaacagttctataatactaataagctttgtgatgtgagagaatttctctttagtgcctttaagtaatttcttagcaaagatgatttaggtatgtttctgggtactttatgagctatttggggctgtaagagtaataaattgtttggtataggatataagcatgcaactaacactatagaatagaggttggctcaaaaggattatttgctgaagaatcaaatgctatctcataataagcagcaagctcagaaggtttttcaaattgaatacatatgcttcgatgaatcaaaagatggaagaaattgcttacgtggtgtggtggaagattgccacaggttttgataatctcaaacctttgatattaggatcgaaaagttt

SEQ ID NO: 188874 - DNA, 2361 bp, Cannabis indica
atattatattatatatgttaataaaattattatttaattgattgatataatgcagattgaaactgtgaagcttcttatgttgttgaatgtttttggttatgggttgatgcttgtgttgactactttcctagccaaaggtgataaacgtctccaagccgttggatggatctgtcttgcttttaatcttggtgtatttgctgcacctctttgtatcatggtacgtacataatccataatatatatatatatatattgattaaaattatatataatatatatttaatattttatataatatatgtgcagaggcaagttattaaaacgaagagcgttgagttcatgccattccagttatcatttttcttgacattaggcgcagtcatgtggttcttttatggtcttctactcaaggactataatatagctgtaagtatatttatatataaattaaattcaataatttctgactgaccacttccactttcacttatttaatatattattattattattttttgtcttattatatgtatacacagttttccaaatgtattggggttcttttttggcattgctcaaatggcactttacattgtgttcaagaatgccaaaaagagtgtgatattagtagttgaggatcaaccaaacaagcttcaagaattatctgaacatgttattgatgtggtcaaaatcagcacacttgtttgcccaactgaactaaatcaagtagttctacaccaattgactacttcgaccaataatgatattaatcaagctcaaggaaataataataatgacaaaattgaagaaaataaagtccaagaaaatattactatcaataaggaagttgctgttgtggttgttggcttagctagctctagctagcttttctactcaagtttgaccgattgataatatatatatattgaagggaatactattatatatctaagtttattattattatattattattaatttttataatgtaataatattttgcttgtatttaatttgctaacgtgtggtgtcttaaatcagtcccctaagctctgcttaattattaattagctagcaatattatatatatatttatagctttgatcaatattattcccttcttatatatatattattaatatatatatataatttccaaaagaattgtaataggtcttggtttgcatgtaactttcaaaggctcatgccacttgtacctcttcttttatgtaattacatgctacgtacggttattcctttaattatttcttttaaaaccaacttttattatttttggtatattcttttctttattctctttataatgcattagtatatatttatatgttcatataagaaaaaagtatggtaagataacgcatgtaaaagatacataatatttatttactaaataatgattataggaatgaaaaagctatgatgtaatgcaatgaatatttatatatttccaattttatatataatttggttacacacgagaaaaaagatagtggccttaattcaatctgaagaaagatgcaaacattctccttatatctatattattaatttgtctaaagttagaataataaagcctcttttttaagtatatagactagtatatatatatatatatatatacatttgcgtgtatgtgcatatatattgtgctttatatgtatactttagtatatataaatttataatttattaattactaatgcgaaatataagcttaattacggccaccatggagaccaatttaagtatagttttccaatttcttggaaagtatatttcacaaaagaaaatactagaaaatttcccaaacctataaaataaatatatattgaaaatgatataaaattaaggaaattagctttcgataaatagatacatgaatgcatatactcaaaaaaaaaaaaaattcagtcaaaatcatataaaaaaaataaatatatttatagttcaaaatcataaaaaaatgtatatattttcagtagttgagattataaaggttgcatcgacccataatatgataatttgggagaaacataaaaacggtcggctataattgttgctgagcgatttaaggaagaaaatacatgaaactaattagtatgtatgtttttatgtatatatataataattttctttaaaaaaaaaaagaataataaaaagaatccactttgtgatcatagactcttttgatggatcatctagagagaggttagctgttttagaaaatagaaatgacctttttttaggtttaagatatttaattaatattagtccaaaatggttaggtgtacagacccccagtgaccaaaatcttcctgaatctaattagtggagaatcat

SEQ ID NO: 188875 - DNA, 3240 bp, Cannabis indica
atataattatatatatgtatgtaaatatacaatagccccaagctgtaatgagtggtgcaaatttcatatattaaattaaatttagagatctaacctaccattttatatagatcctttccccccccaaaaaaaaggaaaaaaaaaatagcattttactcgtttatttttccgatccatccgcagaaccgatatttgccaattgtttttggaattcttttattcttaaacgaaactaattttattttggtaccgaccaaaagaaaagaaaaatattttaatttttttggaagtgtcaactgtctaacaaatttaatctctgaaaatgccaagctgtaaacaaaatataatgttaattattatttttttaaaactaaaaattattttcaatacaaaactaaaagaacaaatgatcaaatacaaaattcaaaactaataagcaggggacattcagagcaccaaactttagtagtgtctaaagaaagagcaatatgagcaagagaatgaattaattcagagactgcttacaatgagaaaggaaaatactagaggaagagaagaccaaacatttctaatatccttagtaatagcattagcaccaccaaattcattaaaactcaaagtagcttgtaccaaacaaacacataccatgagactagtatatcccaaaacaggacaaaaaatcagccattgctacaaagttaccacacctctttaaatttttttaggaaaatttacacaaattacttaaaattacactttttattatatatatatattttttttttgtttcatttttacgaattataatttttttagaagaaaaataatgttatttttatgttaccacaatattatactatattttcgctatgtgcaaacaaggatctgttaaaaaaagaaaatcaataaaaataaaaaataaataaataaacttttggtagtttttgaatatttatgaaataatctcataattttcttagtttacagcccatgattttaacttttggaaaaccagacatttgctaccaaaagaaacgacaacaagctttcattccccaaaaccttgtcatacctttatcagcatatatctttaagaactcagttaatatttgttttactttatcaaaagaaccacgcgaagagcagagacatgagatgtaagtaatttaataggtcaaaagctttgttaatggaggacaaagttcacctctttacaagccaattatctcagtacacaaaataggtgattacagaagaaaagagccccccaaaacaatgcatatccattctacaatagaaccccaagatttaacacttcccaacaaagctaatttggtcctaaagaaaaggacattccaattccaaaacatggagtaaaaaaaaaggtaactcctacagttatataactaccagtaagccaagttagtaagagtcatatctctagcttttcaccattaccaaataatggttgaatcagagactcaagcagctactgcaggtactcaactcttgaacaactgattccatggagggcctctcaatgggtgattcgtgagtacataacagagcaatctttgcaagctttgaagcttcatattcaaagaatctgccttggaggttcaaatcaatgaaatcttggaatctgcctgattcggctccaacacggattgagttggaaactttccgtttcccagagagaatttggagtactagcacgccaaatgcatagacatcgcttttttctgtaaaacggcctgtggtagtgtactctggagctaagtagcccatggcagcggaagccttgagtgctgagaagacaacatcattggtaagaagcttatgcaggccggaatttgagagcagcgggttgaaccgctggtcgatgaggaccttctcagctgagatgttttgatggacaagagcaggtttgtttggcttgaatgcatgtagaaaagctacacctgcagaagattaaagatttactcagaaattgatcaagaatgaatcttgaacaaaaatataaagcaaacaaaactttgagtattacctttggcaatgcccttgacaatagaaactctagttgaccattcaaggacctcaccatcaccatccttcacgtcaagatattgcagtaagtttccattaggcacgaaatcgtagatgagaaagcactcgccacggcctcttgagcaacaaaaccctcttagcttaactagattctcatgcctcaatgaggtcaacatgttcaaccctttcaagaactcagcatcctctgacttacagcatgatttaccaatgcccttgatagcaaccagtgacccatctctcaatatccctttataagttgcagaaaagttactctttcccaacaaattcacttctgagaagtaatgagtagcagcctcaacctcatccaaattgaaccgaaagctgtggaaaacttcttgagcaaatgcactcatattctttccatcagccaaaggatcccaaccattagaatactctaggctgataagaggggatccatttctcctaaccatccctttagcttgatggtcagtactaagccgtccctcagcaacctctaaagaggtcgcgagcctctgcttcctccgacgatattgagtgaaagatagaattcctatggctaacaatgcaatagatactgccacagtaccaacaacgaaagaggcttgatgggatctcgacacattcgaacacccagtttcaccgcaaggcagcttaacatttgctgtctctggtatgtctcttgttggcaaaccagctgagccagtgccaaatggttcaggtctatttggattaacatgatctgaagagttacaagggttcaatgctgcaaatccacttccacataatccgagattgttttcatatccaaatccttcattaagtttctttaaagcttcatcaagcatagaaaatagaaaacacaattagtaacataacctttacaaaatgcataatcaactaagcaaagaaaactcataagctaacattaccaagcggaacactgccggaaagactattgtttctaatgtcaagaacttctagcaaaggggcatctgctagtttaatgggaatggagccaaagagatggttgaaactcaaatctagcctcattaacatttccacatctcctaaacttgctggtattgctccagtgaggtggttagattgcaaggcaaggcaagtgagtttctttagagatcccagttgagt

SEQ ID NO: 188876 - DNA, 1631 bp, Cannabis indica
tcaaattcgtttttcttggagaccactgcgcgtacgatgattgacatcttctttgctttcctgctcaattggtgtcgcgtcaccaaatgatgaggggatccacaacgaacacaaggcccttgaatggctttcagggttaagaaatgtgttggcctctacagagatttgttcagcattgtcctgccatgttcggacatcagcctcgatttcatgacagttattcaaggcttcattgacacggcgttgcattctttgtctagcactgttcaaatgttctaattgagttcggaggtcgcttacgttggtagtgtagtgaaggagataacccaactgccgccccactggtgccactgtatactcagccaacttccccagaattgaagttgcaactccaacagcaaattcaccaatgcaagccattgtcttatcttatgttacctccttataaaaatgataacacaagatcagtactaatcatcagtccaatcgaaaatgaaacatatttataaaacaaaaatttaaacgtagaacatcatataaatttaaagtaccaacctggtaataacagttagcaggggaaaccaagaccaattaaactcaagtttagtaataaatagcagcagcttgattgggaagattaataactgaattatttcaaataataaaataagaacatatatatataaatataaataggaggatgtagagagtgaacatgaataaataagatgtaaagtacatacctggtatatctatctatacacagacagagattgctgaaacaaacactacactcactcaggtactcaactcaagtctaagtaagaagagaagtaataacccttctggcctggcgggaatctagagaattaaattaatcctaatcctcttattaattattaattattttaacctaagctgaaaaagtatcctaggtttgaatctttctctccaatagaaacaaccaactacaaattaatatatactgttttatttctgtaggaacacgacacaatataatattatatatattatcaaaagacaagattctcgtacaaataaaacaaagagatgaaattatttattcacattttatatgtatatagcatttcagtcatgagaattttctacattagtaataattagcacagtatttgtatttgcaattatgtcctaatacatttttcttatataatttgttaatataaatagtatagttctacctaaaacatttctatcaaaaatatagcacaaacagttaaacaggaaaagtattattaggattaagattttttgaagtattaaatttctatattgtttaagatgcaaatatttttttttttgttgtataccgaattttattataatatttattataagcaaaaatgttttaattcataattgtttattataatgggcttcacgtactacacatgatatgattaatttgaatatatagtaaaatactcacttaagaaatatataaaaggcattaggtaaagaaacagtaaatgctatccaaaccacatatgtactctttttccaatgatcactcttaattggaactatcttactaatattacaatttttttttttaatttttaattttcaagtcaaagagatttaaaagc

SEQ ID NO: 188877 - DNA, 1986 bp, Cannabis indica
ttctgttaattagttgtaaagttattttactgtgtaacaaactttttacttctgcttttgtactattactttggtctataaataaagagctggttgccctgttttgggtaagcctttgcagataattcgtgcccctgttcctttcattttcagtttttagcttctctctatttttctggtttttaccatcttcagttagaaataattaatatgtaatacaatatttgtagaggggatcttgatttacttcttatgttatcttcaatttggaagtgatggttgattttgtcacgtacttgctgatataaaattataacaaatatttaataaataaaattgatacaattggattctgcaacgccttatcagaactatacaagtattgtttgagttaataactttccaccatcaaaagtctctcctcatattttcctcctcttattattgtttgttgattaatactactgactgccaagctttataactcttttcttactcttgcagctgattactgccttcttgttgtgcaatatcttctaaaaacaatgtcatattgaggtgtgaagatccaccttcatcaacaactctctttgccatctccccaagctttctagctctttcccttctctccttgctttcttcttcttcattcaacacttcctctaaagcactcttaagagtttccctcttaaccttcaccccaactttctcctcctctccccatttcattggctcttccaaccccaaagttacagctatcttcaaaacttgtacaaccagtttctcattaagaaactggtcagcaaacaacggccaggtaaccaagggaacccctgcagatattccttcaagagttgaattccatccacaatgagttaagaacactccaacagaagggtgagataatattagtacttgtggagcccaaccccggatgaccaagcctcttcccttagtcctttcttcaaatccatcttccttgatccatttctctacttcttctgaaatactagtcccacctctaatgacccaaataaatggtttgtttgaagcttccaatcctagcccaagttctattaaatgtggaagttgtaaattgcataagcttcctaggcaagcatagactacagagactggtttccacaaatcaagccacttgagaaactgatcatgttcgtcaacagaagactttttacctctttgagccttgtccaattcattgttgttgcataaggaaacaggaccaatacaccaaactttaccatttttcacattcttgtagtccttgacaaatgcaggctccaactcttcaaaaactatttataattgttccataagactttttgtcagcatccataattctgtcatgcacctcctttagttctgaatttactgatgcaaaatgtacctgagctttggtcatttcaatccgttcggccaggtaagggacaacaaatcgttctgtttcagaagttattttgtcaagaaccttagaactacgtatattatgcacacacaaaatgcagaagcaacatccaccatggaaagatatctttggaatattgaactttctagctatactagcagtccatgtcaaagacatgtcagcaattatgcaacttggcctcagcttaagttctttaaatttttcctcaactggctgttgcatcattgaggctgcgtgtaagagtttagaggcacaatctagagaaggcatcatgtcgaaattctcacatccttcgggtaatcccgcttcttttgaaggaaaattaactttgattagatggatactaagcccaatttcaatggctcgatcaagaacattttcaaaacgtgctgcatttcctggtgtagtgactatggtgatcttggcaccacgttttgctaacattcttgctatgtcgaccatcggaatcatgtggccttgtgccattagaggaaacaggacaaagtgaagttgtttattttgtgtggccattgaaattc

SEQ ID NO: 188878 - DNA, 1150 bp, Cannabis indica
ttttccgcaaagtgatcattaatagacatttaattgatttatcattgtgttaaattatgattataatatgtgaccttatattatttgtcctatatatcaaatacttaatataaatcacgttacattatttacttttcctatttatagatactcccctgtttatgatttcaaatttgaaaagtcagttaggcaaagcaaagctacaatattattgaaacttcttgcattgcatgtgtaaataaatgccagcatgttcatataaaattgaattgattactatttgattttatggcaacgaaacgaagtagcataatttctaaaatacctaaatacacgtaccctggggcttgagatgataatcagtgctatgcctatacatcacaaaaataataccaaggaaaaaaccaatattattattcatttaaaaagaaaaataaacagacaaaagatgtagaccttgcatataaattataatgttggattgtttacatttgaagaatgagttattagatcttgaaatttgcaataattggatgaatatgtgttaatgttatgaacaaagaagaaaaaagtaacagctagctctctatgcgcgcgttgcgtggggtgacctgtagaaatgctcatgattgatcacacagtacagacaccacgtgcacaccccgtcggcaaaataaactaacaatttctccttagaacggagtacgtggcccaatagacacagcgttttcaataccataacacaatttgccatggtacgggggaaaagcctcggttaaaaccaaaccatggagaagagaagcattcacaaaagaaacagacctcttccaagcttttcttttcttttcctttccttttcgaataacgaaccttctatgcacgcgtttaaagaggccttcgcacgtgctcactatgttatagtcagttatgtgcacgtgtcagcccagcccccaaggtttactccaggtgttatgttaatatctctagctactcatcccctccttgcctgggcctgtcctttctccattttttttatttatttattattttctctacttttcatttcacttcacttcctcagtcaaaataacaaaaacaaaattcaaaacgagtcgttcctaccttccaacccgaatttcacgtcacgatt

SEQ ID NO: 188879 - DNA, 3726 bp, Cannabis indica
taaggatttggagaagcaagcttgaaagatggtgataatcgatcttagtgttggattattggatcgacagtttatatgttatgtggttatgtaaaagtctgcggtttgtatattggtgttaagaagcagactccagtggagacttaccagagggatgatgacagattacgtccccggaagatctcctctgtttttcccttttcaaatctttttactctttttcttgtattatacacagtgagaggttttacagaaccagcttgtagcttttgggctgtaggtagttatggagctcagctggtttttgcttattctttcacttttattattatgattatgattgtgtatatcataatgtttgcaagtacataattttataaagataaattgcattctgtctttattaatcctaatctctctaaacaaacactctgttatatatactctgtttctcagttcttatttataaccaaacttctgtttttttggcacctgaagagtgaagaccgtcgagtaattcatggattgttgtctgtttctatttcattatttttaattttaactttcgttttcgtctgttgtggtacgtggtaataagtgaaaagtaatattggataattaatattatagaaaaatacagaagtgagaaccaatcaatgaataaaaatctaataacaagttttatttaaaccctcttctattaagcacgtactagtactaaagaagaagaaaagagccaatgggagtatccaaatccaatgcatcaggggaaaaaaattgttcaaatatgcaatcaattcaatgcccgacaattgttctgtttactcaaaataaccgacaattaaaaactaataagaggaaagtgccaacttttttaatgaagatttttttttattgttgcattgtcaataattcataaatagtactattaaagttaatgtgaattattcaataaactatatatgtaagtgtaacttgtttaggatttgattttgagaggacccctacgagttttttttggtcatgtttttaatatatttatttttatataataagtggtatatatatgtaaatgtttgccaatgaggggatttgatggtggtggccacttttgattggtgagatagtgagtgtactagaggagtaaggttcacgctcggaaccaatcacaagaagaaacatcatgtcggccgacttattgatagattttttagaaggtttaacaaaatacatatatatatgtttatatatatatttatatatatgagctattcagagatatttcaatggtgactccataataataaatatgatggttgtctaatcttcaaggaaatggagagagttgaaatggagtacttttcatggtcaactttgccaatgatctttactggttttagatgaagatgggcatatcaatgatatttatccacgtgactaagtactttattttaggccatttttttttaattctaaatataatcttgtgctaataaaataatgtacacatctcttcaaacggatatactatggtaatgatcatcatcacctacttaatttcataaatatctttgcacactttcatatttaaactgttttagcgattttttaaggaggattattaacttgtggaaatttacatcctatctccaaagttcataatttaattaattggactatataaatttcattataggactccgcatgcaattaatatattatctactatatataattatgttgtagaataaagggtattaatataaatgatattagctaaagtcatacagctttaaataaaattgtcaaattgggtaattgatattatggagctagggtatggaatggatgacaatatgtaataatgtcaactcttgttagaatgatatatagtgaagaaaatattgaacatgttgggaaatttgcagacaaaattagttttagctgatgaatgaatggttgtgcatcacaaattgcggtttatcttcaaatagaataaaataaatagaaaaagctctttgctaccaatccttttatagtatattgcttcgggtgcttttatataatattattatcattattatttcctattcaatgcaaacttcattacaaataagaattataatgttaattcataaaggcattttttctagcttatatattttcaatcacatgtgcagggtcactatctctacagaagtcattgttaataagtgtaacatttacccttattaataatctcgcttatatatatatgttaatataatagagatgaaaggggaaaaaaaggtttcgatggatatgtgggcatatatatatatgggcatttactgtagatgatataaaatgggtaataataatttggacaaacacattgaatggtagaggggctcaactcgtctactgaagctgatgaataatgagtatgtagggtatgtgtctttttgtagtttattgaagcttttggggtttaattttcgatgatggggtatatccttagtttgatccgtatgcaatgcatggtcttcttttgttttctacatctccatattatatcatctatcgctacccaacacatgtgctgggtttcatatcaaaatgtatataccttttgatgataatgaatacatcatcatatataacactatatgttgttatttatttaaattcattaatatatataaatatagtatttacttatatatatacttattataagtaaaggtaatgtttaattatttttccactttttaaataaaaaataatagaatttacacgtgacttcatcagttagttcaaacataaattaaagaccgttaattagccatatgctataataattaataaagctctccaattatgatcttctgctaaatgctatacaaatatatatcttcagttatttgagtttgaggatttaatgtgtggtattttataataattatatatactgaattaaaatatataaaattcgatcaatactaaattatataagtaataatatgcaccaaaatactgtagtttattagtgacatacattctaatatttttcaagcaattaactaataattattatgggagctaggtaccacttaaaaaaatactgcagtatacatcattgagtgtatcattatggtacatatatttcatatgcacatattacgtactactcttaaataaatgactgctacatgattaaatcaatctaaaatagcattaattattattacttacttatttacatctcgtagatatatatagagacatgcaaccaacttgggtggttgattggatatatatggcagctgattctgaactatatatatatatatagatggattgcatggtatatattaatgcatgatcgatcagagcaggtataccgtgatatatataaataagtaataagttagatatacatatataccgtcctaaaattaaacaataattaattgatatgttaggcatattaatattgtatgtacatattaattaatttatgtacatatatatataaatattgtattactatatagtaatgcatgtacgtctgaatctataaataagagatcctatttgaccatttatatgtataatagtgtaaaatatataccattggaacatgaaatccagatcgatcattttaatacctattttaattaataatgttaaaattatgtacattaatctagtatatggtagagttagttgtgcgaatttccaccc

SEQ ID NO: 188880 - DNA, 2922 bp, Cannabis indica
  modified_base (118)..(118): a, c, t, g, unknown or other
tctctatctctatatctcttcttctctctcaatttttctttctcgcccatctctcttactttcccttttctcttttccttgtgttctctctctttctctctctatctctgtagtttcngggtctaaggcttctggggatcttctatttcaactcaacacgatgttgaaagaggaagatgaaaggggttgctgtcatggagactcctatgtaccctgtctatgaggatgctcggactaggtttaagcatcaaagtcttatgcaagactatcaagagttagagaaggtaattttctttgatgggttgcctttgtttttcattagatctgattttggttcagtagttagatctgttgttaggtttttggattttattggtggttttatgtaatttttagttttctaattattgggttttattggtttttttgttagattatagattttcattggtgggtttgataattccttgctcagtagttatggggttttgttcttcccttgtggttgttgtgacagaggggaattgatcattgtgatccaatacttgagttgtttatcagagattttggccctaacttttctaaaccttgtaatttctatttatcttggtttggttttcctttgttttctgtatataaatttcatgtaggtaaggaatcctatatcattgttaggctcatctaaattggaattgctttcaatctcggttttcaatcattttttccatctaatcactgggaaagttttctttgatgactatggtagtgttttggtttcccctattgttgatgtatgagtttatgagatattgagaattgagatgtttttttttatttttcatgttaatcaacccttttatgaaagtttagaagctattgatattctctatccattttctgaaagttttatgtatcttttgtttatgttttctcaactagtttctttcatgtacttctgtttagttttgttaattctgaatagactatagttatttgtttatccatgaaactcttctatgttcttaaagctagtcatggatataaggtgtagatcaaagtgagttcatgtgttttttcttttcttttttcaggaaacggagctcaataagaagagattgcaggctatgcaagagagaaagttgacccttttggctgaagtcaggtatggttcttcaaacctaggtttggcttttatttgcaattaagtttccatataaatgggaattgaggttggacttgcaccgggttgcagatttttgaggcgaagatacaagtacttgaatgagaagcagcctatgaacagccacctaattcaaagggatcaaccccaattacaacatcatgaaatccgagctaccaatgtggtgatgaaggggaaaaagcatagcaaaaaggaatcatctttccgataccctgcaataccgctggacctgaaccaaaaggaaatgagttacaatggaattgaatccccgttgccaaagtctgctccagttttggacttgaatcagaaggtgaagaaccacagtggaaaagaggcggctagtgtgccgaatttcagaccaacttttgacttgaatcagcaagaaagaattcacagtggaaaagaagcttcgaagaggaagaacaccccaatcttcgacttaaaccaagtttcggtaagctattagggaacagtctttcgtttgagatttagactcctacatattgctgtgttggttagagctaatgcgttgtcaatttgacttgaatttttttcccaaagggcgaggaggaagaatttcagtttcaggtgaatgttgagccgtttagaagagaagagccaaagaaaggtctgcttaaaattgctaatgatgaacagcacaacgatatgaagttactagtctgtaggaacatcggcaatggacctaaccgagctggaaagaggaagatcacttggcaagatcaggtggctttaagggtttgattttgtttcatcaaaatataatagtttggtggggttggaaagtttttgccttgccttatagctctattctatgcttaactatcattcttactttttctttacttatctctagttctcctctttttgtaaagtttgaaaaatagttacatatagtggttgtgtatagatgaagtggtggaattgatgctaaggaatcaagattaagtatttctcttactttcttttttccttttcatttggggttaggggggaaaacatgtagttattgtggttttttgaaacttggttttgctgaaattatctaaagaaagggattttggaatcttttctatccttgcacattggaattggtttgtgatatatgccaaaatttgcttgatttcttctttgggttcttaaatgattctcttgctagtcactcagtcagccgccttggttgatttataaaatagtgaataggatagaatagtcgtcttctcatattctttgctctttcttgctagtcattcaagtctatgtcaagattgacaattcataagtcatgataaacgttttgtggtattattattatttttcttagtttttgttgacacttgataagacaaagcagaaaagttacttttggggaatccactcaattttcttgcaccactactaacattcaaataaaaacttttctagtaggatcaatggcttatttccccatgtttagatcactttctaatattcattgtaatttgatcaatttagctttgtatctttgatttttttagtgggtattcaaaaaatatctaattcaatttacaagatgcggatatttttgtacttatattaattggatgttgatttactgattcaatgtaacttacacctatttatatatatttaaaaagttataaatatataattatattttaaaggaaaaataataatctaaaaaactaatatatttttttttt

SEQ ID NO: 188881 - DNA, 1510 bp, Cannabis indica
acactgcagtatgcatgaataaatgtagtgtaaataaatacatcaggctgactaccagccaaaatcatctggtcaaaaaccttaagagcatgttcaaagtcgccttctttcaacaattcttttataagaactgtatatgtaaggacagtaggcttcacatccctagacaacatggtctccgccagcaatgatgcttcccgcagctttttctctttgcacagaccatcaatcagaacattataggtataggagtttggcaaacagtcatcaccaagcattccgttaaacaaagattgtgcctcattgatttttccaaccttacaatacccatcaataagagcagtatatatgactttatttgcctttattcctttctccttaagagaatcaaagagggcatgggcttctttcaaatttccccccttgcagagggtatctatgaaaatactataagtccactgatcaggaaccaaaccactttcattcatcaaattcagcaacctatatgcactatctaaatgaccaaccttgcactgcccatgaattaaggaattatatgtgattacgctaggagacagcttccggctaagcatctgacttagtaatgacattgccttgtgcacatctttccttttacaaaacccacaaatcaattcattgaatgttcgagcatttggacaagtattgtttgattccatcaaacccaagatttcaagtgcggcatctaacattccttccttgcagtatccatcaatcaaagcattgtaagttaccacagtaggaactaaccgtttttccaacatcccattcaacatatttcgggcttcatcaagcttactttcctcacacaaaccaccaataagaacagtgtaagtgtgaacatttggctgacaacccttctctaccatcttcttaaataaattgtatgcttcaattctcctacccgatccaaacaatgcatgtataaggactgtataggtacgcactgttggaaagcaattatcctcccccatttgaaagaacaagttgaaagcatcattgattcggccagcttcacaaaggccatgtataagattcgtatatgaaacctcattccttcgacaaccctttctcggcattatctcaaacaccttacgagcagtatctacatccttgttcctacaatgtcccagtatcaaagaagtataagtaaacgtatccagactcaaaccagcttggactatcttagctacgtacaactttgcctcagcaacattccccaatttacaataagcatttaccattgtatttaacgtatatatattaggcacaaccatgttatccaacatctccaaaaaaacacttttcaactcatcagtcatgagaaatttagccagcgacatcaacaacatattgtagcacctcaaagtgagcttaaactcaaggttagcatcacgattcatccgccgcaacaactccaacacaaatctcgcatcttcaatcgaaacacaagctttgaccatggaaatcc

SEQ ID NO: 188882 - DNA, 1060 bp, Cannabis indica
gatactcattagagtttagtttagctctgaaatattatatctttttgttaaaagtttgtattgaaggaaactcagaaaataaaatggtcaggtattacaataaactccctcgtactttcagtccaccccttattttgactaatgtaatctaccccaatttcaagagaaacaagccgagaaagtacctccataacatttttagccaagtgagcaaaattaatattccagctactactcgactcagggagccctcctgttggctgtttttatgtctagcatatgcgaatctagttggagggctattgtagccaatattaacaattttatcttctttctattaatgactttttttttgtattttcattttattagacattttctcctcttgttttttgttatcactttggtaaatatggaaagctcggaaatagatcaacttgtacgcacactggaggattggtctcaagaaacgtattctaatgctggggtcttacccatttgtgtttatctttttccagcttgatgctatcattgaagctgaaaaacaagcagcgagagatttgattcgtgaaaacaaaaaggatagagctttgttagctttgaaaaagaagaaggcacaagaagaattattgaagaaagttgatgtctgggtcattaatgttgagcaacaagtaagcgagaacttaagccacaattttttacttctttctcattattatgattattattctgtttttttttctcagtagttgtttgtaaggatcaaattgttggtctgttaagtcatgatgatttttggcttttaatagttttttttgggcatgtgtttttgtttagttggcagatatcgaattgactagcaagcagaacgctgtgtttgagagtttgaagtctggtagtgaggcaatgaaagctctacagaatgaagtcaaccttgatgatgttcaaaaactaatggatgatactgctgaagccaaagcttatcaagatgtgagtttgattttctctcttctttacgtttagcttggctcttctgtataggatccttctctctctctct

SEQ ID NO: 188883 - DNA, 2900 bp, Cannabis indica
ttctttctttctttttatttatatatcatttaaatcaatatgtttttatgttttttttcattccttaaattatgtgtttggatacctagaaaactctcaacaacatggctttaagtgttttcataacacttgattgattcaataaagaatgggtatgattatgtcaagtttttgcagaaagaaagttgtaacatttgcttaaaaaaagtatatattgaatgtatcgaactgggttctttcattgacagttaaagggaaatcaaattatactgttgctggaaatttgcttgattttgaagagaaatgttgagaaaatgcaataatttggtgatgacaatgacaaatttttttcatggctattggagctgacggcataaagctctctgttaaaatttttatttgaatatttatgcattgcaagtcaaaacccttttaagtgattatatcattagtaatttttcaaatgtttttgagatttaggatgattcttgactctaatctttgtaccctactgaccatacttatcaactattgcaggaaagcccttctcgatgggaacctaatgtaagtaatatgatgcttttattcattctttatacatgaaaacttctgttattaacttctttttggaattttatgtactttgtgatgaaaaaattgtgccaatgcaagattaaacttttacttgtaatattttgtgttgcattcatgggcattaataaactgttatggctagaattccttgttataagtaagttttgatggttacggatcattctttgataagctatatcattcatcagattgagattctttatgttgtgacctattccttgattttccattcatttttaattatgatatttacacatgtccttatggatctcgtgccacaatattgtttcattgatgtaggcaaacaaaaatccacaatattggggcaacgcttgtgggtgttgataaagttggcaacaagtattatcagcaacttgacacacaatatggttagtatttgcgctctctctttttgtcttgacacactacaatggattttgtctttggataattctcactattgtgctgattccttcaaagtttccatttcttttgtttcctacatttttggtgcaaatgtagcatctgattgaccttttttctgttgtttttttacaggaaggcacaggtgggtggaatacgcagagaagggtcgctacaatgcttctcaagtcccaccagaatggcatggttggttacactacataactgaccatactggtgatgaggcaagtactgctaaccttttctattcattatatgtactcttaacatgaaacatatgagtaacagaggaacggtataacgtctgcagcttctgatgttaaaaccaaaaagatatggaattgagcacaaggaaaatttctctggagaaggtgatgaatatatctaccattcgaaaggacacgccctcaatccaggacagaggaactggacaaggtaccagccttggcaaccaaccaagtaaattttcatggaattgttccccgagaggttcgagaaaaaattgttttactctgctactcttccagcttttaataaatggtctctcccttgagttggtgaatgaaacttgtgttttatgttgtcacaaatgcatctttattcactcttttgcattgggaactttctgattctgcatttgaaccttatttgctttcagaggggaaaagccaactatatgattcttttttcactgaattttagttgataaataccttccccatgtgtattctgttcttcaaaattttagaagtgtgcattgtggtagatggatgatgttttattataaataattgtgttgtgaactaacaaataatattaggcaaaatatgatttgagtattgaagggtgtttgaactgatttattcatgcaagcttcttcataaacaattttaagcatggcgaaataatatagcatgaacggaccaagaaaactatactacactacattctctttttggttctttgtttggttcccctaactaccatgacgttagtgaaggataatcttacaacagaacatcgttagtcattttatattctatatagggatgctcaattttcacttcagtacaacaacatggagtagctagcatattctatctctcacttgtactctttatagatatgtacctttgacatgaaacatatgagcacagggaaacgatttaatgttaagacggaaaatatacataaatatatgagaaatgttgaaaggcaccagtagtgtctagcacaacctaaaggtgtaattcgttattggtataattatgtatcggatttcatataatttaatttaataactattatgaaatatcactatatttatacaaggcgtaacctctaagtggtgcttttggcaattgaccaataaactttcttagaatttttccccaagagctttgagaaaagaagaaaaaggtttctctatttttgcacttaacttttgatgataaataccttccttccttcctcatctgtgctctatttattaaattgtacaattatgcattgtgattgattgattgtatagtgaactaactaattatattaaaaaagtttgatttgagttccacccaaattgaaaaggagatcattatgtggatgagttgcagggtgtttggacttattattcactgaaggatttgcataaacaaattgaagcagggagtaatttagcatttaaaacaccttgtacactacagtctacactacattctcttttgaattaataactctttattatcataaatatgtggttataaataagtttacttcaattgacattttatatcttaaaatcattttttctttatctaactttctcaaaactgtaagtcatt

SEQ ID NO: 188884 - DNA, 2121 bp, Cannabis indica
tcctctgtttggaattgtttcacaataccagtgtggatcaataggaataattcaatagccaaagaagaaattggggatgatattttcctgtcctgtagttcttctgttattcctggagcttattatcataggaccacgatttaactcctttcatatgattttcaattccgcagggctagtaagatgtggttagattaatctttcttgtttttatattgtcacatctttgtttgcatataatcactcacatcattgtttgcatataaagtccagtgtcataagcagtattaaatatcttttgggtactagttatgtattctcctattttcactccttcctcttcattcttctaccttcacttaaaacaagaatttataggtgacgagcacatttgtgcaaagatttattggttttctttataatatttttgaatcttgaaatcggaattttataaaaaacgatggtcctatgaaaatgtgatttttttagacgcaaaaaataatgctaaaaggatggtctcataattaattatagggagcaaaataatgatttgcatactatcaaaactcaactttaaaagtgaaaattatccattcatattcaattttttttaaaatgtggcatttttggagatctgtatggaaagaacgcgttgttgcatccatttgaacattcacaatcaacttttgatagataaagctatagtaaaatgtcaatttgcacctttataacccatagtctaataaaaagttttgatgaaactcccaagaagatcatcattgagcatcatttttgcctcttaaagcgaagttctaatggaaccatcatgccagatcattgtgcatcgttacaacattgttattggtctcctagaatcaaattttgatggaaacatcttagggttgcatatatccattagggctggcaatataggtcaaggcatgatgacacaacgcaaaaatgacacaaaataaataggtttggataccatgtttagtaatcgtatcgtttcgtgtcgtatcatagtcgtgtcagcaaatttaataattatattgacatgataacaaagaaataatttccataggattcataatttcgtgtttatctttataatcatttcataatcgtcttatcgtatagtgtgacctcttaattaatcgtggcatgtttgtattttaatttttgacgcgtttaataaacgttgtgtattgtgtcataaacgtattaacataaatacgacatcataatatgaattgtcagccttaacatccataggttttgttatcttactctttctcaaaataaataaataaataaataacttgtttttgcttctaaagtcaagtttttttttcgatgtattcaaaatgaacttttgatagatagaaccatcgtaatgtatcattctgcattgtgttatagcatagcctttttaccttctaaatcacgtttcaatggaactatcgcaagaatattgttgtccattgttttcggcccttaaatctagttttggtgaagcatcatgacactatctttatgcatcattatctgaaattgagttttgatggaaacaccatactattattgtgcatcatcatagcataatttttttccactataataaagttttgatggaatcatcgtgacaagaatcatagggtttcatctcaaaatcaattggtaataagtagagtagtccatattcttatatatggctaaatatttttacatttaatctatgtgaggcaatgctatccaataacccccttaagatggtggctatttttcttgctcaccaatcttgaatcaccttatcacaagtggtgccatttgcttgtttattattatttttttttttcagatctcaagtgtctttgcactatcttaatctcgtgtggctaggagtaccatttgcttgcctatttttgtttgtggctaggaatgccatttaatcgcttatttttgtttagatctcaagtgtctttgtgctatctgaatctcatgtgactgactgtattacttggataggtgtggatcaaaagcccgctagcgatgtcgctctgataccatgacaagaatcatggggttccatctcaaaatcaattgggaatgagccatgtt

SEQ ID NO: 188885 - DNA, 2594 bp, Cannabis indica
atacaacatataaagaaaagaaatgcatgcatccgaatatttgtataatcaaccaaaaacaaaaagaacatataaagattcaataataaaacttttttttcgtaaaaaaataaataaataaagatgcaggaataatgataggattttaatacttgaataaatgacttataattaaatctgttaaaaaaattctaagatattccacaaaagaaaaaggcttaccaaaattcactaacgaacctttgcgatcttactctccaatagttaattctcgcttaattttaaatattactggtgaattaagattaagatgagtacattacaaagtttaccttatatatatatggcataagcctagtgtttttcaaagtctagttatattagaattatgaaaccgccatttcataaaaaaaaaattatgaaacccaaaaaaaaaatataactttaaaagataagatttttatcgtaacatctaattttgattctatatttaagataattatggttaaaaaatatataataatattttgtatattaaaatgaaaaagaaaaatgaatttatttcctccttaagtattaatctgatttttcaatgaaatatagttcatttttttaaaaaaataattccctttttactaatttcattttctctttaacatgtacttcttttcgtataaatttatttttaaaacacatttatttagttgaaaaaaaaaattggccaacaggcttggcgaaacagcttgttgaagaagcttgttatttccacgtgtcagatatttgaagctccaaatattcagagctaaacaattattttgcattttaacaacagtcaacagcttgttcaacaagctaaagcttcttcttcttcttcttcttcttcctcttataaaccctaaactatcagtagtactacagctactacttccctcttacattatctctctctacatataaatatatattatatataacagtgacagattaataagtagtattgttataacagaagattcgccatgaaaagaacaagaaaatcaccacctttcagcattgataaaagtaaaaatatcaactttagccccaaccataagattaaaactttctccataaaccaccttccaaaccccatactcacacaaattttcataaccctccctgtaaaatacatcgttttctgcaaatccgtatgcaaaaaatggaacattctcatttcaactcctcacttcactaagtcccatttcgcccaagcaaagccccaatttctgctccgaactctggactcaacccgaacctcaagaactctgttcttaatcgatatcgatgaaaataacagtaatggttgttcttattccccaaattccaaattgaaaatcccaatacgcaatgcccaaattctccttcgtaacaaaaataatcgccgccttgaattgaagcccaaatatcacaattacaaaatcgtcaactcatgtaaaggcttgctttgcttatcagaacactctcacaacgatcctgttgcggtggccaatcccgtcacaggtgagtttataaagcttccccaaacttgtaatgagttaaaggaaagatctttcgttgattgtggattagggtttagtccaaagagtaagaaattcaaggtggtcagagttttaacaactaaaaaagcagtaattgcagaggtacacactcttggtacaaaatcatggcgtaatgtgagtgattataataatgttccttactcatttaagaagaagctagcttttcctacctatttgaatggagctctctatgctttttgtatgaacaatatggaatcagattgtattgtttctttcatttttgacagtgagaggtttgagcctgttcctctgcctcctcaatgggaatctaaaaggaggaatgtgatgagtttgggagttttgggagatgagctttgcttgtgtgatacttcttgtgttgaaaccactaagatttgggtaatgaaagatgatttatttggtatgaacaaatcttgggttcagttgtttaataatattggtactattgattggccttgttgtggtttgttatgtcaacctttgaatctctttcaaaatggagctcttttgatgttttgtaactctatgcaagggtggttttactatgaccaaaaaaacattaaagacatgtatgttgggattcatggccttaaatcaagatatgaggctatagtttatactccaagctttatttcccttaaaaatattgtggttggaggaagtgttgagatacttaatgtcaattcaaggtaagtaattatttgcatgttatattgttcactttgatttatctcactattgcattattgattgtttcatagaagttgctgattataagttaccatgttgaattgctccatttttggttttatctttttgctcacaactttgctacattttctttttcttcttcatcatgtgttaatactagaaatagatatcgatcactaaatgcatgttatatttaaaaatagaaacaaaaatgttatttatttttttgaaatggcaaaaatgttattccaatggatcaataattctttattcttttaacatgtt

SEQ ID NO: 188886 - DNA, 4451 bp, Cannabis indica
tctctctctctctctttgttttgaatgtataatatttaaaaatgcatttatattccattacaggggcatttacccaatcttctaggaaactcaagaggtgattttgatgtatctgctaacttccacagatcaatgggtttcggtggcccatttataaatgctcaaacaaggtattaattaatatattttcttagattagaagctttactttcgtgtgtgatatctttagagtaattatagggcatgtttttggtttcctagataaactttgttcagtctgccttatttgtgtgataatcattcagttttactttgtgtttctatttgtaaggagatattgccgaaaattactgctgttatctcataatagatttgcctaactttgatcacatatatgttcattaattatttgcttggcttaactacgacagtcaagatatgctccagcttcttcccaaggttgaccaatcaaaggaaaatgttgctgtatcaggttttggctccactggttatagtccttcatatgagttatctaagactggaaatgctcaaggatatattgctcaaacttacaaccagtcttctggttctcaaggtttttctttgaggttgtctcctcctcaacgggtagctaatccaaatggtctgttctgtcagggatcttcacaaaatttaagtaatctcaatgttaggcatggacatgatgatccaggagagaaaaatcagacccagttgaattctccatcatcatttcagtcaccacccgcttcaaatgagttttctccaagagacagatgggatgataaatttaacattgcagagcgcatggacatggcctcatctctgtatttacatcaaagttctgttgcagcaatgccttccattcctcctatttcaagaaatcagcttcaaatgcaattcatgtccaatggacctacattttacccatctcaggcaacattgcatgatacagcacatccaccttttaaccttgcctcatctcaagatacttctcaacatacacacactaagacttccggtcaacaatttcaaggtttggaggctgtcgcagcgccacagtttcctgttgtatccaacattcctcaacagggtgggttttcagggatgccacagagtttgctgacaaatacacatcagcatctctctgctatgaaatcttacaaggttccttccagcaatagtacggaaaccactttattgactcaacaggagccaaataatcaacattctcagaaagctgaatatgacccatcaagattaagcacatcttccataaattctcaaggctctgtctttgatgaagatcagtcaattgaagacgggtcccagaagcttaaatcacctagggtgcttaaagctttacaggcaggtgctaagagtgtctcagacaaaattaactcacaccagcaagatctggacagattacatcagactcatagccattcactgactacctcagaaagaagtcacgagtccctcggcgatgcatcaaaaccatcacatggtttccgtcaaaactactccttgctacaccaagtgcaagcaatgaagaatgtagaaactggccaaagtagaacagttctaaatgctcaacggctaactgctataccagaacgtcagtcagcatatgatcatcatgcaacatataattcaatggattctgcattacatattaattcatcatgtggagacaccaaaatggctatccaagatataccttctcaaggaatggtttcatctcgtcagaatgattttcatagtcaacctaatgtccccattgtgatatctaataatgcagaaaactctttagctaatctaaacacagcgccatcttggtttaagcagtatgagacttcaagaaatgggcagatgccaccaatatttgaagcaaagcttgcagatactgcaggcgtgcagttctcacttgtaaaaccttctcagacctttgataatcattcttctgtgggaaggccaaatgttttagatgctactcagagtggagtttggcctagtacaacgacagctgatgttgcaagtaaagctttttcagcttcaaatatggcatcttcagctgtcactgaccaaactgtggctaccgaaagaccaaacaaacgcaaaactatggcctctgggcgtttaccatggcacaaagaagtgacacaaggttccaagaggtctcaggatattaggtaccttgtttcccatttactaagtcatgtttaagtcgtggttatgtactcgtaaatattgtcttatccctgttgttgtgctgcatattatatgtttctacatttgttctttttctgctaatttgtttgtatgtttccctccacttagtattgcggaacaagagtgggcacgagcctcaaatcgactgattgaaaaggtgttttttcttttatttgagtcattatatgttcctttttaagccctatagattgagatctaaaggtcgctgacaccattcactttagcagatggaagaagatgctggagttattggactgccattgcttcgaaaaaagagaaggctcatcttgacaacacagcttatgcagcagctgttttgccctcctccagctcctgttttcactgcaaatgctgcattgcactatgacagtgtgatatactatgttgctagattcttgctgggggatacgtgcagcctggtctgtggcaaaagaaatgatttgggtgaaccaattaatggtaacatgtaagtgctgctcttcatgatttttcacgagtgaggggcattagtttgtagtggataaatcttgattcgaggattttctgaaattaaagtattagttttgtattgtattgttcaggatcatagaggagctaaacaattctgagtgcaccgatgtccaacatttttcaaaagctgtggaagttctgaccagcagatcaaagaaactggaaagcgacttgctaaggtatgaaaatatgaatatgtatatgtatttatatacatgaaattcaatcgtaattttttttttctggaacaagctgttacatggcaactggacaacaatgtgtggagtaaattctttcttaaattccttttggtaatgcagcttagacaaggccacttctattttagagttaagaatggaatgccaagagttggaaaaggtgtctatcgtccatcgctttgccaggttccatacccgaccacctggtgtctctgggaccacagcttcctctgagacgactacattaaacccgtgccctcagagattcatcgttgcagttccaatgcctgagaatgtgccggatggggtacaatgtctttcactgtgattatcaattaattgatccccttcccaagtgaatcctcttttcctttttgttgatgtacatggtggcaaccaagaaagaagaggattgaaagtgtgactgaggctgctgttcatttctgaacaaggccacttgttgtcatttttgagaaagtacatatttgtttttgtatattttcacggaaccaaggagaataggtagtaccccaagtaagattttcaaatagccaaggggtagttggtagtatggtatgggtgtctctttagactctagtttcctcaagttgctacataaatttagtttatacctaattaaaatggatacatagtagctgtggccattttgttcctctttttttctgggtttacttttcacccccttttcaggttcctttcccatggagccttgtagaactgaggaggtggtgtcttgaagggcaagcagttacacttttggttggaaatatgttaaaaggtacattttagttgtaatattgttgtgctattttttccctttttcttttcttaaatagctagactagttcccccagatactttttttcttaaataaaataaaagggtttcagaagcttttggttaggtctttaatttggttaataaccatataatatcctctctcctctgtcaagttttattgctgagcatgaaatctatggaaaggtcacacagaacagaagcttctaactatatgacaacattaattttaagaaaagaaaaggttttctttattttattcctgagcttttgaaaggtacagtacagggggattattctgtgtccaaactccaaattttgtaaaagaatgcaatagtaaaggacaaggaaaagcctttattatatattagatgacaaaagcatgtaattttattcgtttagaaagacactcaggtcagcagtactttgattatctttctttcccactcgtgccttttaaagtagccatgaaatcgtcacattttgtgattctgttgatagctatcttggtgtccacgctgtcaatatcagtatctgaatctgatccattcatggtttgagaaagtggtaaacagagagagacaaagctgagaaaatctttataattttgaagcagtagagaaagaaacaaaa

SEQ ID NO: 188887 - DNA, 2684 bp, Cannabis indica
tttaataatttgtttaaccttggatgcaaaaggaggcattttgcccctggtagttgtttcataatcagttggagataccttgacttgctttgcttgggtttttcttttatgtatttacttttttttgtcgaaaaacttgagttatcatttgttttgtttgtgtaactaattttgatgacagttcctaattaacaatgctttctaggaagttccaggctcatcaatcataaaagcattatcatctcatgttcggaaatcagtgttttcttctccaccacatccctatttgaaagctggtgctgagcttttggtaagaggattttacgttcttcagttatgttcttcagcctcccccatgttctttttaaagactgcatattttttatcaggtttgtgacattcatattttcttctccaggacattgtccaagctagaccttctaagtttccgatatcttcccaggaattatttaatgtccttgatttagcaagtgagaaaacattcctctctggaccagctgcatctatgcaaagatatgtttttgatggggaggctgggaagataggtcttgaagcaaaaaacctcgtcgcttgtactagctttttgttggaacagaaactggtaacttttttcatcttccaataatcgaccaagttgtttctttactagaaatctagaattctcttcctgttctctttttctgtgctgcataatcctagttagtacagcgagcagtccctatccagtgactcctggctgtgttagagcttgtaaatgagtttctgaaatagtattctgcttttatctctaggattttgattttgttggaggtgatggcttttaagttaaacatgtttctacatgaatttctttaggttaaagcttggcttgctgaaaaggatgctgaagcattaagattccagaaattactagtggaggaagaagaagcagctcagaaaaggtacactaccttttccattatcttagcaaattttgattacaagcttgaattcactgattaatagtctgaagccagcataatttgcagaaaataatagaaagaatgtcctcttgttatgtaacttagccctaacttgtttaattcttgttgtcctgtataactaaaggatttgtagatagaaaagtgacagctgtagtgacttttttcctacatttataagatgcattgtccgaattttaaaaccatgaaattcctttgaaactacttcggacctgtcagcatcagaagctcacctaccttcagttcttccttaattggaattttgacttggactaccacccgaaaagtttatccgaaaatggaagttaaattccctgttatgtgtttcactcttgcagacaagccgagctcttggaaaggaagaagcagaagaagctcaggcagaaagaacaaaaggcaaaggagcgaagacacgaggagaaggcagatagtgatgaaagcattgacctagtgttggaagaaatggccccagtagaagcatccagtcaagcagaatgtgataacagtatagacagcctggacttgccaaatcatattccgctgtctattgttgatcacttcaactctgatggaaatctggattcagactttcagattgattctgattgcggacaagttgattcaggtagtagttctagtgttgaaaagcgaattgcacaaggaagtggtcgttggaaacggtggcaaatgtcgccaaaatcacaatgggttgcatccaatggctctcaatcatcaaagctcggagtccatcataatcgtggaactcataaggattcaagagtgggtgtgtctagtcataaagtatggagccggaaatctaaaccagaaaccaacatagatgctttgaaagccagagtaaaaaaagaggaattgaacgatcttgatcaaattaataaccgtgaggttttgatagggtccatttctgttacacttggaaattgcagtgaggagggaaataatctctccgaaccatgtgatacatgcctaacagaacatcaattgccgaagaacagtgttcaggctaaacccaacaaatccaacccagttcggagtggcacaagcaggtcaacagttaagcattggagaccagtgagccggaatggaaccaaagtcccaaatggagaaaagggtcatacggaatccttattaaatggaaactcagaattttctagccatgctgcacaagtttttcttgcccagagtaagtttagtttctctattctttagtttcgtcctccaaaatacaagttttaatgatccttttattgatgcttttacaggatggaaggaggccattgctgcagaccatgtcaaacttgttataacctcagattcttttcctttagatgaaaatgatacacatgaaacagcatctcaaacattgaaattgcgtagacgttgcattcttggcgatgcagaaaaccggctagttaatgttgacattgttggatcttcaactactggcaaaggcaacaagataaaggagatttcaaaacagagaagcaatccaacctaggaaggaattattattttttaatgggttattatttttttaatctttatacaatttgtgcagagtttttacatgggggttcagcctccaccacaccaccagctgttaattcttagccagaggttccagttttacagatggtcttctgt

SEQ ID NO: 188888 - DNA, 1687 bp, Cannabis indica
cgattagtactcctctccgccctcatcgtgtgtactcacactgtgagttaggtagtgatgtcttcgtctgcattgctctaggaaaggggggggggggcgaggcgcagtgccctatatcatgagactctttgtgtgaaatcccttcataggatcacgttacgtttccatcattgcaatcttactatggtgagtagactcatgttgccttgattaacttatagtgccattttctttcaatggtccctttctacactcatcgtctggggtgcaatatattgatgacacagagtcccctccacaagtatatgcacttgggatcctgtgctcttgttggtggtttttatgctgaagttcaaggcttggggtttatgattgagtatgccactcaatacattttgcatgccatccaccccagttgttgacgtttgattcttctagtaaagatcgtttatttcatcttcatagtggcatgtttgggatgttgagctcacagagttggcttgttttgtttccaaggcaatgtcgcaaggtactgcaatctcacaaagttggtagtcgagggcaccttactggtgatacttttagcctttgtagactattctcaccaataggtgtgatggatgcagttaatccatattggtgcatgttttctggtttctcttcatgatggtcaccatctcctcttgtttgaggcacttggcgattctggccaacttcttcaaccatgggtgttggtgtctctcttttagaggtgattagctgagtcttatctacatgaatctcgacacccagaagacgatcagagcatctaagcatcttatagcagtggaaagtaaggaaatgatatgaattgagtttttcattcccatggagggcagcaaactgttgacagtgaaaactcgttaactaacatgagaccaaaaaatagaaactcaaacacaagacttaaaacaaagacaaatatatgacctggggtacatcagtggtcccaatggacatggcgacatccatgacctgcaagttgcattttgcaggtggtggtctcacaccttacctttgtcgagtgttggatggtccttagttgcaggagtagtggttgttatgcactcttggtcagaatgtcagtacttgtaggagtggtgtctccactattcatacatctctggcatcataaattgctggaggtgtggttgtacttcctttgcatacacaccacgtcctttgtatgcatgtcttgtccttgcaatcgtacctacgttgtattcttattgaacacttaggaaaacttcactaagcatttttatgtcattgagcagagcattgccaatttacaagcatgcaagttttggcttagtgacttgcatgcaagtctttcttgagaaacttgcatgttgcatggccaacggatatgcaagttcatcacatggccgagtgacttacacatccatagccgagtgactttcatgtggcatggccaagagatgtgcaagtttgtaacatggacgagttactttcatattgcatggccaagggatgtggaagtttgtcacatggccgagtgacttgcacatccgtggctgggtgacttgcacatcaatggcttagtgaattttatgttacatggtcgagggatgtgcaagtttgtcacatggtcgagtgactttcacacccatggccaagtgacttt

SEQ ID NO: 188889 - DNA, 2064 bp, Cannabis indica
atatatatatttcctccttgcacctgcacatgtcaaaataaaattcaccacaaaactaatgaaagatatttgtacttaataaattacataacaaaacaaactaagaattgtatgacttattccgaggtgttctttataacatccagaataagatttttaaataccataatttttatgcatttgcttacttggataaacattattttcattactatgcttacttaaatacaatgaaactgaaagaagattatatatcagcttaatgcaattacttacttgtacaccagaggttatagcagtactacataagggggattcttcaggaaactgactgatactattactaccgggttttttcccttcacgaagtttgatgattcctttttccaaccgactagcatgctcctctaaccacagcaacatggcatcctgttgttggttagcattaacatcatgcactgatctgatcgattcctttggaacacaaggaagcatttctccagaagctgacagattcttggtgccaacaaagagttgaccgctgctacagtttagcaaaaataacttgggaattaatgtggaggaagcagccacaataatataatttgattttccagagaaaccaggataagatctgttatcaattgtttgcgcaacaatttgatgtaaaggcagcaagtacacatttacagagcggttatagaaagtataaccacctatcaggcccaatggactaccatacagatcatttgcatagtcttcatctttaaattcctggccatcgtaaaaacgatagaggatcctcgtaggaagaggtaatttcaccttcaagattctttcaaactcttgaatctcagattctgatgccccctttctaagagtagcctcagcctctggaaaattaagtgtcaaccaatttctaagccttccccaacatttatgtacccgccttacaagtgaccaaggatacatactaaacgattctcgccataactgataagatacctgggtgagacagaaccagagaaaaaaatttaaatgtcaaaggatactctttcatactaaaactactgaagcaggtaagcaaaaatcttataaacgaagtataggggttaaaatattaaaccaaaatgtgtcattaacctagactagtactcaactccctcaacaagtaaagtcccacaaaatagtatacttgtaaaaccaaagtcgatataaaatgaaatcaatagtccctccagtagtgtcttaagtcagtttgtcaatgttctttccaaaaacatatcccggtaaagaaaaagagattaggcaaccaatacaacaatgtaaggaggaattattgaagttgacgaaaagtcccttctcaactaaatatgtagcttcagcagttacgtccccaaaagaacccaagatagaattcaacagctttaccatcaattgggaacacaataaaaccgacccagagtccaaaatcagtaaatcactaacctacagttacccataaaaataggtataacaaaaaacaatccaaaattacacaaactgaacgagtagatacgaaaataaaacatgatttctgacccatttgctgagttttgcacaccttgaaagaagcgactggattgccgagaggatcaaggggttgtgagaggccaagctcttgggcgcagaaatgggaccaaagaatgtcatcggaggtggatgtccgcaatttcttgctgacacaagaagttctagcggtgtcttcagctcctaagttgcttaggattatgttaagctcgagatcacccaacgtgtcgaaccccatgatttctttctccctgattttctggtaagaaatctgctatgctatgtaatcgtcccaaagaaagattattaatgtcctatcctatgtatgactctttctcgtgtgacacttttcatccctggtaaagcatattttccaaactattgacacttttctggtgtagcacagtcggtgttactagacaagggaaatttgatataccttgcttaaatatggtacaagatcttttaatgcaccacctattgaacacattaatc

SEQ ID NO: 188890 - DNA, 854 bp, Cannabis indica
tcccacaaaaaccttttttcaagccaaaaacattaattacgaaaacggtagtttgcgataatcttatcggaaaaagttttaggcaaaaaatgatgcaaaatgatggtttacacttgtccaaatgaagacttattttttaagaacaaaaacattgccgaaacgacaatttgcgatagtcttatagaaacgtcttttaagcaaacaatgaagctaattcaatggttagcgtttggtgctataaaaacttgattttggaggttgaaaatgatgctacatcaatgatgtgtgtttgatgcaatgaaaacttcccatgaaaatttcattttagaggctaaaaatgttatgccaaaaaaaaatgctgacatgaaagttaggttacgctattactatgatatatcatcaataagtttgcatcaaatttattaaaaactttgatgaggcatcacttttcacatcatcgttttggtagttatttttacaaaaataaataaatatccggactacactcattatgtacgctcgaaattttaaaaatctgaaaagaaaaaaaaaaatcaatataaaacataaggaaatattcaaaatttatgagttaagattttcttttggagggatttaggttttggactgaattttcaatcattataacataaattgttgctttagtggctcttagtgtcaatatggtcatagtttttaatcatattaaaaaaaaatcaagaaaccacatctatataatttgttaattaatgggtaaatacaattttggatcttgtgtgttgcaaaagttacttaccaattagattttctattttgttaatgacaaaatacaccctatattttttaaaatggta

SEQ ID NO: 188891 - DNA, 1833 bp, Cannabis indica
caagcaaacacaataaacagttcacagtataaaaaatagacgggctcgctcaagccttgaaataatcacaaacctatataagtaacaaaagcaacgaaaagaaaccagcaaaagtcaattgcaaaacagttgatggcctatccaatgaagttattaattgctgaaatgaaaagaaaccagcaaatagagctgtaatcagataacgaaataattagtgattccaattctcctaaaacaataacgaaatagaaacttattccaatatatttttctgatacctcattaggctgtaatcagatatattcctaaatatcaatgaatgttcatttcatacaataaaggcttgtcgtagacttttttcttgtcacaaaaacaaactaacaattaaaggaactttgaagaaatgcagtaaagagacacaaaattgaacgacaaaattaaaggaattcattaggaaaattaaagaacaaaattaaaggaagcctttcaaagtccaagacagattaaaaaaaattaattagcatatcttcagtttaagcaacttttattctagataattaactctatgacattgcatcccattattcttctgacctttcaacaaaaaaattatacaaaccaagaaacttaagggagaaattagaggaaatcaatttccaaaacgcgaagcaacaccaaaacaaaacaaaaattaacaaacccagaatgaattatacataccaaatgagagagtggagatcgaagagggaattatatataatgaaggggcagtagggttttaattaaccagtcaagttctccggtatattattcacaaaaagaaagacaaaataacacaaaatcaaaatcaagattataaattttacgtgagcccgaggttacctggcgcggtgagccgagaacggcaatgagagagatagggcaggtgcgcgggcgggcgggcacagtttacatttggggtcgatgaggaagagggtatgcgggaaggaggctgtcggggttgggtcgccgggaagagttcgacgagggagagagagagtgagcgtggtgtttggggtttgggtcgcgagcggctgagagaggggtcgaagggtttattttgataatttactttctctttaggtgagacttaagaggtgttattctttttcaatctcggcttaagcttgtcaggtaactaacggactactatttgttttttttttatgtttatatattaaaagtaattatataactgcaatttaaacatttttattttttaaattttaacagaatattctattatttaacagaatatcctaattaaaaaactattaattatatctcattaatttcacccatataaatactcacaagatttattgtaactaatttttcaaaaattatggtaaattgcaattttatattatttttcacttccattgctgcgattgaatgcaaaagaggtaaactaaatgcaaaattattttctgggttgttctatcgttagttttataaaatataaattgaaccctttaaaaccctaactctttcagccatgaactacccaagacaagtactctcccaagccatcgattatttctgcttgaattcgtattttcgatctaacattttttttcattttcacaggaagcttttgaaaagaagatcaagatcaaaatcaacaatacgggttcaattgtaagtgaaagttagtgactgatattggtgccaggtactgatataattttaccactaatctgtcaaaaatcgtaaatttttgggcttttttatttgataaaaaatcttcacctttgattgatcaatggcagcctgctcgatcgaaaatttttg

SEQ ID NO: 188892 - DNA, 2949 bp, Cannabis indica
ttatttctttattttttctattaggcgcgatttttaggaattctcatttatcttttactacttatctctcttttactagtttagttttcttttcggagtttcaacaattagacattgtctttccttttctgtagtttttacaaattaatgcttagttttatgatttgatgagtattttttaattgggattcattctccctaattgttagcctcattacataactatagaaatgatatgtataatgtacaatcaaatattatacacaatgatatgataatctttttaatcaatcacattaaataaatcagtagttttaattatttcactaaaagtaatattatttgggtacatattaattacacataaatataacataaacatataattcaattataagaaaaaagaaagataaattttattagattattacaattggatgtagtaaaaatgatgtgtaataaataatattttttcaacatgaattgacatacaaaccagaacaataatttattggattaacttgtgtgttttgatcattaattatcatcacaagaagttgcaccaaacttaatttgcatgagatatataaagatagaagatgccaaaaatgatgttggggaccccatatatacatacacatatatacatattatatatatatatatatgtttatatgagttagattaatggcagagcatgtaagccacattttacaaaacggttagagaaagcatgcaacacaacacagtcttttatctgaattagccgtaccacgaaacagtggcatccatactacacatacattcatttttgtttttattttaaattattaaacaaaagtgttaaaaatgctattggagtgtctagtaccatttaagatatcatattgtaattatgtgtcatattccatcttattaaaacaaattatttttagtcctaataaaattagtgactaaaagtgaaaaaattgtaactaattataaattattatttttatattgtgtaaaaaatatgtagttacaaatatcagtcataaaaattacaatttattgtgactaaatgtgtttttagtcaaaatacttagttgactaaaatgaaattgatgacaacttatatctaaatactatattagtcataatttagtcacaaaaaatatatattgcgactaaaaaaattgtcaaaaatggtcataatttatatatagctaaccatatacaaagtagtacctagtgctcttatgaaaaatgtttcaataattaagcaaccaaaaatcaattaataagcttatgaaaagccaaagctttcatattcattaaaggggaagaaggaagtttcccattcctaaatgcctaatagcattagcatatttttgctaaacaatattaacccttttcttctaaaaagttaattgttgtggttaggttgattaattaagttgatgattacccaacttaattaacctctttctttcctttattacctaaactttttttctcttttgtgggtcccacacaccatcacaccccaaaaagtctttctttttctttcaccccttaccctcatctatttatctcaccactaaagcctaaacccaaaaaaagtgatagacatgatatgatattctatattactctctttcactcttgagttgttttcaagtaataatggggaattacaagtttaggctatcagatatgatacctaatgcttggttttacaaactcaaagacataaacaacaaacccagaaaccaaaaccaaaagaagaaaccaccaccaccatcaccatcaccaccttcttcttcttcttcttcttcttcttcaacgacaacaaataagttgtcgttttccattaaccaaaaacacaacaacaagaagaagaagaacaaacccaaccaacaacaacaacaataccaatattgcccttcaagaaaatcttactattttacaagagatctcaacaatgaagaagaggagaaatcatcatactcttcctcaccaagaaaaacatccaaacacagaattaacaggagaagaaaacccacaacaacaaaatcatcatcatcaccatcaccatctcctaataacttcaccaattcctcagtttcttcctctggtttgagttgtaaagccaaaatcgaatccgttttcgccaaacccaaacagattgtagatgaccctgaattcagatgtgaccggattctcactacttttgatgaaaacgatgtcgttatagatgtagataagcttctctttgttatttgggtcataataataataataataatgatgaacaccaagtgtttgattcatttcctcaactagaactccctcccattataaccaaatccaagaagaaacaacacaggaatagtaattcttcttattctccaggagttaagcttcgaattcattccccgagaatcgtcgggaaaaggatttcaggcggcggcggcggtggccggaaaagcgtgtcgaatgaagagagaatgaagatgatgatgaagaagaagaaaagaagcctttctgagagttttgccattgttaagtcatcgtttgatcctcaaaaggattttagagaatcaatggtggaaatgattgtggagaataatattagagcttctaaagatttggaagatcttcttgcatgttatttgtctctgaattcagatgaatatcatgatgttattatcaaggtattcaagcaaatctggtttgaactcactgatctttcttcttctttcaaataaatatatatatatatatatatataaatacatatatattatctttaaatattgtatatcatcatcttcttcttcttcttataattattattaatgtagattatcttgctgtttagtttagtttaattacatgatatttttgtattgatcttaaatttggagcaagttgatgatcaatgacatatatataattcatatatat

SEQ ID NO: 188893 - DNA, 2794 bp, Cannabis indica
tatatttgcaggcgctggcctcaatcaacatgaattttatggtgttaagcttgcaacccttggtagcacaactatcaagtttcttaccttattgtggtttgtcatatcttggcttaataaccggatctgatgttgacagaatgattggcattgcctttgaaggtatgcttatatcaattcactatattcttccgtaggctttgctatttattgacattttaaccctttctcgtgtacctttcagatgatgtagatgaatatgtgagttgcttgtcttatgtcaaacatggcgcatccttttcaggttcatttatgcaaaatcatcagttttcattgtactctattgcctattgcttaatgtcttctcctttctcttgttgcttattgaagtgatttggggccatatttctgaagtggttgtgacggctgccaaggaagacttgggcgctcttcatgtggaacttcaagatgaccacatgaaaaggtgggaagctattgggatgttaagacatatacttagttatcttctggtgccatgggagttaaagaaatgtgccatcaacatcttgatttgcattacagatgcaaataactctcagaggtgtgatgaagaacagactgctgactgcacgtcttatatgcccaatctttattctgctctgcaggtttgtatctcctcatcttggctatatccgccaggaatgaatgtacatgtaagttgtttcttatgtttttctcggagcaagacgaaatctcaaattttctccaaaaatatgtttcaggctgttcaacaggttatcatgtttgcgagtgaatcagagctacggaggaatgcctttgatgcattcaagagggtaagtaagaatttcatatttttaatgttgtgatgttgccaatgaccgatatcacaattcttctttttcttaatgcttactgttttgccattcataaccagatactggctgatgttcccacttcacagaggtttgacattttaaaagctttgatcaaaaacagtgactcttcgtcgatggtacacctttcaaaccagtctttgaatttattcattgtaatatgaattttccactttggtaattgattgttcaagttgggtttgaagcttcatttcttaatgtggttctttcaccattctatagattgcgattcttttagacgttgtcagaggggaaatgcagaagaaaaactgtctaagaccaaatgataacgatacgaacagagagaataaagcacaccaactttcccccttttggagtgccagtgttctcgaactggtggagtttgttttgaggcctcccaggggtggacctcctccccttcccgagcatggtgatgcggtatttctcaacctccttcgtataaaagatataatttactctttttcgccattataaactatgtttacatattttgttttgtatacaggttctatccgcgctcaacttttaccgatttgtgttgttaacagagtcagaaggtaaaatgtttgaacaaaccccaccaaacaaaatactcttaattgaaaattgtttgattttgatttgattttgggttatgaacaaaacaggaaaaacaaactatactggaatagtgtctaaaaacaatttagaaaaggcgtacaacgagtggcttcttcctctaagaactctggtgagtggcatagaggcagagaataataagggcgatcgtgttcaaacaacggttgacattctttgttctctaaaccccattgaaatggttttgtaccgttgtatcgagcttgttgaagaaaagcttaagcaatctacttagttattttattacatattcttttccttgcattgcattacaatgaaggacagttggttttaattacattacaaaataatgtgtttgaattttgtgtcaatttctactaattccattgttttatttataatcttcgtttattttatcatttatggcttcatgttattgtgttgttatgtaaaaattaaccagagaatttaaatgttctataaaagaaccaaaataaatgtagagagacaaggaaacataaaataaaattgaataaatagaatttttgctccataaactatgattattgtatttgtagagttttctttcttgaattttatgttagaaaaaatccttttgaactaaacaaattgttctgttcattttttaaaattaatttacttatgtggctatgtgttataattgttctctaagggtctatttaatcactttaagttacttgatttttttttacgtttacttgaaatatattttattagcatcaaatatacaaacagtaattttaagatcccttccattaacgaaaaaaagaaaatttaaatttatgtatatagtaacattgctataagtgttgtctagtattacaactacgatgtgttactttataatagattaataataaatgatgtgagacttgataacaataagtatggcatgtgtttgtttatttaaccaaatattaacaataactataattatacacatatattcttataattattattagattgttagttatatatatatatatatatatattttttgactcttgaactatgttagattaatgttatatttacaaattgtttaaaaaattaagaataatgtaactataggaggatattcgcattgatttttatagtttagaaaaaaaaaattagcaaatagaaaaaaagtttaaagaaacaaaattactaaaaaattacataattcgaattcaggagataaatcctatttattcaatataataaatggaagt

SEQ ID NO: 188894 - DNA, 2120 bp, Cannabis indica
gtaattgggattattgtataagtttatttgaatcataatgatatataaaagaggcattttcccaccaaagatgtttttgtagttactagttacctcatttgtatcttttctatcaacaatgataaatggccctttatcagttatcatgaatctgagcaaaataaaaagttgtatgattttattaacaaacaattggatatttacatcgccatccttatcaaaatgcttataaatattatttacaacaattatagaataaaaatctgagaacaaactccccttctcaaaatatggttgtataaataatcactcggccaggtttctgaaaatggcaagctatattaactgctctgtacgcgtgaatagctatttgatattcctggctctttgatgaagccatcaaagactgaaaaacaagctggtggatcaaccaaaccgaaacttgagccatatgcctcccaacaagaggacctggtcgtttcgccaatgcatgattgaagttgaacatcttctaaatacaatccttcacagggtaagtcatcactgcaagtaaattgtattgcttcctctgtagcagaagtccctttaatgtgaatgaaagatatgttcttcactttaaccgccatagtctgcttctccaaaaacatgttaagatatagtgttgttagctttagttagcattatatttgagagaaggaactgatggcataagctgccactgacaaaattcctacctggttgtggcatggtgtctgagagtcacagtaatattgatctattataattggatttgatacattctccattaacacgtttttgaataaaatctttgaagcaaaaccactcccaaccttaaaaaacattatgaactgctctaggagttagagggtgccagcttggttcaaaaacttacctgccaagttttaatcctcaacccattttcagtattgaacaagaaagccccatctaccgttacatcatgcacatttgaccatgactttgactttcccaagcttccaatactatggatgtaggttagagtcagttaaggtgatctttgatacatatataatcttcttttattaaaaaagaaaagccctttactttacctaaccccatgacctgggccacaggaaatatcacgtatcataatccgtgaagaattaccaacaatagaaatgcagtcatcacctaaacaagagaattttttattgccaatgtcaaactcaagacatatagttcatagggtgtgctgacactgtcaaggagatgctctcactgacctgttttgaatatgctgtgtttgatctcaacgcttcttgatgagctaatgtggactgcatcagtgttaggactagaaccaggtgcaacgagtttgaggtatgacgctaaaacccggatacagttagtgaatgccatgtgcatttgttggctatcaacaagcattaggtccttcactttcagattcttacatttgtggaatgtaatagcctgaattgtaattgatactaatctaagattgtaatctcagctgaagtgcagataagaaaaatgaaatttaaaacaaaactagcatgttcataaacaatatagtaacacttacagtaggagcatgtcgacatggctgaaacacccccaagaaaagaaagaacaatctcttagaacaagtcatgaaaaactaatatgtagaacaaacatgaatgaaaggatacaagattgtaatacattttttgggttgcgcttgcaagaccgagaccaccattcatgtcccatcccattgattgtgcctcctccttcaatggtgaggtggttcacctcatagaagtaaagccatttacgtgcattcaaaccagaccaggctttgggatcttttggagcagtgatggttccagatatctacaaaaagaaatacaatacatataataaaagtagtaatgacaaaatatgaaaagaaaatatatgaagaaagaagaggactttctgaaacactacaagtattggctcatacccttatagtgacctttgaacgacaaggccctccaagataaataggataaattaagtaagtatttctagcagggactacaatggttgtcttcacagaaaatgaacaagctttc

SEQ ID NO: 188895 - DNA, 2986 bp, Cannabis indica
aaaagaagaatatacgttcacgtgtatattataattactaaattcttcttttctttagcatatacatttatataaatgctgaattctttgcccaaaaaaaattatttcttgatgtaaatttatataaaattataatagtaaatctattaaaaatctataaagttatcttataaatttaaatttataattaattttactgtcatatttaatttatacaaaactgtatgatttaaataccacaaccacaacacaacacaacacttgggaaacattccaacctcataaaaaaggtcaatctgaaacccaataccaacggtcattcatacaaaagtagtccctatttgagaaatagatgggtaccaatggccaaatatagattcatgatcaatttatagttaaataactaaacttgaagagaatacagattgtaaaaaacttaaactaaaataaacaaacctttcatttcacacatttattccaaaccaagattatcataatggcacaagcacaaccggagaggagcaaagacggaaactttaaagaaaccagtagtccccgctttagattcaatgctcaggcccctgaattcgttcccaggtcacaaacccagatgtcagtttcaggatatttctacccatgcttccattttcctgattgggtttatgttggtgaccctgagcctccttcttattggatatctaatccagataccacgccccattcgaagaatgtcctcccagacgagcttcagcaaaaaatcatcaaacaggcgtgttgaataatttttgttttctaataagctccatttggtgatttgctaattgggttctgtttattttagtaatcctccatattagtttttccttcctaatgtgaatgttatttcgttataggactgaggtttgtgatggaattatggatgttttgttaatagatagccattgtttgaaacaggtggaataccagtttagtgatataagtttgctagccaatgaaacgttggctaaaaacattagcaaagatcctgaaggttatggtaagaattattagaaagtaattggtgatttttattttgattaaacactgattttaaacatgtgtttttgatttataacagttccaatatctgtgattgcttccacaaagaagattaaatctcttactagtaacaatcatgtgctagctgaagcacttcgatcctctttgaagcttgtaagatatttattgtacaaaatttgaaagatataatggtctagttgtgggaaaatcaatctttacatcattgattttgtttattataagtttattcttaattgttgatcatgttttgataggttgtaagtgatgatgggaaaaagattaggcgaaagcatcctttcacagaaaaagagagagaggagttgcaggtagaacaatgattattcaaaatgtttttttggaattaatacaggaataaagtatgctaaatttaactctggtcttgcagtctcgtactgtagtagcagagaatttgcctgatgatcactctcatcaaaacctcgagaaaatatttaggcttgctggaaggttgtttctttaggaactaccttcatcattttcttattttagtgtgatccattacttattgtatactgatctgaagatatcacttgcagtgtgaaaacagttcgagtatgccaccctcaagaacctaattcttctcgttctaaaggtgatttctttgtcagtaacaaggtaaagattgaaacattttcattatttctccgataattagattaatttgaatagtcttcacccgaaagtaaaatttttattcttgttgtttgctctcacagcttcatgcacttgtggagtatgaaacaacacagacagctgagagagcggtagagaagctaaatgatgagcggaactggaggaaaggtctccgagtaaggttgttgctcagatgctcggtatgcctatcccttgtcattatgttatgtttttttccttgtttttagataaaaaaaagttgttaattttcagtttaatttattgactattctataagaaatctgactattattagaaaatttattgctcagccgaaatctgtcttaaagaacagaagatcagaattcgatggaattctagaagatgatgatattcttccatgtgaatcagctgaagaggcttctcagtcaagccatgcgaattccatcattgtaagtaatgtaagattttatttttactgaatcaacttgttacatctcaagatgatggatttatatgtctttaattatacaattaaacaagcaaataggctaccccagttgtttcaatatcacaaaaaaaaaaggcctgattgtaagaaaactttatccaatatctcatcatgggacccctatggtaggctgaagagaactctggtggatcaaggaaggggtggggacgagggaggggaagcctcgaggacgggcccagaaccacagtgggcaaggactgattgttcattctttgcaatcaagcagtggcccctatagtgaaggacttacgaggcagaattctaagggtccaagaatgccagatggaacgaggggattcaccatgggaagaggcaagccattatccaccccaactcttgctaatgtttccaattgagcttagtaagagcaatgcttggcagcctagttttgatttttttttttttctggcaatgaatccttactactaaatgtgtccacctctttcagaaacttgagaagggagagatttttcaagtagtattaatacgtttacgtttacactaataatttgagatgtatagtatagtaatagtatatcattcatttatatagcatggcacaaagggcaaatgatgaccgaaattgttttcttctctcaaacttatgtattcaaattaatcaataatgaaaatgagtagaaatctcttcgtattaatctttcttttactatttaatttgattagaaattagaagtgctttac

SEQ ID NO: 188896 - DNA, 3889 bp, Cannabis indica
gggttacaattagatatttacaaactgacatttatattggatttggattgataaaaatactctataactcaatcaaaccgatcgatgtacacccactgggtagcactggtgcccataacaatgctcttttaatttttatccaaacacccctagaagaattttttttaattctaaaagctaaaaaagaacttataaaagctaagaaaacatagtcattgattgaatctttgtttttatacatggtattgattggatcttctattttgttagcttttacatgtataatttatttatttattttaatttttgtatacattttttgaaaaataagcataagaaaaaaataattataaacaatgatatatcatttttattttctttcttcttcatttttcttatttttttttttatgaaaaatgtacaaaatataatttttttcccccaaaaaagccaccttaacctgtacccaaaacctaaaaactcgatcacacaaacgggcgagttcaatgtactaattctatacacttgaactcgaaaatccgaaattcgtcaaaattcacccgatgtacacctctccttcaaataactctcatgtaaaagaaattgttgggcataaacttttacatcaacctatataaaagaaattggtccaatgcttttccagagaattgttcacttttgcatctaaataaaagaatctatgaaagagggaaaataccaaagagcatctaacatgtttttatgctcatactactatatttctgtataatttaatattggtgtgcatgcttttattttttataaaagcgtcccatattacattttttgagttacatgcattcaatcctaccattctcatacaccctcctaataccttctttggtggatatgtttttttttggctattttttctctgaactttggcatctattaaattatgctccttgaacttttaaggtggctaaaaatacccctaaactattgagattgttgaatttaagaattttgatctaattttagtaaaaaaagtctaacatggatgaaaattcaggggatatgatttagtagatatcaaagtctggggagtatgatttagtacataaacaatcactgaaatagcaaaattgaatgaaattagacaaagtctttaaatctaacaatttcaatagttcagggaaaatttttaaccataaaattcaaggacatgtttggtacatgttaaagtttagtaggtaaaaatcataattagcttttttattattattattgttttgatattgtttgaatgttatttttttattacttttatgtaatacttttataaaatactataaaaatataaaaataatcattgaacattaaaatttaaaaatataattttttttttttaaataatattttatataattatcccaatattttatgggttacttcataatggttttcgggacaatgctcattaaaaaaaaaaaaagtagacaattcaatagaaaaaaaaaaaaagaaaaatagaaagaaaaacataagtattaactataggcccgcaaacaaaaaattaaaacatactaataagaagaagatgacaagagaagaatggatatgtgttagtgttaccaaaaccttaaccaaatttggttaatttcttttcctttttccttttgtttttatatgtttaatttcttcattttggttttgtcaaaaaagaaaaaagcttcaaattggaaaattcagaaatcacagaagagaatatgaactttgtcaaacataattaaaaagtatggtaaactcatttagatatttcatattcatgaaaatccaaaaaaccaaaactaattagaaaataactaaattttctgcatcatcactaaatttgacggtcggtttcggttacaatttttttgacatgacagtcgattacaatttttgaaaaaaaaaaaataggaaaagagcaatattagatcataaataatatataagaagaaattaaatagaagaaaagggctctaatataatatatattataagattctttaataacactaataatctaagcagctttggctatacaagctgagccatcactataagaaaaagacaaaacaacacctgagcttagatctcttgatctgagaccctttgaaattgaaaccccatttcttgataatttgcattctgatcctccccaccttcagatctctgccttttcatggcttctcttctttgatcatgatccaccatccttcataaaaaaaaacccaatattaatctcaaaaatcataataatgataataacaataatagttaaagaaaaagatagcaatttaatactgtttggaaaaactttggtgatgggtgatccctgaaatacagagaggaagtccataacttccatggagattaaatatggactgcatttttcctgtgattttatatatgtgtgtgtatatatatatatatatgagttagttttcactatttggtttcttttctttctttgtgtagagtgtggaataataagggttataataaatgagataggaccaagtcaccaaggttttagaaggaactcccttttgtcattttcttctttacttactttactgtgttagtttttgctttattggaaagtgtaacatgttatgccactccaccatatcccatgaacctcattttgatgttggacctaggggtgttcattggatcgcattcaatgcttttaggcctatccagatccgattcaattatatattggatattagattttaccatccgatccaatctaattaatttcgtcatccaatcgatccaacatccattggatgttagagtggatcggttctatcccttaaatgtatttcatatatatttatttatttaattttggtttatctaatattttagacctagtatccaaactaaatgaaaatactaattagttcgattggatgttagatgtattggatttttagacacccatccaccatccgatctgatcaaattggatatttaaaaataacatccaatctgatccgatcacaattgaatatccaatgtttggcagtcgattctcgttggattggatcgatttatgcacacccctagttggaccaatttgtttggaactaattaaatagaaatgtattaacttttaatggagtcttttgatagattttgtatttatttcggtattcagaaaaatattttaatttaatttttttttatgatcgtgtgtgtaatggacaaacttacatagaggcaagagggaatagtcgtctcctgaagaaaaaaatcgagaaaaaatatatatgtatttcggttagttacaatatatatttataattaaaagtaatgtatttcggttatatttataattaatataaacataataatagctttggcatgttgattaagctatcttacaaatcttatagattatagaggtaaaggttcaaattttagtaaaaatatctctacttttaaatatttagtttactttgtgccccctcacagaaaatatacccctcaattttagttttgagtttataattatttgggaccagttataaatttttagaaaattccaagtaatttacaataacaaaaataagatttacatatttgttgtacgcgtgactgttttttcttatacaaatagtaagtaattgtttaaatcttattttcagtattgtaaactattcagaattttctaaaaatttacaagtggttctaaataattacaacgtacaagatcataaaaaaaattagactaaaaaaatttctgaatgctgaaaaaaataaaaaatctactagaacgatcctttaagtaaatctattagctaaatatgtcatttcggtgtctcgtagtgttgtgtagtggcctgattagcct

SEQ ID NO: 188897 - DNA, 2177 bp, Cannabis indica
tatatatttatttatatataattgattccactgaggacaattccaccatcaattaaattttattttcgttctttctggtttagatagaaataattggttagctagtaatgtatatatatatatatatatatatttatatataattattttaaatattttgaaatcaagtacaaagtattactatgaaaatttaatattttttgcattgttataacaagatagaaatttattatttttcgcattgttttaaattggcgacttatgagacatttagttgatgatattgttagggttttaattttttttttaaaacgacttaatttgcttatttttatcttattttgccaactgagcattatctgtatgtaatattaaataatgttcgatttattcaataaaatttttatatataatctaaaaaaaaattataatacacatgattaataaaaaaaattaaattataatttttctaaatactaaaaaaaaatgtccttattgataaaaacaaaacaaaaatatatagtgtccccattctatattttttataaaataaactctcatcttccattatcaattatagttgcaatcatccaaatggaacccacttatagttgcttagatattaattaaatattatgtattaatatacttggtgcacaccacttccatatattatatatatatatataattaattaatacatatatctagacatcatataatttttaactttttctcctaataattctttgtggtcatagcaataatattattatatacttatattataaggtacgtactttaattatcaactgaaaaatagaatgaaaaaaaacctcaattatataattaaaatttctgaaaatttgatacaaataattttggacagaagatcttaattccgaaattaatcatgcctaatactcttaataattttaatatagaaaatttaagcatgactacaagagaaatttttttatccaaaaattatacattagtggtggcgggaatcagggcccccagggcttaaccgattaggttggagaggctttccgatatttcttcttaagctcgcctcaattactttctttgtaacttcgagtaatggcaaccgaacttggctactattactcgaaagaatggtggtggtggtggtggtgggagtagggcgagcatgagacgacggagttgaacaaagaaaaatgaagagaataagaagaagaattatagacaaagaaaaatatttattattatttgtaacattaataaaggctgccattattaatgtttttagaggttttgaaagttttggtgtctgttaatattgttatgatgataattgatatgttagtttgagtttttgaaagggtatttatagatgttgtttgtgtgaataaatgttttttttattttaataataataataataaaaagaattatatgtgcacatcaatttgcactatatgtgtttttctttttctttttttttaatataaagtaaagataaaaaaaaagtcaattttctgacacatcttttcaatattaattaaactcgtgtgtgcatcattcttgtttttgttaccttttttatttttattctttttatatgttcagaccagaccaacttcttttgttttttcttcttagtttttgaaccaattgtcattaattaatgggtgcttttgagtgtattccttgtgtacttaggtatagggataacaattatactcgtaggtttgggaactcgccttaatgagatgaggatggaggtcgaatttcgggggcaagagtgatataggtttgaatattacatccgaattaggtttggggtagggggaatagatacctaccccgatatgatatatattttaaattttaaaaatcataactattacaattaaaataatttcatgctttaagctttttattgattatattaatgagattgcagattttttaaaaattctaacagagacattttaattttcatataaatgcttacggtaataatcacatttaaattgctttataaaaaaactgacacttaaccacttatttttaataccaatttatatttactaactccattttatacacactattttattatttgttttaaatgtagtttttatgtatgatatttttaaaaaaatttactctttgattacattattttg

SEQ ID NO: 188898 - DNA, 2776 bp, Cannabis indica
aaatataaaaagaaagagaagaaaaaactcaaggaagtatatacttagatagtcttttcaatggaaatagtactttttctgatcaatatattatatgtgagcactattagtcagaaaaatataagacaacgtattaatatattcagctatctacagaaatttaactattccgcctccctctttaaattctcttctctagcccccaaactcttctacaccacacttgctttttctcacaaaccacagcaaagtaaagctctctctctctctctctctctctctggttcttcatctctctctctatctatctatctagccatatttatattcttatatatattatcagtaaatggtgccactcgtttacagattcctgaaacagagagacataatccacctcaaacttctcatgattatactcatgagctgcatacctgatagaatcgagctatgctcaaaccatttcaaagcagctccaaaagtaccatctcatttcagctcctctaacgtacctttctctttggaaacactgagcctagatggacacttcagcttcgagaacaatcagtatgcagcaaatgactttggcaatatgcaccatttcctaccgtcggcagtcctgcatccaaaatcggtatatgatatttccaccacagtaaagcatatatttcacatgggttctggttcagaattcactgttgctgctagaggccatggccactccctccaaggtcaagcacaagctcaccgaggtgtggttatcaacatggagtcacttaaggaacaggaaataaaggtcttcactggagagcggccttatgcagaagtttcaggtggccacttgtggataaatattctgcatgagacgcttcggtatgggctgacgccaaaatcttggactgactacctatatctcactgtcggcgggactttatcatatgctggcatcagtggacaggcattcaagcatggacctcagatcaacaacgtctaccagcttgaggttgtaacaggtactatactatgttcgatgaaacttactacttctttttccctcaaccacaatcccagaataaaagcatgtccaaactagttgacagagaagtaacagagtctagagctttctatttcaggtaaaggagatgtggttacctgttcagaagaacaaaatgctgacctctttttcgctgtcctgggagggcttggacagttcggcatcattactcgggcaagaatttcccttgaagttgcaccgaagatggtaataatcacagcccacattacacccccccgaagaaaaaaagtatgcaggctgactatagcagtatctaaccaaattgtcctaattatgacaggtgaaatggattagagttctgtactcagacttctcaacattttctcaggaccaagaacaccttatagcatcccgaaactcattcgactatattgagggttttgtgattataaacagaacaggtcttctaaataactggagatcctccttcaatcccaaggacccaagtcgagcaagccaattcagctcagatggaagaactctctattgcttagaaatggccttatattatgatgacaacaatatgacccaggttagcatttcaaacaaatattccaaacatataactttgtcctaattaaaatgttattcataataaaatcctcattgaaaaactttttgaatatgaatgcagaagacagaacgcctcttgtcagagttgaattttattccatccactctcttcctatctgaggtttcttatcttgacttcctaaacagagtccacatttcagagataaaacttagagaaaaaggactgtgggaggttcctcatccatggctgaatcttctgatcccaaaaagcaagataaacagtttcgctaaagaggtctttggcaacatgcttaaccactcaaccaatggtcccatcctcatatacccagtgaacaaatccaagtatgtactcactcaataaactactaagttttcaacatctttgaaacctaacaggtttctaattcatactattacatgatacaggtggaacaatagaacgtccttagttacacctgatgaagatataatgtacctggtagcattcctatcctcagcaattccatcttccacaggaaaagatggcttaaaccacatattgactcaaaacaagagaattctacaatactgtgccacagctcatcttgggactaagcagtatctacctcattacagcacccaagaagaatggcgagctcactttggttctaaatggcgagtttttttaaacaggaaatcagcctacgaccctttggccatcctagcgcctggtcaaaaaatatttcaaaaggcaatacctcttagagacacctagcaaaccaggaagaaaataattaccctgcagacctctatgacattcccaagacctataaattagtgccagtcgagtctgaatgttcatggtctcaaccaaaaacagcaaagtgaaacaagaagcctgtgggttatctgacaattttgttgggaacttagaaacaaatatataatcaaacatcacaatgtaaaacgactaaagcatttacctggctaaggttgttagtaatgtatttataaataaatatgtctatcactaatcaaattagttccatgtgatggaaaagccaaatttcaaaagaaaataccaatgagtgcaacaacaacgtgaactatttaatgatatagtccatttcatatagcaatataatatgagtatactgttaaagtaaa

SEQ ID NO: 188899 - DNA, 7112 bp, Cannabis indica
aaattctctcaattatcattctacttgcacttaattctctaagctcaaattcttcaaactgcactgcttgaaaatttaaggtgtcagtctatttttttttttttaccgttaattgccaatatagacagtttacatttacacttttgtacatgtgtcaaatttatattagtgaagctaatattattatttaaaatataaaattatttcaaatttataatatgttttttataattttatttaatttaaaataaatttaataatattaaatgtactaatataaacattttcaatggcaccatcaatttgctacaattcagtagtttgaaaaattttaaccgctaaaaatttgtatttacgaattagaaagattttgccttaaaaaaatctccataaatatatttcagctgcaatgaacaaattcttgaattataccggttaaagttatcttttcggaaaggcatgattacttaaaaattattatagaagaaattattgggtaaacattggcagaattaaccatttctcacatattctactaaaattgatgtcaatggtcttggctccttttgtaatccctttgcatcgcttgatgacgaatgtctccctcagttatttgacgtgtcaagctttttcttttctttcattccattttggaaaaaatgtgaccaagttgatcaattattattcctaggcttccaataatctttaatgctcaagtacaaaattttcaatttgaccaaataattacgcagtttagttatgtcttccaatgaaatgtgtaagagcataacccaaacaataaccagttacataaaaagattgtgacttcaaactgaaccaaagtctcataaaattgtagttcatttgcaaatggaaacaaaattgaaattcctaatgagaaatactacaaaactagcttagatgattccaattttgttagcaacgtccagagcatcatagtctggggtcaatctaacgtaagccttcttggtaccatcaggcctggacacaaaactcagattatgttataaacataaacaaggaaacatgaataatccacatgtatattaagcaaatcaatgtcttacttacctgatcaatgtattcactttcttagtctgaatgtcatacatcttctttactgcatccttgatcttcttcttgtcagcacgaatgtcaacaatgaaaaccaaagtgttgttgtcctcaatctttttcattgcagattcagtggtaagaggatatttgagaatctgataatgatcaagcttgttccttgaaggagcactaatacgaggatacttgggattcctttccttcttaaatgttcttgggcgatggaaggtaactgaagttcggatcttcttagctttcttcttaatagtcggccctgatttcactgcttttgcagccttcaaggcttgagcctttggatcagctttcttcgagacatcagctgagacacgtgaattcaaacaaagcatgtgttataacaagaattcaaattctcgccagatgaaaattatttctgagacacatggctgtacaaactcacataccagttcatttacaattaattacatgtgttaggaatgtgaagacagaaagctttcacgaatttctctctactatataacttgttgttaaagagaacacaaacacattaaaaatcagtaccaacaatactagcattgcaaagagttggagatattctcgacagtaccaagaagataggactttattgcaatataccaacatctagttataatgaaaattggatccagataatctggtcaactatctcaaggctcatgtgagataagtctacgaatgataaacatatcgaacattcgttagttctactactatcactatttatctatgaaacctacatcaacatgactcactaagcacaaaatcaaagacaccattataaaaaaatcgaaatttgctatacgtttcctcatatagttacttatcaaataactgactggccatcagaataataaactaaaatattcattgaaggtcagaaataagtattcttctaatgctaacaaccggtaaatataaaacaccccccacaccaaataaaatgacgacttcaattcctttgcagcattacccttgccatacccctccttacattgttatttgtttccttccttgccaaagactctacagccctccaagtcctatattttcttcaagtaaatttagtacctctcccattctcatctttatatatatatttaagtaagaaaccaaagacccagaacgccaaaccaccaaaaaggtcgcactaactattactaatcaatcaaagcacgtttcacaaccttaaaaaaggaatcaagttattaaaaaaaaacacaccaaactaataggattcctagaaaatgaaacagtacttaatcatttactaactttgttatggaaactaatgaacgctaaaaaatttaacaattaaactcgtacatggtagcattcaaagagaaaaaggaaatcaaaagagcatagaacagagtataaaagaaagcattggtggaattagtacctttaggagccattaaaagctgaaacctttctgactaataaatatgaaaccctacgagcaacaaaatacaaatatacagaatattaatactgacgaaaattgtaacgacagaaaaaacaaaaggaaaagaagtagagaacgagtgagagaaaaacctgtgtttgaaatggagggggcgactctagggtttaggatgcgattggaccaaaccagtaatatattacaaagtctgatcgaaattaccaaagtctccacttcacttacggtttatgggctgggctagatcaatgggttgttttatatcaacttttgttgatactttttcaaaaatacggttttaattttctttgcaaaagtacgattttatgtaaatcccaaatatacctgaagcacatatccttctgacctttaaaagttctagttgaccaaaattgaaattctgtcgattaaaaatttcgtagactttaactggaatcaaaactaaaactaaaagcttcttttgtacaagaaatagtaggagaaatatgattaataaaattaaatttaatagttattaaaattgaggacataatttaaaataagtgatccctttattatatgcttcagctttgtgggatgagggtttaccctcaatggcagtttcaccaatgtcagcagattagttatgcctttatggcttttccttgtatctaatcactaataataaaccattataatttccccatatacgataatgaacaaaattgaacagtattaatagcttttgagaaatggtaacatggtgaaaattacgaaacagatagctatcaacatataagatagctatatgtaatacacaaggaattcccttttatctaactgtaatgggggggtgtgaatgtcttcaaaattaactttgggtatccgttttttggtcctttttgaaaaatgcagctagaggcccttgtatatcagaaccataaatatgacccatcttagttcgctttgtttccaagtacttcttgttctcttctgtaatcggtgtcaatacaggcactcttccaaccacagccaacccataccccttgagacctgtgaattttgctgggttgttggtcattagccgcattgtcctaactcctatgtccctcagaatctgcatccataccataccacaacaactaaatatctcaaaacttaaaatcagtattaattagttaacactaatcagtgactatcatgtgtcaatattctttatccaaatttatagagactgacctgagcaccaataccatattcccttgcatcaactgctaaaccgagctctatattggcctgcaccgtgtcatgaccttcatcttgcagattataggcccggagtttgtgaccgagtccgatccctcttccttcatggcctcttaggtaaaccactactcctctaccagcttgttcaattagctgcattgctaaatccaactggttgccacagtcacaccgtgccgatccgaatatgtcccctgttaagcactctgaatgaactcttactaggacttcttctccatttcctatgtttccctgttgaaaaggttccaagccaacagttgtattaatgaaattgtcagagttaatattctcaaatttcttacgtgggaaattcagataccttaacaatagcaacgtgttcagttccatctagctttgagcgatagcaatatgcctggaatacaccccactttgtaggcagacgcgaaattgcagttctttcaaccagattttctctttttctcttgtacctattatcattgcaaacaataccaacttttgagtgagccgactattgagaaaagcattttcttcgctcaataactacaattgtaagctcacttggattacttaagggtgtttgttatggaagttgggcttgaaagctcacttggattactcaagggtgtttgttatgggagttgaacttgaaagagaacgtgatactaaaaactgaggctcggttgaaaacacaaaccccaagctattaaatttattttaccaaacaatggattgaattttacattccatttctaccaaattcaaccccataccaaacacaactttattggatcaaattcaattagatttaacgagtggaaaacaaaagtgagaagaatatgtgtactccagagacatctttaattaaccccataaacaaaatagtgtgtttcaagaagtctcacctgattaaatcagtaatggagaccattggaatgctatattccaaggctaactttcttaaatcggccagagaggccatagagccatgttctgagtcaactaaagatgaaagaacagacatgggacgtaggccagctagagcaaccagatcaacagaagcctcagtgtgacctgccctcctcagaacaccaccgtttcggtatttcagaggaaagacgtggcctggccttcgaaaatcttcgggtttagaatcaggagatgaaagagtaagcacagtctttgctctgtctgatgcagaaactccagtagacgtgccggctttagcatcctatacaagccaagccaaaagaaaattagattgaaatgaactataacctgttttatcattaaacttgtttttgggtaactagaaaaacatttattaccactgtgattgtgaaagtgggggccgaagagtcttcatcttcagtttctggtgacatgagaggaagcttcagtctttcaagatcttcctccttcatgcccactgaaacaatccctgagccatgtttaatcatgaaggccacatgctcttgacttgtaagtgatgctgccaatataatgttgccttcaacgtccccagtttcatcatctaccacaatcacaaactagaaaaaagaaaaaatgatcaatcaaataagagatatactgtaaaaccattatgagattttgaacttaagttcaaccacgattgattaattattcatggactttacaaactagaattaacaacccttatatgaattggataaacagaacaagtagttactacataggaagatcagtagcaacctttccttggcgcagtgtatcaagtgcctggtcaatcgatgagtaaccttcagatgggcaatcaggatcaccttcagcatcacttacaagaaatcaatagtttcaggggtgatttcagctttcagggtcccaaacggcacggaagacgattcgtccaaggcgccaagcaaagacccgttatcagtctgatcatcaaacaagttgcctgctttatttcgagctacccctattgcccaacaactgggacttcaaccatttctgcctataatgtccgaatcccaagttatgtggagccgcaaatgatggatgtaagctgagaattaaaaaaaaaacactaatatattatcaatatacaataccttaactcaaaacaaaaacagaggctttctctgttgtttgtatttgagattaaaagaagtaccttgaagtggaactggtaaggatatgaagaaagatatggcgttggagcaaggaagagtccatgacgaccaagaaaccttttttttctcttcggaaactatgttccttttatatgtacttgtgtttgtatatataattatcatagttttgaatgcatgttacgtgacgctttaagggaaataaagcccacctctggttctggatgtgcttaaactcattaggagccgttatccacaactaatattgtgtcttgtctgccaaaacaacaaaatatatggggcacttacgtttaatggtattcagtattatttggaaaatataagtttctatatttaattttattatctgacataaaatcgctctgtcgcgattattataatatttttctaagtataataataaaaaataatatcaatataataaataaaaaattgaaaactttattctaatatataataatatttaaattgcttattgataataatatttttatttattaaaattattttttccatcaaatctattcattatattataaattattatcacgaagaaagttagcttgtttctttattaataaatttaaaatatgaacaattaattaatgtatataaaattttaaattgccttgataaaagaatgttaatataaaaacataataaatattgtggtataaaaaaaaaaaagaaaaattatctcatatactattttttaatttttttttttaaatttacggtttggattgctccggtggtttctatgtgagttgttatacgaattttagttgcgatttaggttgctccgttagttgttatagaagtttctgtgtagaatcccgtaaaaatatttaaaaagttgttttgaagtgtaaaaataaaaaagaatccttaaaaaaattagagtgttattattattatttaagttaatacttttttctgtaatgcattatctttatattataataatttgaaggcgttattttcattgtatctcacccgccgttatcaccgtctttcacttgtattcatcagctactattctccccaataagtatttatacacaatctaaattattcaattgtaaaaaatgttaaaaaaa

SEQ ID NO: 188900 - DNA, 2707 bp, Cannabis indica
gcctcaaaagccttttaaaactatggagctaactgaaaaggtgcaccaggccgggccatggaaataattggaataagcaataaggatatcaataaattttctctacaaaagcttccttttcacgatttattatatttattttataatagaaatatatattttgacgatatcctcatgtttatgtgtaagttggttaggtcttccatgatttggatttcaaaacttccccatctttagcaaaggataactcatttttatttaagcgtgccacataattggctgtccttgtttgtttcggctattcatgttgattttggctggctgctacaatttattagtcacgtctctaatgaaggttttcaggatcatatcattactcagttcaagtcatttctgcaaattatgagtcttatgacttaagtttgttttggggatttaccattaaaatgttttatttatgctgtgtgatagctacctcttagtattttatttcaaatatgtctagtagcaaccttattctctttcatttggctatactagccaattttcttccacttttgtggttttgaaatagctgattattttgcagctaaacagtaattcccttcactttagaatctggtttgatatctcatattcttgtgtttgaatatattggcaggtcgggcttcaaatgagttttcgaataaactaacgcttgtgtgggaattatattgacatagatcagatatggtaggggaagaaagttactaaaaagaaagaaatttaggggaggtttttcattttttcattaaaaaaaaaaaaataggtgaggttgggaaaagaacagaaatgaataaaaagaaatatgatgttaagagtattggtgtatatttgagaaaaagtatgaaagtataaaacaatgatctatattagaaaagagtcagaagataaaactaggagacgaatcgtacagtttatcttgtagagggaatagaaaattcataggtttaaactacaatgtgagccctcagaaactgactcaggtttttatgccaagaggaaagaaagggatagattcaaatgaaggtttctcaaccatgatcagtcaattaaggcaacatatgtgttgaagactttctcacttgcaaaggctggagcttttgatggtggtcaaagcttatgggatttgtagttacattgtttttgcatatggtgaggggtctctggtctttctttcttccaagttccaaactctggacacacaggaattttccgttgcagtgactttttttttactgcaaacaaataacttaattaccaacgtatgactggcaatccatgctagtttctgaacacatcatggttggtttacattacgtcttttttcaaacttcataagtcataaacatatatttttggtccatagtttgctatcaagattcaagaacatttcttatgaattgaatgtgggtgaggctgctgctgtttattgcttaacatcttaaatcattaaaccacattggccataattaattctccatttcttatggaaatgttgatctgcttgcttatttgtttttttatctttgttaccctggaaatcatggtggttggctattttaatttaagatttggagctaataagacttgattggcatctgcaggtggattatgcatgtacccctgaagaagtgcagcaacatttccagtcatgtgggacagtaaacagagtcacaattcgcacagacaagtttggccaaccaaagggttatgcttatgtggaatttgtcgaagtagaagctgttcaagaggcaattcttttgaatgaatctgaactacacggccgccaattaaaggtttacatcaatacattgtatttttttcttccttttatactctgcacatcaagtattggaaccatgtattcaactgaacaagctcttttaattgtcttaggtttctgctaaaagaacgaatatacctggaatgaagcagttccgtggtcgtagagcaaatccggccatgggtggcttccgttcaaggggtcctaacccgttcactccattcatatacaacccctatggatatgggtatgcatttataaacattgccctcgacattttttattaaaacattttaatcagtatctttacgttctacaaattgttttctcttatggttgttgttgcagaaaggttccgagaatgagaatgcctatgcgttacagtccctacttctaaattttcaatttttccgaggcataggcatcgagggtgaagacacactccttccttttttgaaggactgcgattcaagatggttcggtttttcttttcttttctttttcttctttgaatggaactattgcatctgtaggtttactgtggataattttgtgtggattaagcattttgtgaagatggaagaatgtactagcaccaccaccaccaccaccaatactgaattctctatatatctaatttaatcttcgcaaagaagcccttttcttcatttgttttattgggatatatatctgatctgatttattgtttgtaccaatggctctgcaatacttttatacttgcccaaactacttaaaatataccaataattaagcacacattctccaatagtcaattcactgatcacagagaaaaacacaaattaagacccttgtaaaatcatttttactacgtttaaaattctataaatattgtactcgtac

SEQ ID NO: 188901 - DNA, 3770 bp, Cannabis indica
tttttttttttttgttaaatagctttgttgtaagtttgaattgagttagttgtttgtctaaacaattggagtaatgaaattacttctgaaatacttgaagttttgaacttgagcaatgactaggtccgctactaaaggacttttgattcacttaaagctagtttgatagtttaattttattgtgttttcaagaataaaatgatatgattcgagcatttatcttaatttcgtagttgtgaaatcctaatcacatggctgtatggtagttcctttttagttatgttaatgatatactgttgatgctaaatgctaacttcagtgatggagttaattgctggggtggttctaatatttcaggtgtgctagtttggatggcgatgctgatcgatttgtatatttcattgtgccatcgaaaaatagtgataagattgaacttgttgatggggacaagatattatctttgtttgctatatttatcaaggagcagctaagcattctcatgaagaaaaccgatggtgctggaaatgattatcaatgtcgtattggtgttgtacaaactgcttatgcaaatggagcatccacagattatttgaagcagttaggccttgaagttgttcttactccaacaggggtgaagcacctacacgagaaagctgctcagtatgatattgggatctattttgaagcaaatggccacggaactgttttgttctctgaaccttttctacattggttagaggccaagaatgatgagctttcttctggtgcgcaaggttataaactaataactgaattttagtgtatcaaatacaaataatagaatgacatgctaacactcatgaaatatttggtgtttatttcagacccagagcaaagaaatgctgctttgagattattagcagttagtaagttaatcaaccaggctattggggatgctataagtggaattcttttagtggaggctatattaagacacatgaaatggtcgatacatcgatggagtgagctttatcatgatctacccagtaagcaacttaaggtagagatctttattattaatttttatgtgaaacattggtcctttatcacgtccaataaatgaagttttgtctttggaagcaatattttctggtaccaaatcttatatttatcattgtagtctgtcacgtaaattttcaataggtaacttgattttggtcagaatttagggcattgttatgaagtataaagatttaaccaaatgttagtgtgatcttcttgttgaattttctttagatcatggtaattattagttctttgttgtgtataattgtgtgcgtggacagtgttttcactttcaagttttcccttttgatgacattgtagatggaatataataggccttaatttctccattcaaaatatttatgaagaagtgttgaccacaatacatctccaaatttttttgccaaactctcggtagtatactgagagcatagcctattgctattgggcaccagtaatgcctagcatcacctataagtggcaccttacgattggttagcaatattttctaaaagttattatcttaagttgtatgagactcgataattaattgcaccaatagcgatatgacaccgagaagggtgttaagtaccactggtgtctatttttagcatttctcttatccgtagttcagtgatgagagtagaatgtgggtaaaagtagaggtctcagtctctaaattcgaactagtttttttatattatggtaagtaaaattttttaccatttcttacatcttttaactggctaaactttgcttactttatcaggtcaaagtcgtagatagaactgctgtcgttacagcaaatgcagaaactgaggttgtgaaaccgcctggccttcaagaagccattaatgctgaaacaggtatgtagcttaagatctttcttagaagttaaaatggtgtcacaaaacttaaattttagcatatgttactattctttcaatgagaaaagttgattctcaacatgatcgaatctttaagaacacgattttctccttttcaaaaactgcagctaaatattcaaaaggccgatgtttcatacgaccatcggggacagaagatgtgatacgtgtttacgcagaggcttccacacaagacgaagcaaacaccctagcaaatagtgtggcaaacctagctgataagtttttgggcctcggcggtggttccaaatcctaagattcccaactgtctatcactaactgaaaaaactgaccaatttaatgcagacagaagtgtcttcatttgactactttcgagtgtgtgatttaatactatattattctttagagtgtgctactgacttgctctaaattatgctatatattacttatcataggtatgaaaatttgaatcttggtcattttgagtaagggtatacattacccatttaaatatgtatgcaacaacttagagtcatgtaactggaaaagatccagtttatgcattaatgatttttgtttagcattaattaatgttctctagtttctaaagaacttggaataaattgtttttgctgtatgaataagagagaaaaggtactaacattcttctatggaacatgttatgttttattttgttctattaatttacagagcttctatggtgttgtccaagttcactgggatcatttctcagtccagccttttcaagttgtgtaagataatcaattttcgttttattttgaatttaatgtggttttgttttttttttggataaacttctgtaacaatatgctataatccttccaaataaagacttgttattatatgaatgcctctactcagtcacctttagtccaaatgctcctccccaaatatggaaaggtaggttgtgctcgctgacaagtcaaaaggacaaccggaactgattgtttggacaaaagatgaattcactttacgagaaaatgttaagttgtgctgctctctaaagactatcacaaaactactccaaaatatggagttgcctggaaggaaactgaagatggattcacttttgtgatagtgtttggttgaacaattctctacactttaccacatagttatttcaaaattatagggttggacattgacactcgaaactcacttaattcggctgacccgaactcgaaaaactcgagaaagttaaaatctttgatgcattgataagcggtcgggtctcacctggttgttaatcaagtcgggtacgggtatacaaatgtaacgccactcggttacatgtttaacctgtactcgctagtacctagtctcacacacacactcacaccacatgcacacatatactgaagtgaaaagtaagaacctaattcaaaatcaaaaaatttaatttcatttccccttccccccttgttcccttctcgaagccctccgcccttacccacccaccttttctaatcccgtcagccaccaccatgcactagggttgaatatttgggctaagtttggcccgaactcgagctgatcaaccgaattattgggaaaaaaaaatgtatagaatgttcgggtcaagttgaacctagtcattatgaacgagcgggttcaggtgacttttttgcatgtggtcaggtcagggttagacccaaaacccgtccatcattacacttaattttttttttaaaaaaaaaaccctaaacccaaaactaccagaatcccccatgaccccttccctcactcaaagacccctctcaccaaactggcagaagcctccaatcccaccccaacgagttg

SEQ ID NO: 188902 - DNA, 2277 bp, Cannabis indica
ttcttaacatataataatttaattaaaaacaatatagtaaacgttacaaacaatagtattgagagtctctccttattcttcctcctcctgacccaaacaacaacaagatatacgtacaaacgtaaactcgctatgagaaagagagagaaggatgttctgagttgttgtaccatggtgtgtatgagaaagaagaggaagaggaagaagaaaggaggaggaggtttctatgtttgagacacgggacacgattcgagctttcgttttctcttctctctctctctctctattcgttatcattatcatcttcttcttctttcttcaacgtcgacattttatttttttcacttttggatcttcatcttcttcgttataatcttgttttggtttgtttgtcttcgtataggaaggagaagtgggttttgagtatctgttaagactgaaatatggatcatagtggtgtagaaggaactaacggattacaggagcagagtacgagctgctttgaagttccgaccgaaaacgaaggtgatttttttcttttcattttttttccggttacataatttaagtctgaactttaaactatctgggtggcaaaactgtaagggacatgtaatgttgatttatttattattctattgtattttcagacttgagaactataaaatagtaagataagaagttagtataagtttctgtttcttttctaagtgaacaaaaactcattaactccagatttttatatatttatatatctattaccaaatgcattacgatttacgacaatgagcattttagagaattatcattttttttttagaaatataatttaacttagattattttgatacattggatgttttagatttttggtgctgtttgatttatcttattttagatgtgaaagacccgttgtccaatggtctatggaaggcatgtgcgggtcgtcaagttcgtgtccccctccgtggggaaatggtgtactactttccacagggtcacattgaacaggttctgctctgcttcacatctttcttagttaatatttatgttttaattttacttttaaatgtataacaaacatattaaaaaggtatatcatcaaagtttgagtatatatgtataacttttcaaatgccaagcttcttatttgattaacggaattgggtgtaggttcaagcttatgctagcgaagatggtaatgtggaaatgccaatctacaatttaccctctaagatcctctgcaaggtctctaatatcgagctaaaggtacaccacttatgttacaatctgcccacttaaatcatttacattcttctatttttccataatgatgagttggtgtggcttaataactttggtagtttatggaactctgcagtatttttatattacctcatattgtgttacaggccgaggttctatcagatgaggtttttgcccagatcactttgcttccactaacagataaggtagctaacaagtgctcttgtggttttgtttgaaagaatgatgttaatactacaaaattttataaatccataaatatgaaaatcattgcaatgttcatatagattttattacattgtcaagatttgtgagttgttactaaagtagcttaatttccctttgctctcaaatggtacttttccttttttggcattaatgaaactaaacaaacttcttggttcctggaatcagcttgagctaagttcaaacgatgtggatatcacagcattgcccaagaaaactaaagtattctcttttagcaagattctcactccgtctgacacaagcacacacggtggattctctgttcctaaacgccaagctgatgggtgcttcccccttctggtcagtattcttgtatgagttacctaaacaaaaatgcccataaatactttaatgtgtgtgtcaatgatacataatatgatttggaatctttcgtttctgtagaattttcgacattgtaagtatgttgttttcaaataaaactagcaaggtgttactttcctcttcatcatgctcctcgtccaagaacacttttgattgatataaatttcatgacatgattcaactcagatattttgccactttattcttcttttagaattctaatgtccaattcattttgcttacaagttgtagttgttattgtaggatatgtcgcagcaaccaccggttcaggaactggttgcaaaggacctccatggatttgagtggcactttcgtcatatatatcgtggtatctttcagtgtagacaatttgaactttta

SEQ ID NO: 188903 - DNA, 2720 bp, Cannabis indica
aagttagctcctatagagcattacgtcgaggtttgttagccctttaggatttcttcccgtgagtgtagatggtatttcattactttagttagtgtttggttggagttaatgaaatggaatagaatggaaaggaaacaattttcattttattctttgtttgattgcatattaaagtatgaaaatgtcattccaataggatgacgtttttattattttggtagaataactatttcattttaaaatgtaaagaaagactattctaatacattatgagaaaaattaaaaaaaaaaatttcaatttttttatacattttaaattttatttcattccattcctattcctattctcattcttattcctacattttcatttctcctaaccaaacgccaccttattctatccaaaagcaacctaaatttatattcatgttcatacaacaaaattgggtatttttgaaaaaacttttataaaagtgataattttgcaaagaaaaaagtaacaaacttgtatgttgggctttcctagtccgtccgtacatcttctccgacaaaatccccaaattcaattcaatttcaatcatcaccattgtggcgaacacgtaccttttcttcaatctcaatctgtatagggaccaagtcaaaccatcaatttcacaactaagattttctctcaaaaagggccaagaaagctggatctttcacactccacatctctgaaaaatcctccaatggctgctgctactgctactacttcccaactctcgtgcttctccgccatcaaccgccggctttactcccattcccgctcctttcttcgtccccaggtaccccttttctctaaagttgactttttttatttcgaatgatcaagtgggcaattgcaatttctgaattttgagtttactgtgttaaaaagtcgtggattttgacgagcgttgaacgaagttgtgggagtataagcaagaacagtttgagttatgtgtctaatgagaggaagccccatgttgaaagagcagagaagtcttcgtatactgatgtggaggaagatcaagaagttgagaatttgaagacgactgagccgaccaaagcagcaaagatccatgatttttgttttggaattccatttggtgagtgttttctttctgggatttgagaattggatctccaaattgattgatatgacttcttctatggtgttttgttttttaacttgtatcaaattgtgatcccgaaattttcagttcattaaaagtttctctcgagctattgagatggttagatttaagaaatttggtctgatttcgttcacttttactgatgcgtcaattgtctacgtttcaaactgtgccctctaactttaacttgtagcaaatcgggctccttgaactttcatccattaggcgttttttaataaaattagacggaaattcttgtatctaacgatcttaatagtttagggaaatttataacgccttgaaaagtttagaatgcacgatttagtatatgttaaaagttttgaaggcaaatatcctaattagtttatatcaaattgtattgtgtatcatattttgatttatactattgtatatttatgtgcacatataaattcaatattatacaatacaatacgatgtatttcggtataccaaatggtccctaattgtattgtctaattggtggcaggtgggattgttcttagtgggggtgttcttggttttatcttttcaagaaatcttgcaactttaaccactggtttgctttatggaggagctttgttagctcttagcacgtttagcttgatgatatggagggaaggaaaatccagtttgccttacattctaggccaaggaggttaaatttcattctctgttcaatgctttcttttaggaccctttatagatcattgtctgaattaaacatttttgttctgttttatgttggtggttttacagcactagcagcagctcttctctggaaaaacttccaaacattctctttggtaagtaagataatgaattaaaagattgaaataatgaactgattcttgtgtttctaacttaatatatgtttcccttgatgcagaccaagaaagtttttccaacaggtgtttatgcttttattaggtacatcaaatcgctactaccctttgttttcgagaactttttagctattcatcttggtatcatcaagtcattgatcgaattaactgatttctttgtgatcattgcagtgctgcaatgctgtgcttctattcatatgtgctactctctggaggaaatccaccaccgaagaagttaaagtcgtcggcaactcctagtgctgcatcgtagtagaaaggacatcacgaggttagaattgagtttttattgtaccgagccatatcttttagtctgaggtaattaaagatcatcaatgagtggaggagaaggtactattgttagtgaaaattttatattatttaccagacaagcatgctatattgctatgataagtgaaaacctcaggggttaaaagttggtctgtttacaaataaaggttaatactaactaataaaatgaaactctttaattaaaaaaagactctaatttactcttttattcatcttcagttgatgtgtcccgggatacttcctattgctagtttgtacaggcttgttaaatctaaaacttttatacattttgtgcttgtctttagtactaatgacaagcaagttcgcctca

SEQ ID NO: 188904 - DNA, 1882 bp, Cannabis indica
agagaatagataaatacattagaaactgatatttattctcaattgaagctcctaaatgcaataatatgcatcgaaaaataataagaatattacttttttttttaaaaaaaaaaaaaaaaaagtaagcaactggcaaccaattcaaacatgtaatacatctagcagaggaaaccaagaattttcaggcaacagatgcaaattctgacccatcagaacaaaattgcatacaaccacgttaagataagaggagatgtaacttactgagcacactcagcaagctttcccaggtgttgattgtccaatattgctagaatcaactttttgttttcgtcaagatactgcatcattgcaaaaaattaatataacaatctgccaatcaagatagatacacaaatacaatacaacattctgaaaggcaaaaaaggtgaatcccaatccaagttttaatatgcaatgcaaccagtgaaaatacatgttgtgatgacaagcaccaagttcgtagtaaaccgaaattgaagaagcaaacaaccttgtctcgtctttccctaaaattgtttaatatgatacatgatttcatttcataattccatttaaatttgtttctttaacgtctttcttattttaacttccaaagtaatctagagcagtaatcctatataacgctttactgaaataaacagacattataggcaatttatttttcaacccttgtcatcattctatgaagaaacatagaaagaacaacgaataatattagccccaaaacaaaaaaggattcatgtaaaatgagtaaatgaggactttacataatggcataaacacaagtaatgtgaacataccaagaaactttaaggagcaaagaagtacatatacctgatagtgatatccataaaaaggaattatatacagatatactaacagaattaaagatttcgttttttagttaatttagcgtgggaagctcctaaagtacaattatccactaacaaaccacgttgatacgcaagatcctatatccattgaaaagtaaattacttcaaagttcaggcaaagggcaaacaaaaatccaacttcaagtctcccagcttcgcacattaacacattgtgaaataacatatttagaaaagcaatatgttaaataccataacgtttatactcagaatgtatcaaaaacttctgacaaggacaatttaaatattgaatcccaaccttttgtatgacacactctccaacaacattaattaaatatcttccttatacaattgcatcaaatcgccattaaccaaaatttaagtacacaatgaatctgtaaagtaaaatgatcttgtctttcaccaaagatttcctcagtaaataaagttatatttttccactccttgaactaatcccattcgtgtctttctgctgccaaattaagatcctatagctataaatgacaaaaacaatttccaacctgaacccactattgaaaaataaaacctattaatattaaagaataaacaaagagattcagtaaaaaaaaaggaaagatacaaaaaaatgatttagacagacaaaaacccatacacacgcacacacaaattaatcaacaaaagctttcagctttcaaagacaaaacacatcaaccatgaaaagaccagagagaaaatggcaccttctgaatctgctcagtagtgatgttagtgggtggaaatgaaggcatcacagggatcatggacgctggctgctgcatctttcttatctttccttcttttagtttgttattttccttttaattttgctgtctttgtctttcgtggtattttctaatcacaaagcctaacataattttatcccaaaggagaaaaagaaaaagatatgaataagacaacaaaaaaaataa

SEQ ID NO: 188905 - DNA, 2618 bp, Cannabis indica
actagaactataagtattacaatctcacatgaataataatgcataaaagaagacctaagctttaagctaacacaaatactaaagtcagatcacaaagaaaatttctgcagaggcacacattaagaacaaatgtttctagatataatactcagagggaagtcttgtgaaacagaagagcactatgaaagagtttcaaaaaacattcatgattatgcttacctccattttgtgcatctactcgcttagatttcacatatgactgagtcataggtaaaaggaccccttcacgggaagtactcaacttgatgtctgtgccataatgcaccaaaattttctggaaggatggctttataagtaaaccataagcagcaaacacctgactggaagcaggtttagtagaattttgcagtcttgcagcgaaaatagtaggaactgcacccttgtaattcttgatggtaatgtcctcagtggatattgatatttttgtaggcttggcatttcgtaagtcttcaatatttagtccaaaccacaaataacaaacaccaacttccgaaatggccaatacatatagaccggcatcatcaacttctccactatagacgcacttattatccacgaagacagcagggtgctccatagcaagaacacagcttgctgactgcttttttccaccaccaacattccaaactgcaacatatctttcaccaacagcagatgaaaggatgtacttcccgtcttcagaaaaaatcaaacagcgaatggctccctattgaattattaagaaacattagcaaatcccattggagatggagagaaagtatgattcagcttcaagaacaaaatagtcaatagcatgtgttgtattgggtgtatagattggtctaattataactgaataagactcacaggatgcccagaaaacttttgcatttttttgtgatcagaagaattgaaaatcttcaattgcccagctccagttgctataatgttcccatctgatttggagattacacaagaagagtatcagtaaaacaataaataatagaaccaatcttttaaaatgccaaggaaaggaatcacaaatccccaaaagcaattgctatctaaggccgataaataagaccctctttaaggaattataaagtatcacttaatttgcaactttctttattataaaaatgaaaaatagttcccatctcagctacaatttttaaactatcaatgccaaatcagttagcccctctcagttacagatgactttcatcactgtttctgatcacaattcacaaaaactacaggtaattatgcacatctagctaagccaaaacattgcatctgagctcaacacactctcagaaaacattacattagtttatgaggcaatcataaatatttataggtacacacctggagaaacagacattgatgaaattgctttagtggaagctttgaacttctccagtagatttcctgtcaaagaatcaacttggcataccatcccatcagaacctgctgtgtagacacatgaaccatttctagaaaatgatactgcactaacacccctgcataacaggaacattgagcttagtataataataacagagaaggagaaacttgaaaagacttaaaatggtttgagagctcacccaggatggcagtcactgactctccatttcagctggccagcagacacatcaagtgccaaaacatcaccactaccagtccctagaatcaacatagagcatccaagcttcctttttttctgcttaaaccatttacattattaacaacccgaatgcgcttattaaataaaaattagaacactagttctttctaagagtcaaatatgaacaaaaacaaacaaatgagaagaaagggaaaaacctttctttccaatgagagccatttcatgcatgtataatcaaccgaaagatgcccttttggtctttcgggttttgcaagcaagctactctcttcagaagccaccatatccgtaaactcagtctgaacctgacccttcactgtgtcccatatctataaaccccataaaccaaacatatcaaattctaaaacaactcaattcagctgcttcatatgaataaagaaacaaaatccgcataaaaactgataccttgattcgaccatcgcctgtactaatggcgaacaaatcctttgaaggactaaaggcagtcaaaaggtctctgatattggaggaccccattttcgaaattttatgactgccaaaaaaacttagcttagctagaatgcaagtccttcagcagcttagcttggctgatcaataagcagagcacaaccaggttaaggtagcgaatgaagaaggtggcaatggaagagacaaatacaaatagagaggcttatacctctagattttgtgttacgtctaaaaggcgcagttttcccaccttgcaattcagatcggactctttttattttcacataacttaagatgatgaatattttaaacgagtaaaaatatgcataataatgccaattctccactgaagaggttatatcctttcatcataaacaatgtcctaattcatgtatgcacttaagctcctcaagtataagcatggacaaattaaaatttctcttct

SEQ ID NO: 188906 - DNA, 3269 bp, Cannabis indica
gttgcagttaaaagatgtaacagatttcccacattggcattcatacaaccacattcccttttgatgaatgccccattttctcaataatgaacaccttgtttcccgcttttcgcacacctaacaaagattaccattccaagaaaacgcatccttgaattcgaaattgagacagtacaattagcattacttgaattctaaaactttggttggttggttacctcaattgtagcatgacttgaaaaagtgaaaggaaattcattcaacgaatcgatgtgcttcatatgctgttttaatctttcacattcttctttgtgctcgctccaatgcgaaatctgtaaacgaaaaactcctatgcttaacaaaaataattcttcaacacagaaatctgtcaaatgttattaacaaaattctaaataaatgcatgccaaatatggtagtaaggtattcatagcaaccaacttaagtagtcctcatcatggcacttgacaatggttaacaattaccctcaattcatgatagtaatagaggccatagtagcatgcccaatgaatcaaaaactccaatcatcatcatcatcatcttcttctagtctttacaggtttaatagctttatttcatcataattcattgtgggcatgactatggtttacagttaccctcaattcagcataagcagtaagtaattaacataatagtagtagagagtcatagtatcatgtccaaactaacaatatcaaatagtaaaatttgttaaatgctaataattttttttagagcattgcttttgaataccagtaatgtccaacactttttcaacacttttcagaagtagtatttaattacactaatagcgatatgacactaagaaggtgttaggcacttataatttcttttaacatttctctttacaaggcaccatattgtccagcatcgataaatgctaaagggcacccatagtatcaagtctcagataaagaattgctaactaattataaagtatcatcatagtattttcttttcttataattattattcaagtaaaacaaataaaatccgatattaaattacaccgatacaattgaatggcctttagcatttcaattttacaaaacactatttcactataattgatttgtgggcatcatggtatgaagtaattccaatacaatcaaactaataaagaaatctgagagaaaaactaagttgaaagttacttggtgagaggcagagcaataagcaacggctccgcagacaccgcatcgtcttctggctggacccaagcatcgattcgcgcgtcccttccacgcgcactccattttcagtaccacctctgatttctcctccgttcagctcagcagagcatcactcagtttaggcttcgcaaaatttggttatgggccttttaactaggcccaatgctcactgaaaatatgaggccttctttgagggagagaagaataccattttttctcttatacatatattaactaaatttacattcaaaaaaaatttaatttaaatatactttctttataaatattatactcaaattattttcatattctcacatacacaatttcaaacataataaattataaatatataagtttgtaaaaaaattaagaacaaaattttaattagagaagaataatgattatcataaaatgacaggataaaataattgaaaaaagaagtaaacatagtatatttttaaagaaaaaataaaaattaaaggcatcaattttaaaaaggtgttaaaagaggtatttagtgtaattttttcctttatttaacgtaactcgtggaaatttttattttttaatgttaaattatacatatgatgttgatatgacatttaactaagcagttgtgtcatcattttatttgtcatgtgtgataaaatttgatagaatgactaatttataataatgtgaatagttcatgaactaattataaaatactaaataaattcaggagcacagtaatacatataatttttttaacgtataacaacataaaattaaattaaaattaacgtataatacatatattttttaatgtataacaacataaaattaaaattaattcgattggatattagatttattggatttttagacaccccatccaatatccgatccgatccaattagatattaaaaaataaataattacactacatactaaaatttctaacttttttactttaatactgtggggcaaaatttttttcaaaaatattgtgtaagttttatgctgtgtactgtgttaaattttcattgttgttttgcggttgttttttagttgttccactgttatttttaattgttctgttttgtgttccactattgttttataaaaacacagtacttttaaaaaagtatccgtgtgacagtatttttgtaaactcaaattctagtatttttgtaagtttctcgttaaaaataacatccaatccacaatcacattaaacatctaatcttagtagtcggttgtcattagatttgattaatttatgtacactcctatatatatcatagtttagagatcaaaaatcttaaatagacaaaaatgtagggttgaaaatcatattagataaaaaaatgtggataagttgagcaattaattgatttatttggtattggctaatgggtttaaacagttggaatattatacataaacccttctcttctcttctctcccgtactgtactttctctactccttccatggctgtaggcgtggacaagcctcaagaagaagcttccattgcccgtttccacaaggtcgttctcagctgggactatttccgcctcatcaaagaatctaatgtaatctctctcttctcatttccattctcattttcgtcgtttttgatgtgtgtatatattataatactgaatcgagctctgatattggcgtgaatgacagaagagaaaggggaaattaaaggacggaagtattttgggattgaagaaagttaaggataggtatgatgatgttgatgattacatctctacatttgagcctcttattttcgaagaagtcaaagctcagatttgtcagaataaagacgacgatgaaggtacggtaatagtttcattgtgtaaatcattagtcttttctttttgctatctattcaatgttttgtttgaaatgttggaaattttgcataattacacatgaaatgtaaatagtaaatattgcattgtacttataatgtatgattattatggtcgcaaaatgtaaattatgatcgaggaaagactgc

SEQ ID NO: 188907 - DNA, 3013 bp, Cannabis indica
tacgatgataatcagaaattatttttcactatatacctgatttagtaccacaaaatcaacagttggtagactcttaaccatgtaattagggcatttagaagagatgtaccatgtgatgaagcgagaagtacctatggttctactaaaacatgcaaagaattcatatgtgagaaaaaaatattctcttaagaggacagagagcaagtatgaaaaaatttggaagcagttgaatcatggaaaccttagtgaaggaaaggatgtacgcctacaattgaggaattggaaaatgcagtaactccatatgtttctgctgaccagaatttcacccttgccaatctcgaggtctcccaagcctttgatcaatttgaattttttcaacatccagaaagtgacgtcgtcaggaaaatgatactttgcacgaatttcatcattaacagtttaatattcagccatgaagctcgggtctgttaaggatgaagcctttttggtaacagattttgattctccttttgtgttcttagaagccatgactagaaatagggatggaagaaaggactaggtaaaagcaaagggaaaaacagccgaaaagaagaattgggaaaggctgaagttgattagaaaggcaaaaaagctaagatatcggggaagttcctaaaattggtgagttatttttttattaaataccattagtttaaatttaaaattatgaaattagggtaaattgaaaaggccgagacaaactctcgtagtttgaaatgattaatgaattaaatttgtggggcttgaaaagataagtgtggaataattttaggtaactgatttcacaacatgtgagctcagacttaacagccaagagctcagaaattgtaaaatcgatgggcaattgtaagggataagaataatatgagaggtataaaagtaattttaccttaataaaagtattaaaattaataaagtgattggtaggaaaagtagaaacacgtcgttacacttaaaaaagaaggaaaaagcataagagcatagctgagttcggaatagcttggaggacggagctcgataagcatagtagaagaaaaggcgtgcaaggaaataggaaaatggagccacatggattaatccaagaagggaaagaagattgcacgacactaattcccgcctataaatagtagaccccaacattcaaaaagagtggattcttgaccacactagtctagccaaaactctaccgaattacatctttgaaaacatactcaaattcaagatcgttggtcaaagagaaaactaccatttatttaagaagaattgtgtaataaaatagagtggcaatttttattgggacaaatcctagtgtaaaaaatttaaagtgcaacattaattttgttgttgagctaactctcaaaatcaacacttatttaaaatttaagtggtgattttgctttttaattttcaatttaaaaggaaaaagattgaaaattaaagaaagtagggagaaaaagaacgaagggaaagttaataaataatgaataatttgtaaataatgttgagaattttacaatatagaattacaactagtacgtgctcaaaatacatagaataaattcgctattacaagcacaatactagaaagaaatcacaaatataatagtgattatagaagaagaagaagaagaagaaaaaactgataatgacaagacacattaagactacttctaagaaagaatcactcctgccctctaccaaaacatgtgactataggagctcacagaagcagaagcaagaagctaccacataatttcacatgtaaaacaactattgtgctaaagctctcacaaaacaagtcaagcatatggatatacaacacatattacaggcatgtttcacagtttagtaactctttaggtaaaggattgaactgctgaggaggttgtgaccaagcttgatagaagaccaacaattacagcactgttgtatgtgcttggctcagtctgcatggagttgtttctggaatcaataaatgtttcattgagaaatggtccaccaacaagtgctccaacagctacattagggttgggcctagttgattcaagccactggaaaccatcagtgcatccggtctttgcatcagcaggaatagaagcccctctgtggtgtacaaattgagagaacttgtctccgtagccaacaagaaagctcattttcataggattgtcgcccaggacataatcagcctagagaaaaatgaaatagatatggaaaagtaaggcacttcgaaacaaaaaggaatatgtttgtttgatagaaagtgaaagcaaacctgtgatctaacaaatttgcgaatagctgctggtgagaaagaacgtccattacaggatatttttgctgttctagaagtaagcatgtaattgctataaagagcagccaagaatgctgaagcaacgggatgctgtagagcattccattcactgacccatataagaccacctgattatgaagactaaggttaaaagcggaagcataaaatagttctaaactttagtgcaaggttaagtacgtaaagaacgaccagagaaagtatgcaaaaccatctagttggttagctagatattctaaagtagaattggagaaatcttgtacttctgggcatcttagctatttgaagcttccacaaaatagattggcacgttgcataagaatatgcatttgttattttacaaggagagtaaagcacaaaatttagccatgttatcctttcgacttcatgatgcatcctgtaatcaatgtgttgcatctgaatgccaccttcttacatatttatggccaactgtaatatatagctactagctaatttaattggcaagtcatttgcatgtttagcgggttatagcatacaaagagtagttgactttgttttcataattaacccagcataaataagtaaaaaaggtatcttactctttgttctgctttcagtggcagttggagagtgcggtaagagcccgcatataacagcctc

SEQ ID NO: 188908 - DNA, 987 bp, Cannabis indica
agagattttgtaagtcgagcaaaaataattaatggaataaatcatataagaaaagttaaatgcatgatgatatatatgtaagaatcttgtagaagagatatattttaatactcacacgtttattatcgccgcgacaaatattatttattttatcttcatttatttattttataatattattattattattttcttccaaacaaacgtaaaaataagtagattctatttatatatctatatcatttttttgttaggggtgatgatgtggtatattctatgaattttctttttaatttttttgtactctctatttttttacttttttgtttaatttttttggtcaataaataatatttttgtaagttattatataatttgagcataactgaggtgttgattacaagtaaaaaaaagagagagaataaattgacaatgtccttctaaagtttacgggtttttatgtaaaagtaattgagttctgctttaaatgatgaaatcattttaatttattattcagggtaagaatttggccaattttaaagcttggcaaaactcaaaaccacttaggaaggaaagaataccaataagatatcattaattatttataaataacattaagttaataaatagaaaaatgctaaaaagtggagtttagtaccaaagtcattgtaatattatttttagtagaattaaatattaaattttatataaacttaatatataatttatagctagagaatactttaagaactattgctacccaaaaacactgatttgaatataattagaacaaatataatcccgatagccacacaccatatgatatgatatgatcatctttaggaaaagcatatataaattggctactagaattaatgcaattgaattttttgttttacttttttttttcttagcaatatttgtttacttcttattacttgaattattgtctgaaaagttttcgatttttctatcttttatttactt

SEQ ID NO: 188909 - DNA, 1936 bp, Cannabis indica
taaataaataattaattattaaaatgcataccccatataagttgtagaagtaactaaaatatatctcaaattatataatatagaagtgatatactttttaaaaaagttacttattggtttattatcaacatcataaaaaaaccaaaatgttacttttgaaacgcaggaatcaggcatattattttgaaattaaggtattttttaatgacgtgacaagatattattgtaattagatttattaagttatttttgtaattattttatgtttgtatatttttgaaaaaaaccattaatattatgtatcgggccgggccaggccggtttgaaagtccataaagttgatacccaatccatgagcccagtcaggtaagtctattttcttttcttttctctttaaccctaaaacccttctcatagtataaatcaagtcgtcaccgccgcacactcttctccttttaagctaccacactttcctctgcgctagggtttctacatctgcctccgttctcccaaaatggtacttttcttcattctccgtgtctctttttgttttacttatccaactcaagatccttgtttgtgtaactgtgtttggtttctgatgtattttacaggctagaggattgaagaaacatttgaagaggctcaatgcccccaagcattggatgctcgacaagcttggtggtgctttcgtaagtcattatttttcttagaaattctcttttttgtattttcttatttattgctttgaatctatgagatgaagttttcatctttgtttttgtttaggctcccaaaccatcatctggaccacacaaatcgagggagtgcttgcccttgatcctcattctgaggaacagattgaagtatgccctcacataccgtgaagttcaatctattctgatgcagcgacatgtcatggttgatggcaaggtcaggactgataagacctacccatctggtttcatgggtatgtactaatacgaaatttaaaatattttttccttgttattttgtgcttttgtttttatgtaactatgattattatgagtgacctctttgttgtgctaaaatggctagttcgatttctgaatttgttagcctgttagggtattttgctgatctttaggttattttatatcttttcagatgttgtttccatcccaaaaaccaatgagaacttccgtcttctttacgacaccaagggtcggtttcgccttcactcagtcagggacgacgaggctaaggttagtttcaccaaattgtatgggttgcattagatatttactgttatgcagcgtacgttagtgttatcttacctttatactgtttgtgatatttaaggaatctttataaaattaggcagcctgcgtatgtaatatgtgattgagatttaaattcattatactaagccattttattgttccatatattaagcactattatacaattgagtatttatttttgtttcttggggtttatgaagtttatattgtgctgcattattgagtcattatacaattttctgttcgtatttgatgttggcattttaggactactattatgtgctcttatcagactgatttttttttatataattgcagttcaagctctgcaaggtgaggtcagttcagtttggacagaagggaatcccctaccttaacacctatgatggacgaaccatccgctaccctgaccctctaatcaaggctaatgacaccatcaagttggatttggaggccaacaagatcactgatttcattaagtttgatgtgggtaatgttgtcatggtgactggtggccgtaacagagggcgtgttggtgttattaagaaccgagaaaaacataagggtacctttgagaccatccacgttcaggatgctcttggccatgagtttgctacccgtcttggtaatgtgtttaccattggtaaggg

SEQ ID NO: 188910 - DNA, 2831 bp, Cannabis indica
gggtcgctctgatcctcgcaaagttcgcttcgctactaagatgggcttatcattatcaattggctcactgcttatcttttcagagagccccttaagagcgctggccaatactccatctgggcaatccttacagtcgtcgtcgttttcgaattcagcgtaggtattagctttcgtgattcatttttttttatctcaatcttcttttattattcaatgatgattttggtgattttcagatcatatttttatgcttatagatgttaagtccgttgggttgtttttctgtttttgtaataggggcaactcttagcaaaggatttaatcgtgctttgggaacattctcggctggagggcttgctttgggtattgcagaagtatctgttttagcagggagattcgaggaagttatcatagttatcagtattttcatagctggttagagatatatattagtacttttgttttctgttttggctatgttttggatcatttcttttggcttgtcctcattgtgttttttcttcaatgtttaggattttctgctagctatatcaaactgtacccaacaatgaaaacttacgaatatggatttcgtgtgttcttgttgacatactgtatcgtcttggtttctgggagtaaatcctttttccaaacggcattttatcggttactgcttattgcagtaggtgcttgtatatgtttggttgtaaatatatttatataccccatttggtcaggggaggatctacataagttggtggtcaaaaattttaaggaagttgctggttctttggaaggtatgtcattggtttgatgatgcacttgcactagccttctgatgctaatttagacactaaattgcttgtgttttctttttgtttttaactgtaaagtgatacaaagaactaagccattttagattctttgattaggttgtgtaaaaaggtatttggagtgtcttgaatatgagaggatcccttcaaaaattcttacataccaagcttctgatgatccattatacagcggctatagaactgctgttcagtcttcaagccgagaagaatctctggtatgcttgatgttgtgatggtgctttcgagctctgtagttctcttctttaaataaaagctataaaattttgagccttgtcattgttattttttgctttggcagttggactttgcaatatgggagccgccccatggcccttataagactttcaactatccatggtctagctatgtcaaagtcagtggtgcactaaggcattgtgcgttcatggtaatggcaatgcatggatgtatactctcagaaattcaggtaaactttctactgtagtctttacaatgatcttataggagatgtatgtacttaaggcaaaaatttagatggaaggtttcttctttgaaatatagaatctaatattggcacatcttacctcagttattagtattacgagacatttcaaagtaggattgaactgtcttccctgaagtaacttgccttattatttatctgtcattgattttggagctgataaactgggctatgatctaggaaaaagaaacattaaaatataatagatgatataagcatgttatgagaagaagtatattccctttacctataagttttcttatacaccttttaattcttatgaaaccacaactaagaaatatttgctcgcaagtatggcctttcatgtttcatggcaaacacaatagtgaactcgagttttgagataatgtccttttatttacatgtgtcattaagcttcttcaacaaaatgtgatcgaattatttgaagtatagccgaaacaaatctaaagcctttctcataactgcaacctactcctagaatacttaaattagatgaatcacaaaatgtcatattaaaatattctgtggtgcctctgttgatatgctcaatgtatatattcgagccatgttcaagtaaaattgacatcattcgcttgcttattcaaaattgagtgtggtcgggtatgatgaatggaatataaaaattatacttgtagaaagcaagtcaagattcgaaaaatacatttagtcgtcattacaaatttgtctgtgatgaatggaataaaaattatacttatgaatggatgtgtttctatttcctacattatgtattacctttccctgttagctgtactgtacctattatattggaaggtaatataaaatatgcatatctgtaggcaccagcagaaaagagacaagttttccgaagcgagcttcaaagagttggtactgctggagcaaaagtgttgcgtgagcttgggagcaaagtagaaaagatggagaaattaagtcccacagacatactttttgaagttcatgaagcagcagaaaagttacaaatgaagattgaccaaaactcgtacattcttgtcaattatgaaagctggcaaggagaaaaacggccaaaggacttccctgatcctgagagtttcatcgatcctagagagaatgaaaatgcaaatttggtgataacatctctcagtgaaacatgggacacccagaatcccatcatgggcattgatcgttccatctcagagatgtccacagataatgtgagaaaaaccaaaaatcatggccacagctttcattcaataccagtatcatgattaatgaacatgagtcaaaagtgtatgaaagtgccagttccttgtctttagcaacattttcttcacttctaattgagtttgttgcaagacttcaaaatcttgtggatgaatttgaagagcttagtgagaaagctaactttaaggatcccttgaaacaatcagatccaaaagaggtttactggg

SEQ ID NO: 188911 - DNA, 4389 bp, Cannabis indica
actcatttttaagtatatatataacccattaaaaaaacatcacctgcattttcattaatattattatgtccaagtgtctataaaaataaaaaataaccactttgttaggtatgatctagacacccacttgtaaaatagtttaaagaatcaagaaaataacttgttaacaaattgaactctttaaaaaatacaaaaaaccactacttgttcaccaattatttagaaaaataggaagaatgaggtgttaagcctcttgcagaagatgtcaaaatctgaaataaacaaggcaatataaaacaaataatttgtgttaactaagatatggtaaacatatattgacttttgacttgtcaaaaaaaacaaaaaaaaaaactagagccatgagactgagtttgagcttagccatgaagagtcatagactagtcaaaaaaaaaaaaccaaataaccccaaatagcattgaggtggagaagagttagctacatgctcaatttctcaaatccccttatggtgaagttgcggtttatctgttaaccatgaaaattgcggtttctttgaaacactattttgtgttgattaagagcgatcgagaacttgtttcaattggggtattgataactatatacttcaaattaacaaactatagcattgagaaccataataataagaattataaaatttgagtgatatacaatacagaagaggagtattacacttacaaatctccaacttgtatggtaatgaatcaagaatatccaaaattagaagaagccaaggttctctctttttcctttctttttctcacattttcgccgccaaacaaaaggggaaccaaggaaaatccgaactcctaaactacaccgacggcttataactgataaagcccgggtctttcaaggaactgtacatttttaatgaaaatgaaaatgaaagaaacctcaaatgatcatacccaattaccatcgttccaatcgcgttttggaaggaaggcaccgtgctcgctctacttcctgttagtctatagaaagctggtttgcttcgaattgttctcaagggtcctgacctgttcccatgtctaattgggagagatgtttcgtcaccaatcaaactcgaggttgaaaatggtctgttatccatttcttcaagttggcccgagctgtactccattgttatgaaggaagaagcttgcccgaaagttaatcgggggcttattgctcctgcattccaccagctactatcggaaactgcaagatcgcctttgaagtctgagtctggaacagaagactccttttgactacagcagtctccgcaagtctcatcagtgtcgttgtatatcaactttaaagcttgcacaacttcgcccataaatggtctgtgagtcacctcagggtgaacgcacatggaggcgatagctgccactttagctatgtcatcgaagtcacagcatccaactaaagtaggatccactaattgctccaaaccttccctgttagccaatagaggccgagcccaagtcactaaattctcctgtccctgaggttgggacatatcaacaggtttccgtcctgagagaagttccagcagcacaactccgtaactataaacatcgctcttgacaagtaggtgacctgtcattgcatattctggtgcaacatacctgaattttctcgaaagaatgcaaaacacgataagtaagaacatcgattctctttactaaaaagtggtaataaccgatatgtgtataattgttattacccgaaagttcccataactcgagtagaaatatgctgacttccttctgtggcttcccttgccaacccgaaatctgaaactttgggggtgaagtcatcttccaacaaaacattactagctttgaaatctcggtgaatgacacgagggtttgagtcttcatggagataagctaatcctcttgctgcaccaagggcaatcttcatccttgcatcccagtcaagaggcccctttgtcttgtcaatacctataaaaacaataataatgaccaaattatttgaatggctaccgaccctatttaatcaagcaattgcataaaacataaagagatgtatgtgttcaacaacaacataccatgcaagtgggactcaacactgccattaggaacaagttcatacaccaagcaacgtcttcgcccttcaatgcatatgccaacaagtttgacaaggttacgatgatgcaatcggcttagcatctcaacttccgcaataaattcacgatctccattttggttatcccttgtaagcaactttactgcagcttgagttccatcctccataagcccactgtaaacacgtccaaatcctccttctcctaaaattcgttttgaactgaacttctctgttgccttttcgatctcagaaagtgaaaatgttctaactgagaggatgctgggcgccatatttgacatcagggacaccgaagtggagcttgcaatactactcgacaaaattgaccctatacctgcattacacgctcatatcaataaggcaaaagaaaaactaatgatctcagatatacgctacttgggaagattatttcatttgaatccatttggaaagagaaactttaacatgtctcaactatacaactcccgagacttacctgatcttttatgaatggatgaggtaaaggcaggaccaacagcgttcgaaggttttctaacttttctccatttaataaacacagagattgctccaagtagaaccattaggagcacaaatgcagacaaagctataatggcaatggttcgaacattcattttctgattcttattcccaaaattggcggtaataggtagatttccaacactttcagctggaccgttaccagtgaaacctccatatggtggagaggaaggaatccctgataataacagttttcgttctcaaacaagataattatagcaatgtaatgaaccaatagagttaattagtcaatgtagttacctggataactaatgtacacgacatcataattaccaaaaagagtcatgtttaaaggcacttttttatgtcgaaatcgctgatatgttagtattgctgtggtattatcgaacttctctcctagtggaactaagttaatgtccactactgtcattccttgattttggctatcagcactagcacccattattttcacttgactttgctccaagtatgtgcctgcagcaacctcaatctctagctcattcattacgggaaaaacagcaaaaggagcaacatctagtagaagtctgactttcattggaaacacacatccacacggcgaaccaaagggggtggcagtaagtggctccacacagatttgaccacagcctgctataaaatcgatagcaatgatgagtaaattataggatacaaaaaaacttttgagtgtaacaaacaatagctaaacgaaaaaaggtttaatcttttttaaccatgcctcagtgtacttaaaaggtatggctacaaaactcaagcccaaaaattaccttggtcttttgacggagctggagcaacagcatgggcccttccatgatgtcgatgtcgatgatgaccaccatgcctaggggagatagaaccagtaggacctgatagaaaagacatcataatgtcaaacaacaatgttgccatctcatcttatttaagataataaaactaaattcaataaagaaagaaactacaacgaatgcaaatcgtgccttgataaattggagaaggtgcaggagcaatagaaggtgccaaagagtgtttgagcaactttgtcttggaaaactttgatgacccaaaagacaaactcatcaaaattgaccttgctgcagccagccaagagtgtaaaaatcataactttagtatagtttaatgcatttattgtaaactaaaccgagttttaagcaatgctcaacttaccatggtcaattgagaattcttttgatgataataatcggtgtgtaaattgaacaggagacaggtatatgtgcagtaaagaatgccctgacataataaacaactatgttaagtttgttctaagccaaattcattagaataaatacgattttcaccccgaactttgacagttataggttttgcctccttaattattgttcttttgtaaaaaattcccctcgaactatagaaataattgcaaatttgctccttaggttgaatctcattcaattatttccataattgggagacaaaaataccatatattaattcattattataagcagtagtactatggaaacgccattgatattcttatcagcttcaatcctatcttattatataaatttaaacattagattcaactgaaatccacttacttaaaaataccagctttaaaacaaaaaatagttcaagaatggtgtttttttt

SEQ ID NO: 188912 - DNA, 856 bp, Cannabis indica
atccccatttctgaataaaagaagcggcagccttggtataaaaggtacagcaatctaatacaaacatttaaaatggctggtgttgtacagtagtaccatatacttaccaaatccaacgcaaataattttgcggctaaaatagaaacatattaaaaatgcaaatctaatatcagcaacactatgtttgacaagcagatcacaaaattaatttcaaaattcaaggaacaaatgttgctattgtaatagagagagtaaggggcacaactgaaccaaataaaaaaattcataaaacggtccaaaagaggagccatataattataagatggctcaacaattcatgtacattccctcagcgagattttactatttacttacctaaataggactaataacagagaatcttaaaatttaaaccatcttcatgattggtaagtctgtatcaaacgaagtgactaacgagaccaattggaaagataatcatataatacatatatctacttgggcaaccaatagaaacaccatacttgcatgaagtcaccaaacacaacaagaaagatctttctctctttttcaaaagtttgtgctaattaaacacctaaactaaatggaaatatacagtggcaaaaccaaagctaaaagtcaacaagtaaataaaactcatccaaccacacaatcacatatccaaaaatttccactaaaacattggatcctagctacacactttgatggggagaatcacctgaaatggtagtgaccaagaccatgcttgacgccccacttgaattcgccaacataccggctcccatcctcacatgtatgaacaccacgccccactttattaatctcgttcattgct

SEQ ID NO: 188913 - DNA, 3070 bp, Cannabis indica
gtttttagattatttccatatttattcttaactatttggttatgcaattttatgttaattattatcttattaatgctcagccctgaaatttaattaatggatcatagaaaaaaaatatttttgggtccttatttaaaaaaatgacattttttaaaatcaatagaaaaattgaaaaggggaatttttttgggccactgaggtaggtgggccctaggtataggcttagtccgcctatgcctaaggtcgggcctcttaatgcttgatcaccattaataagtatagatattttaggtttttctaaaatcagacttagaattccatgacataggaaaactgtgagattgacactaattctatgagtttcatttaaagagaatcatatttgctttattattgcttaattgattaacattgaatagagatatcttattagttaacttgagagaggttaattgtttacattaggatttttaaaactacaaattatagaataaattgggataattgttaaactaggattcatagtttaaaataggaaaattaatgctctaagtctttactttctgaataaaattgatccatgtgggttcgacaatttttttaaaattaaaactttattataacaatattgcacgcttgcaataaaaattatatatcagtaaataatattgaaaagaatgtaattaatagtgacctaaattatataaactaatatttaagtgcagttgaactacattaaatttttcttttagtggtgtaaaactcaatattagtaaaacaataattttgttaccattgttttgttaattttgttaaatgttgatcgattagatttattgctccaaccaatcaatttgaaccaataaagagtaagcacgtgttcaaagaatcataatttaacaaaattgttattatataaattagcattgttattggatattagtggtgtccaacaatttctataagtgacgttttataattagttaacgatatttcctaaaaattattgtttaaagttatatatatatatatatatataagatccaatatttaattacaccaataacagtataacaccgaaaagagtactaataatgcattttaatatttctctttacaaatattggtattaaaataatacctcaaaaaaaattaggtatataattacaataaagtgtaaacattaggtatttattatcccacaaatttccaatttagaacctgctagaagtgctatctgatcatatggtgtactcaatgtatatgggacccttatgtagggaagtgagtggtctttattgaaaaaagataagtccatgtttttggcatgaaaatccatatgtatgttgttcaaagcatgcaatttcttttgtctaaatccattttaattattaaagaggaaagaaaattaaaagaaactaaggtagccaagtaaccagctttatgaaaaagtagaaataaagaagaaaataggttaaaagattgatgatatcctactttgtgataatgttgggggtggggtggtgatcacttagtgctttgtggggctcttggtgttggtgttattattatgagacattatcttgattaaatatgttttatgtcacactttacataactatattaaaaaatatactttgaaaatttcttatattagggtatattatatgtattatatatcatttttgttggtaggcatatttttatttttttagcatttacaaaaattataatttaaattttttatatggttgtgtacattttgtagttatggtagtcgtatcacctatttttaaaaaatttataataatttatagctgtgtatacgtatttttttaatatatatacacataggtaattttattttagaattatacataaataatttatatatttttttagaagaacagaagaatacatattataactataatgtagattgtcatatattcggttataaattcttcaaatgccgaaaagggtagatggaaatctaattggaatctttgtagttgtgtgaatattgtttgttatgttatatgcatggtttattctcatgtttgtttgtgacaatatatagtgatagtggaatagagtatatatctaaataattgataatgtcttgttgggaagccaatgtccaaaaaggtctagacatacatatgtaagaagtattctttgttataatgaaaggccaaatgggtcaaatatattctttgagagtcccatttgtatgatgctccctagctaactcttagtgtttttttgtgaaaaattcataaaaaaaaatacgagaaaagtagtatgaggtaaccatatatttttaatttattgtttaaatttcgagataactttttttaacaaaaaataataaaaaattatttaaatacggtatatgcaaaatatttaatattttcatagtttttagatatatttatataaaatacggtttttttatgtatttttatgttgtactcttgttattttatgattgaatttttgttatttatatattattttttatattgttttgttgttgttttgatttattttcttattatttttatgtgttttttttttttttttataaataccgtaaaattattaaaaagaaaactttaaatgtaaaaatgtaaaatttttataaaaatttgtattttatataattatcccttaaatttccctataaaatatttttttccaaaagaaattatatccttgtaaacatctgccaaaaaaaccttaagaatgaaaatcccctttattttagggatgtaccgtttaaaaatgaattagaataacttaaattggacatagtgaaccgttacacatggaggaaaatatcaatattttacaacatgcacggttatattcaaaaaagatagtggcggcaaaactacctctaaatgattggggatacttaattacataaattaattttttggtggtaaaactcattaaacctcacttatgttagctatttactcattccgttcaaaatactattttaagtgccaaggtggaatgtcttagtgtacacaagtgaacacatgtcaaaattttagtggtc

SEQ ID NO: 188914 - DNA, 9807 bp, Cannabis indica
attattcttcactcttcactcttggacaactattggaatgataccaacgggcaccttgccaaataccactataaaatgatattttataattgtttaataatttattaaattaaaataaatgaaacttaataataaattgcactaattataatattatatctcacaaaagtctagatactaatggtacattttaacatttctcaatgtttaaaggcactactgaagcctagtacatatcgttattggtgtaattaagtatcgtcttctatatgctattaggcaccagtggtgcctagcaccttctcgacatgtcgcattgtgattgactagcgatactccttaaaagctattatatgaaattatatgagacccgatacttaattggaccaatagcgatattgacacataggagagtattaagcaccactggtactttttagcatttctctttaatataatatcttttaaagaatattgctaaccaatcatgtcattactaaaaaagtaatggccaccgctcccccacaagttgaatcaaagcattggtatattggtaccgtactagttttgtcccacattggtgatttgtgagtaattttccaaatttatatcctccaactcttgcagatctctgtgttgttcatttctccatggacttgttcttcttcttcatctcaatcttcctattcacaacaacaaccacagcctccatatcagtccactctatcaccccaaacttcacagcctcaaacaccaaattcatcaactactcaggggacttcttagtctccaaaaacgggtcattcaaagccaccataaccaactcaaaatcacctcctctccacactcaccattaccacctctccgtcgtccacgtcaccacctcaaccgtggtctggacagcaaacagagacaaccccatctctcaatcctcactcctctcactaaccaccaaaggcctctcaatcaccaaccattcaacttcaacagtcatatggtcaacacccaaattcaccaccaccaatgtctcagctctccaacttctcgaaactggaaacctcgtattactcgaccaccaaaacaccaccctttggcagagcttcgattacccaactgacacaatcctcgtcggccagcgcttacgtgtcggtcaaacactcgtcagttccaagtctcctgatgatgtgtcaacaggtgagtatggattaacggttaataacagtacagacttggtgttgaaatggaagaatacgacgacgtattggaaggtttctgctgtggagttgaatcaaactggtttgtttgactttgatcatataatgcttggtgattcggagggttttaggatgatgaaattgggtgatgatgggagattgagtatagttagatttataggtaacaacaaaaacagctctgttgaagagtactctgctccatttcaacactgtcaagttcctatggtttgtggaaaattaggcctttgtagtggtcgtggcgcaaccggtaactgtggttgttcatctggtttttacagcaaagctcatcccattggatcagattgtgtccccaacaatgcatctctttctttacctcttccttgtaaaaccaaaaatggcaacaacaacaacaacaacaacaacaacaactctgttttgtatgtgagtctaggtaatgatacagactatttcgccaatgattttatggacccttttcggagaaatgtcactcaatctgtttgtcaagatctgtgctcaactaactgttcttgtttagctattttccatgaagcttcttctggttcttgttatttgattgagaatgaaataggctcactcatcaggtctggccctgctagtacttctcagaacaatcgtttgggatatgttaagactttcgttgtggcaacatcaacatcgtcttcttcttccgttgttagtagtggtagcaatggtaatagttttccaatagctggttttgtactcatacccttttcgggtttggttcttgtattagctgcagtgctcttaacaactctttggttgagaagaaaagggaggagttttggatttggaattgggaactcgaaagtcacaagattagagcgtttaaactcttcttcatggagtgaagagtcagaggaagacatatcaatccctggtttaccagtgaggtttgattatgaggagttggaagttgccactgacaatttcaaaactcaaattgggagtggaggatttgggacagtttacaaaggtatacttgctgataaaaccgttgtggcagttaagaagatgactagtttgggtgtgcaaggaaagaaagagttcttcacagaagtttccatcatagcaaacattcaccatgtcaatcttgttgggttgaaaggtttttgtgttgaaggaagcaagcgttttctggtgtttgagttcatgaacaaagggtcattggaccgagctcttttcggtgatgctgggcctgttttggaatggggtgagagatttgacatagctcttggaacagccagaggacttgcttacttacacaatggctgcaaccacaagatcatacactgtgatgtgaagccagagaacattttgctgcatgtgaattcacaagtgaagatatctgatttcggtttgtcaaagctactgaatcctgaacagtctagtctcttcactaccatgagaggtacaaggggttatttagcccctgaatggctaacaaacactgcaattacagacaaagttgatgtgtatggttatggaatggtgttacttgaaatagttagaggaaagaagaactacttaacatcattgtcatcatcatgttcagagcgttattttcctttggtggcactagaaatgcatgagcagagaaggtacttggagttggttgatccgaggttggaagggcgagttgtttcgagtgaggaagtggagaagctgatcaagataggactgtgttgcgtgcaggaggaccctgcgttgaggccgagcatggggtgtgtggttgggatgttggaagggacagtagccttggctgagcctagagttcagtcattgaattttttgcgttattatgggcaaagaatgagtgagacttgttcttgttcttcttcagttgaaacacagaacaagagtgagttggggttgttgaataagcatcattataagaatagtgttagtagttacatttctgctgaagagttgtctggtcccaggtgatgcattccatatgtatacatatataatacataggtagaagatagatatgatatcattgactcacatgagatgagattgttgtttttctttgtttttatgcactttgttctgtacactattgtattcagttctttaattaatatagttataagataaataagggtattccatattgccatttctactttgtaaataataaaatttttgggactatgaatgaatgagttatcttgattaatatcataaatatccagagtgacagtgtgcaagaattactatgagaaagatcaaaattatgttttcaaatgtttattgtaatctattgatatatgaatagggagatggcattggcagcctctcagaaaatgaaatgaatcaaacttctattttttattccatatcaaataatagttgcacaattatatgtttagtctttcacactattaataagttcttacactattttgctatatatctcttcatgttctgttccaatactatccttatgttcttcaaccaaatttttagaaaaatatgctattttttttaggacacctgaattttgatatatattaaatcatattttttaaattttttagattgttaaaaatttctcttaaactattgaaattattggatttaaaaactttaatctaatttaattcaattttattaatgtaacaattgtctatatattaaattgtgcccttaaattttaatatttttcaattaagcttcctagattttaacatgtactaaattgtgttctcgaaattttcatttaagttagactttctttaataaaattagacaaaatcattaaatctaaccatctcaatagttcgaaaagaatttttaataacttgaaaagtttaaaaaacacaatttaatatatgtcaaagtttaagaataaaaatttaaattaaccttgtttaaatataatatagaatatattggacaaatagattaattattcataaacatacttcaaaaaaacattttatattaccctctttgataatataatatgaaaaacacacacgtataatcttcttccaaatgaaaatatgaggactaaaatttgaatttgatataattttttttttttctttgaatgccatggaaaattaatccaatttaatatccaaaggaaaaaagttgatattttttttattgttttgaattatataaacgtaattaatattaatatggtatacttgaaataaataaatagtggattaatatgagagagggacattatagtaatgacatgagcaacacacaaatacacaatctcagcttctgtatttgtgtggctatggaattgaatgagaaatgagctttgcattctcctcagcttcaccgccgattatggccgccgacctctcttcccactcgcttcttctatccaacactcttcaacctttccacaaccacaaccatactacacacactccaacttcaactccctgcttctctccacttcaattttccaaactcttcttatcccattcccactctcactcctccgcactttctccacgtttcccactctcttgccgcgctaccggaaccggaacccagtctcctccggcctccgccgccgatatccaagtcgccgtcgaaatcggaaaggatcgtctttcaaaggttctttctttctttatatctatgtactaatttcagttgagagccaatttgttgagttggtgataatataatatggtgattgtgttttttcaggttccgatttctcgtatcagaaatttctgtatcattgcgcatattgatcatgggaagtctaccttggcagacaagctcctccagatgactggtactgtacagaagcgtgaaatgaaggagcagtttcttgataacatggatttggagagagagagaggcatcactatcaaacttcaggtttcttttcctcttttctaaatttaatcattttggaacttattactcatttcattactaagctaagctcatttctttatgttaggctgctcgtatgcgttacatgtttaaaaatgagccatattgtctcaatttaattgatactcctggtcatgtggatttctcctatgaggtacatacattagtatatatgctcttagttagtcagtagtgtagtaccatcaaattcaatgttcttagttagtattgctgttttgtttattggaaaggtatctcgatctctggctgcatgtgagggtgccctccttgttgttgatgcttctcaggtactttaactacatctttcttttggattgattcttcattagttttgttatatcgtcttatcttatgagtgttttactttttcttacttaagggagttgaggctcaaactctggctaatgtttatttggcgttggaaaacaatcttgaaatcattcctgtaagtttgtttcatttttaataaaagagaagattgttcgaaaatagtaattaaatcccatttgtaataaagaaataaattcatggagagtgtataaatctcttaattgcaggttctaaacaagatagatctcccaggtgctgaaccagagaatgtcatcagggaaattgaagaggttgctcagatatattatatgttttgcttgtgttatatgttgttttttgttggtcaaatattaactgactctttctgtttctttcttagattgttggtttagattgtagcaatgcaatttattgctccgcaaaggttggttctttgttgcttatccactaaaggaaactactacatgcagttatctatgtctttctgagagaatgcaatttattaaaggttggttctttaatataagtctgtgccttggtggtgtaaaaaatgtaggagggaataggtatcactgaaatattagatgcaattgtggagaggattcccccacctcaagatactgctgataggccactgagggctttaatatttgataggtagaaattttgtaacgtgctgttattattattttttatatggattaggaagacaagctttcagtgtgctcatttctatttctctgtgcccattccttaatttgttttatattatagtatagtgtgctgagatttgaatttatcgcaattgtcgttaaatttggaattggcttttataatttgaagatgtattttctttggatcttatgcagttactacgatccatatagaggtgtgattgtatattttcgagttattgacgggacaataaagaagggcgatagaatttacttatggccagtaacaaggttaatatgttttctataaactttctctttccttcattgtctacattttattttgtttaattgtgttcagaaagaagcaggctttaggatatttttctaatgtgttctcttagaatgcaggactattatgctgatgaaattggagtgctatcacccaatcagttacaagttgaagaattgtatgctggtgaggtaatgttctgaaaatttgtatatttatttataaggtttttattttaattaaccatatgcacatccttgtataaacaagcgcacatggaatcatgcaaacactttgtcccctatatacactgcattgggttgaaaataggagcttggtttgaaactttggatataagtttttcaatatttttactttgtactagtcaagtgtttttcttcactttgctttggtgctttacattacacaggttggctatatttctgcttctataagatcagtagccgatgcacgggtaggggacactatcactcatcattttagaaaggcagaaagctcattacctggatacgaggaagctacaccaatggtgttttgtggcttgtttcctgttgatgcagaccagtactactattctcttggttgttaaatgttgaattgatatttatagatgggtttttgtgatctctaatacctttcgtttcaatccaacctctgtaccttactggcaggttccctgaattacgcgatgcacttgagaaactccaacttaacgatgctgctctgaaggtttgtattgtattttatgttttatggactatacatgtatacatttgacagcttgcaatgaaatgattggtttccctttgccatgcattttttttcccttgcagtttgaacctgagagctcaagtgccatgggtttcggctttagatgtggattcttgggtcttcttcacatggaaattgttcaggtcttctttgtatttatcatttgttctgttatgaaaaatgtcagtttggtgggtatattcttacaagtaagcattttactttacaggaaaggcttgagagagagtacaatctgaaccttataactactgctcctagtgttgtatacagagtgaactgtgtagatggttccgtagtaattttctcaaccctgaattctttcattttagtttcaagaaataaagaaacagaaataaaagaaaactctctcaatgtatctgggaatttatgtcagtgtttatgtcattgatctgctctatctgaatttctaatagatggaatgctcaaatccatctatacttcctgaacctggaaaaaggaagtcaattgaagagcctgttgtgaaggtcagatttcttcttgcttgatctaatcgtttgataattctagataaacataaacattctgttttattcgttatgctgagaataaaagttgttttgtttctcctttgtttgttttcccagtgttatgcttggtaaacttaataaattaactgggacatttatatgtacagattgagatgcttacgccgaaggattatattggtccgctcatggagttggctcaagatagaagggcagagtttaaagaaatgaaatatattactgagaatagagcatcacttatctatgaattacctctagcagaggttttttccttttcctttttaccacctctgcagtccacttggcttgctctactaatttgtaaactcaatgaactgcttctccactcctttatttctttcattcacagatggtaggtgacttctttgaccagttgaaatccaaaagcaaaggttacgcaagcatggagtatacctttatcgggtaaattcagcttcttgatacttctataactacaaacaaaattgatgctgaagccaaatatgttaataatatgttatcacttacccaacatctaggtaactaacatcagcttaagagaaagctcaacgtacaaaactacattcgattattaggagcacttacctacatgttaaaggaattagccttactaaaatgtttgtctgaattttctcattttttatatctgatgagccatttgaacctaaaatcaacaacgaccacttttttaaactagaaaccgaatatctaaacattgatttgctccttcatactttgttaggtatagtataggcttagccagcaccataattttaatgacttgtatattgctttttcttcaaagctaatacaaatgtgggagaaaatatttttgagtagatgcttaataagtctatatactgactttaggtacaaagaaagtgatctgataaaacttgacattcagatcaatagtgaacgcgtagagccgttggcgactattgtgcacagggataaggtaatcttgcgctatttttgaatcttggtgaccgtcaaatttttagctcagatcattttaaagagactaaagaaatattttggcacatttttgatatgtaatattttgttaacaaaatcaatgctattgactgttggtaggcatatagcgttggaagggctttgacacaaaagctcaaggagcttataccgcgacaaatgtttagagtaccaattcaagtacgactcattttatgtatttagtgataataattagggcgagtaaagaagatgtgtcatgtgtagtaatgtgtatggtggcattgacaggcttgcataggtacaaaagtgatagctagtgaagctttatcagcaatcaggaaggatgttttagccaaatgttacggtaagacattattaaatcttttctttttttagttttgaaaaacaatcccagaaatgagctgatattttgataatctcttcttgtttgtttatgtatatgtataatataggtggagacatttcaagaaaaaagaagttgcttaaaaaacaggtgaatttgtgattatgtagttgtgtatatagtagtaaataataaagagagcgttttgattcatatataaatatatatgtgtatatatttaacaggctgaaggaaagaagagaatgaaggcaattggtaaagtggatgttccacaagaagctttcatggcagtcttgaaacttgaaaaggaagtattgtgattctcattctctttactttgttgatatataatatcaatttttgtagcaatatttttcattaactaacaaacaaagaatagtgtattacacatatttatcaatgcaaaattcataacaaacttgtgtttgtgtatacataaagtaatctctgggaaaactcacataaataaaaagtggaaattgggggaagttaggttcgttcaattttcagctaaatttcaactgagtttcaaattcaaagctttttcattttttaaaaagaa

SEQ ID NO: 188915 - DNA, 1952 bp, Cannabis indica
ttatcttcacactcacatgattaagatataatttctaacataataaatttctattctttgtagttagatgtgtaagtttatgggaaagtttaagcaaaatttcgattagagatgaatgaaaattatcgtaaagtgatagggataaaattagtagaatgattaataaaaaaaaaaaaaagtaaatataatagattttgaaatagatgttaaaaattaaagacatcaaattaaaagaggtatgtagcttaattttctaaaaaaaaaaaaattgtctttgttgtagtgtttaggtatatgacatatgtttaatttttaataaaggaaaatcttacttgtatgtgaaaaccaagtggtggatgaatatagagatcttcaatttttggccaggttgattccaggacacatacgaggcccattaccaaatccaagaaagctataaggtctcaatggactctgcatatcatttattattatttattaattacttaattttcttaatatatatttgtattataattaataataataataattataagagcttacatcaaatcttgaaggatcaaacttttctaggatttggaaaaactttctcgtcatggtggattgaaacaacatccaagttcactgaccaacctttctttattttgtatcctagaaaaaaattaaacttataattaaaaaaaaactaataatatatgtgtagaaattaattaattcaattaataccatctatttcaaaatcttgagctgcttttcttgaataccaaggtagaattgtggctcttcgaagagtttcactaattacctaaaataaaataaaatatctcaatatggtataaaacaaatatttggaacaattaatgtcatttttgtaaattaattaaaaacttatatagtactttagcagtgtaaggcatgttgttgacttcagcccaagtgagacttgtgccactctctctctttgcttttatttctaagtgttcctcctaattaataataaagaaaaaacaaaacacattaataatttatttattaattaattgttgaaaattgttgatgtaattattatatgtactctgagttgttccaaaacgagtggattttgtccaaggaatttgatgagccaagtaagagcagcagtagtggtatcatggccagcaacaagaagagttagtatgttgtctttgagttgtttatcagtgagtttattattattattatcatcttcttcatcaacttctaatttgctgtgttttataagcaatgattccaagaaatcttcttgaaatgatccctctccatttctcctctttaaaattattgagtctaacattgcatacattctatccctagcctgaaaaaaaaaaaaaaaaattaattgcatgcaaaaatataatatattttttttgaaagaaatatataaattcattaagaaagatcagttacagaagtaaattatttcaaacttttaaaaattgttaagatatgaagaaaacaatattaaatggctaattgattttttaacatgtattaaatcatgcctctaaatttttctggccgttaaaaattcttcataaactattaagattgttagatttaaagacttttgtctaattttattcaattttactatttcaatgatagtttatgtactaaatcatgctccccaaactttgatatctactaaatcatgtctctcgaactttgacatgtattaataaatcatgtcccctgaacttgtatcaatgttagactttttttttactaaaattggacaaaagttcttaaattcatcgatctcaatagttcagaagcatttttaacgaccttaaaagttcagaaacataatttggtacatgttaaagttcgaaggacaaaaatcttaattaatcatattaaattataatttctgaaaaacagcaacaaaaacaaaagtgatatctgtaata

SEQ ID NO: 188916 - DNA, 3148 bp, Cannabis indica
ttttttacaccatttttaggcaatatacacaaatttcattattagagttatgattgtagcttattggaatcatgcttagtgtaacttttgcacctctacagtttcattattgtactactaactaacaagtattgttttggggtgatttgatgacattgaagaggaatgaagttctaatatgggtcgatgagttcacactggactagctatagttgtggatttgaggaggcaaagtagacttgttatacgtgatttattagaagaattttatttttataatgttaatatatgattatttgaagtgcatctttgagtggtgtcatattgaaagagttttcatattttaaattataatattaatatatgaggccgattgtttgcctttgcttgtagtaatattacttaaatttgtactcaaggctaataatttaatcgattgggacaataaacagtttcaattggataccctgcatgtaattattgcgttgcgcaaacgtcgagacacaagtgcccataccaagccaaaaccacatcaacaaaaactctgcattagattagattagtagtagtacgtacatgtgacatttgaacaagcaaccggattcaatggacttttctggggtttgataaacattttattttattttattctttctcaaatattaaatttatataatttcttttcttttttaggtcaaataactcaaactcaataatgaagaatcacattaattcaaactcaagacttaataaggcctgtatcgcagcaaaaaataaacacacaaatggcaggcacacaactagctcaccaaagtttgaggctaaacaccgccgtaccaatcagtgtttggcgacggagctccgccgcccctaattactggggtttcccagtttacaagagtttggaaaacaaaaggctaggagtcctcaactcctccaagttgaccgttggatcattagtgacggtgccaaaatcaacgttcaacgtggagggattagtggattttttgtacgaggatctgggccacgtgtttgatgatcaagggattgatcgaagggtctacgatgaaggcataagattcgaggatccaatcaccaagttcgaatctcttaatgcgtatctgtttaacataagtctcttgaagactgtttttaggcctcaattccagttacacttcgtcaaacaggtttaagtgtactgttttaaatcattcgtatttttcttatttctacgatggactatcttgaaaataaaaataaggaaaacaaataatggaaatcagctggttctaatttgacaaggaaaatggaaaaataacatagctctaatttgataattggaacggtggcaattattagtcttaatatttgtatttctcaaaaaagaaaaaaagtcttattattgtaatatggcaatcgaatatataatctacttccaatctaactttttaatctacatactgtaattattagacatttaacgttaactcactgaactgaattgtttgaattgaatcttaagcagcctatagtacaatacgttatttagaatttgtaatgagaaacgtaaaatttgatcttggcatttgtgactgattgagaggttaattaattatatatatagacaggtccttttgaaataactacaaggtggactgtggttatggagtacatgatttcaccgtggaaaccagaaatggtcatcacaggaacctcaaccatggggataaacccaaagactgggaagttctgtacccatgtggtaacatcttatgcctcattatcaaaaaacctatacactgaaatctgaaacgtatcttaactaattcataatactacctttaatttgtttgtaggatacgtgggactcaataagggacaataattttttctctttggaaggcctttggcatgtaatgaagcaggtacgtacctatgttaaaagctcatttggttggttatacgtcaaaactatgtgataagagctgattttctgttttcttatgcagatgtcgactttcaaaactaaggatattcttggaaaacccaaatatcagatattgaaaagaatggcaaattatgaggtctcattgattaactttttatatacatataagcgtacaatacaaataggttaggtggtgttgttttgggtctgtagttggaagttttaactaaatatgctcttacatgggctaattgcttctgcaggtgagaaagtatgtcccctcgttagcagtaaatggaacagagtaagtattaaacaacaaatttaaggaattcttaccttatgtatcatgagcttgttctcaacaaatttaatgaattttatctctagtacatattttcttaataccagttttcaaaagttacactgatacacattttttatgatagtttaacggatactcatcaattaacaaatggtttgagagtaacgaaaggaggcattgccgcagctataaagttcagtggaaaagctaccaaagatattgttcaagaaaagttggaaactctcttttcaaaacttgtcttagatggcctcagaccaaagaccgggtgtttattactatctccttcaacagattccggttcttggaattttgcaacggtatgttgtgaaaaggtttgccaattcttttttaactatggtactctccctaaataattgagcttcaatgatctctttattgaacaaaacttaatcaactacttccatataaaatgctaacgatgttttgtttttctttggggggggattgattgcaattgaaggagaatgaattgcttatatggctagaagatttttcaatggactagcttcgatcttctctcattccctacatgatacatccatgttgaacattttcctttcacaccttaaaatatacattccccaatttgcgaagataacttggagtgatgtttcttcatttatacgttatatcaaaacttggtcgtatataaaacgagtcaataatgatggtgatggataactgtacaaataataattcaatcaataaatctttgttttttattttttccttaattgagtgtacatattttttggtaaagtttacatgccccattatagacataaacttctacaaaagaaacaaaataggaagttaattaaaaaaaaaaaaaa

SEQ ID NO: 188917 - DNA, 5124 bp, Cannabis indica
ttatttgaaactcagagtcgatattcggactgatacacagctaccagccggcttttacctaagcatcgacagagaccgccgtgagtggattcagttcaaatactgtaagttatctactttctgctttaactgtgggtatcttgatcatactgaaagaaattgttctaaaccgaaggcgtatgcttatccccccattggcaaagctgtccctctatacgggccgtggctgaaggccactgtccctataagggactgttttgatactcggagaccagctctatatgctaacgacgaagttcagccggcggccctacaaaacaaagggctgaacgctgggcctacggtggggaatattcaggggagaaggatcgatgacgtggcaccctctggtttgggagacgttatgcatagtactgaaggtactagtggtgtggcggccactacaaaagttggtcagaatggtactgtggggacccttgaaatttcgaatgtgacagctggacctgatccctctatcaaagttgctaataaagcccaaagaaaaaccccttgctctggcccaatccaccctatggttgagttgggtgaaaactctaaggatgccaatatcattatgagcctaatgcccaatgtaggcccaactgcctcccaaatgattgatatcccacaacatgaactatgcaagtccagaacccctcatcaccatcctgagcccatcattattcaaaacccaaacagtccggcccaaagttctaaatcccctcccaaatggttccatacggacagagccttggagtccactggaggaaagaagaggaaagctggggggaatgttgctccggttctattgcagactgaaggaaaggccccttcccatgatacccgccctgttaatgaagagatcacgagcaatctaatcttcgctgtgggaagtcacgagagccctggaaccgggaaaggggatctttgactaaacccaagcatggatcgtctaaatcgaaccagagaaacaagaagaaggttcgtatggaatcgggtaaaaatctctctctaccttctaatgctgaaaacgaaatctctactcttgataatatggttattgaaatcaagctcgatcaaaattttcaagtgggcgaggaggcggcccttatcaagcccccccactccccatgaggtccttatcttggaattgccggggtctggggagatctacggcgatacaagcccttgcggcttgggtgagaaggtttaaagtggattgtgtatttttaatggaaactaaggtggggtatgatcaaatggttaaagttggtagagatcttaatttccaatatggtgaatatatagctgctgatggtctggctgggggtttttgtttgctttggaacctttctgctggaattaagcatgtcaagccttgttctatgggatttgaatgctctgtttttgatgattcaaagaactcctcttggaagatgtatgcgatatatgggcctccttatgaagaattgaaggtggaattttgggagagtgtggccaggaatctaaatggcttagactgtgcgtggtcattaattggggatcttaacctcattcacaaaaaagaagataaatcggggggaagaccttttgctcctcgtgatgggcggattttaaattctttcctgtttgatgttggtggggtggatatagggtatttgggctgcaaatttacttggcgtaataagagagatagtgggggtttgattagggaacgtctggacagagttatctctaatccggattggctgtctctgtttcccttggggcgggttcgcaatctccccatggttgcttctgatcatggcccgcttctttttgagcctactccctttaattccagaggttcttgtcccttccgcttcttcgaagcctggttcagtgataactctagcttccaagtaattaaaaacgcttggatgaaccctgcttcagagaattgtgatttaactctcagttctaaactgcagagtactcgaaaagctttacaagtttggaaaaaggaagtttttggtgattgcgacacaaaactgaagactcttgaaaccaaacttctagccatccagtctaatgatattgacaaagatgtgccgggggaagaaagacggctggaaatggaaattcttgaactcataaaacgtaaggaaagcatgttgaagcagagatctagagagctttggctttctaaaggggatcgtaattcttcgttcttccatgctgctcttgtggtaagacggagaaggaatcatattcactccttgctcgacgagaatggtagaacgagagtctctgaaaaggataagggtgttattttgaataattttttctctaatttgttcacggcaggggatgtctctgttccccgtgacctggacgggctaatctcccattctatctctttacaggaaaattgtatgttgatggccattcctgatatggaggaaattaaaagtcatgtatttcaaatgcatccgctgaaagcgcctggtcctgatgggttttcgggatgtttctaccgccgctgttgggatacggttggagatgatgttgttaatttcgttcaggaggtttttcgcagtggtgtgctaagtggaaacataaaccacacttttctctgtctgatccccaaaggagagaacccaaagactgtggacaggtttcgccccattgcgctatgcaactttgtgtacaagataatcagtcgaatcattactcagaggcttaagggagtgatggataggcttgtttctcccaaccaatccgccttcatccctggaagatggattgccgaagcttcaattctaacccaagaaatagttcaaacgatcaagaagaaaacgggtaaaggaggtcttatggccataaagattgatatgttgaaagcttatgatcgcatggaatgggttttcttgagaagagtattagaagccttcggtttctgcgatgcctttgtgaacctggttatgcagtgtgtctccacggtctcctattctgtccttttgaatggcaaaccactcaagaagattattcccggtagggggctccggcaaggtgaccccatgtcaccctatttgttcttgttatgtaatgacatcttgtccagaattctggatagagcccaagatagaggagatctccatggaatcaaaatctcaaaaaatgcccctgccatctcacatctcatgttcgcagatgacactcttctctttgccagagcgaacacgatggaagcgagtattattggtaagtgtctgaagcagtttgaggagtggtcaggccaactttgtagtaagcaaaagtcgggaattctttactctcgaaactgtgttaaatcgctaagggataatattgaagctaaggtgggaattagcacgatcaatgaagcggaaaaatacctgggcaatccatttgttttctcgaggcagaaaaagaaggattttgattttttacgctccaaacttgtgcaacggttggaaggatggaagatgcggactctttcctttgctgggaggatggttgcgatttcctccgttgcctcaactattccttcttacaccatgtccacctaccaacttccgttgtcttcttgtcgggatttggatgctatcatcaggaaattttggtggaatggccgcctcgataaacaacggtttttagccactatctcttgggatgccttgtgtcggccgaaatgcacagggggtttgggattcagaagaatggaggatataaacaatgcctttttggccaaactagcttggaacttggcgtcgggattaagaagaccctggactgaatcctataaagctaaatactttcccagggattctttttggtctattcagcaaagaaattcggactcctttgtgtggaaaggaatccttaatgcgagacagttaattctctcggggtcctgtactatcattgcttcgggggagtcaattgatgtttggtttcaaccttggatcccctggttgacgtactctgaatttcgtgatttgatggagggaattcgtgcaaaggccccagcttcgatcagttgctgacctcctctttcgaagaacaaagcagtggaattctaactatttgtgctacctatttggagttgttgggaacaaagatcagtaccattcaaattgctactgaccttaatgaagaccttcttatatggaagcaatcaaataatgggaacttctctgttaaacaagcatatttgctgaaccagggcgggagatttggcgcaattgatcctctgtggaagtggatatggcatggggaactgcatccgagaatgcgaatgactctctggagagccttgtcaggtgctcttcccttgggaggtaaggctggtattccctctaacaactgttgtttctgtccaaacctgaagaaaatactctgcatttatttgtgaaatgttcttttgctgctggtttatggttcggttcccctgtccctctctgcacaaacgctgtccactcagattccttgaaatcctttgtcatcgagatgggatcgaaccttgattgtgctcaaagaaccagattccttctctgcttggcagtaattattgacaccatttggaacaaaagaaacgccctttggcacaatgtcgatgagcaggctgtaaacatcggggaaagtttggattctatccacagaaaattctgggaactttcccagatagatgagcatggagatacgatgagtatggctccagcctcccccccttcggaattgcagaatttgcccacgggaaatcgtcttatcttcgttgatggatcctttaaggagggaaaaattggagctggaattttagcttgggaccgagcaaccatggattggttttttgaagctaaagtttcggatggtatgtctgaggttgcggccgaagtcttcgcctggttttcagctttccagtgggcaaaaaagaataactgggacgactttgcgttgatatccgattcctcaattgtcctcaaagctttctctaatgacatatcccccagctggaagtgtctctcttggtttgctgctgccataaaacttaaacacagttttacgaatgtttccttttttcatttc

SEQ ID NO: 188918 - DNA, 4447 bp, Cannabis indica
tcatttttcacgtgtgaaaatcacgtgtcgatttctgagtagatggcagtccaaagccattattcaccgacagctggacagtgggcacacaatctatagtttattaacacgtgcttaattaccggactaaccagtcattcttaccggacctatcggtagctttacgcacctgctcataataacctatttttttattatttttttattatcaaaatgtggagaaaaacaaaataaataaataacggtcaatatcttataaataactactctctcttctctacagagaaaaaatctctctctgcttttttgtgttgttgtaagctttttccttcaatcaaaagttttgtgggttttgtggccaagagggtttgatttagtttagtaggcagtgaagtaattaaaattttcttttaattttttggcttatttgagctgagtttcacttgggattttgcttaattttttttttctgggtagatggagatggagagagatttcatgggattgagctcaaaagattcaatttttatggcgaaggaggaagttgccaatgatgggtccaaagactcaggttttttttttctttaaattatatttttttaaatattattaatgttatttcatagctctgtcatttcaatactatctattccatgctttgaattatggtaaaattttgctttttttttttgtgttctaagtattgggtttgaaagagagaaaagaaaagggggaaatggatttgtaattaaaaaagaaaactttgttctgttaaaagcttttagcatatagatatagttattaattcatattatctataacatgattgggttttgtttatttatggttacttaagtgtacatccaactgagagtacttgttggttttgttttaatgttattttaaggttatttcaagggtttaggtgctcaatggcctttttcaaacaaggtttctgctctgcctcatttgatgtcttttaaggttggtcaagatgataaggttagaaaaactatggcagactccatgtcttctggatttggtactctcccaacaacaatagatgcatttgaccaaaaccagagaagaactatgcttgaatttcaggtttctatttatccttttgtttattataatagtagaatcgaaattcagatgtattagatgctaagctcattaactataattcagtaaagaattttttattaactcatattttaatgggatattttaatatggatctacaattttttttttaatatttttatgaaatttagcttttttccttttacaaatatagagatagttatttttctgttattttcagattgcaacatgtaaaaagtagaagaaaatttgtaaatatgttaaaaaaaatgcgattttaagtactttgagtagaaatttctatttaacaaaacccgaacacataggtttgttgattctgttgttgttgccttttctcttatcgattttcgggttttactatgcagaaatctttcaatcaagataggcaaggtggctctcctcaatttcccttcacaacataccctttgcaacatgatatgtattctatgcaccgttctcatgatgtgaagatgttttcggttccaaaccaagcaacttcagtttctttaggaaatccttacttaaaggatcatttcgctgttgctgctactgctgctaatgtcaagcaaccgttgctgggaggaatccccgtggcgacggctcagcattacattctcccaactacatgttcaatagctggtatcactgaacaaccatggtaatttgacttgattgattctttcttttatttcaagcaaaaagaatttacagttatgtaatctgttaaagattcatacttttgtaggaataatgttaaggctgctgttgggtcttctgctcaattgacaatattttatgggggttcagttaatgtctatgaagatatctcccctgagaaggtttctcacatacaccaaacatagcttttattcaattaccaaaactctgtatgttcatttgagtcatgtaatgaaaaattgtgttggttaaacaggcacaggcaattatgttcttagctgggagtagttcgtgtttgtcttctaatgcttcgaatctgaaagctcaaattgtgtcaccaagctcaaagttgggagcttttgatggtctccctctcccaatgaatcagccgaatatgaatacaccgaacgctgcgctttcaaggtcgttgtcggtctcttctcatacaggtatcccatcagggagtggttcatcaagtaatgatgaattgatgtctgttaaagcagttgtgagcaaagtagaccctcctaagataatgaatgcaactagatcagttggtgcaactgctattatgccttctggtatgctttttatgttcaaattgggattttctatgtttgatctatacaagtattacactaagaaaatatcattcttatgcagccattccacaagctcgcaaagcatctttggctcggtttttggaaaagcgcaaggaaaggtcagtattcaaagaagatatctttgttctctttattcatagcaaagagagattaaaagggattagagagagtcagggtcggttctagacagaggcagaaggcccatccaatctcagggccgagtcaattaactttaagacttgtttgatcattgcaggatgttgaatgcaattccatacaacttctgcaagaactcttctgaatgcactgcaaccgaatccaatggtgcgaatttttcgacgagtacggctatagagtcttttcattagcaagggaaattagctgtgacctatgatgcaatattattagacaaagaaaccataagttgatgcaaattttatgtagcatgtgaaaatatgtaaacaagtggtttttattattattatttttggtcaaaaaaactgttttatctttgacaattttagatgttaaagtactttaacattcatatatgtaactggtttgtaattttcccacctatgtttttagtagggattattgctttccttctctataacattattggttactaccctatgtataaccaatatttgtatccttttttgttttgtaatatggaaataattaccataaaaaaatattgttatgtgctatattaagaaaccctttttgcatttttctcttgttcaaaggaaacttttgataagtcaaatgaatccccttttagattccaataagtgaagaagagaatgtataagtacactatattttctttcttattgagatctaaatttggttactttcccaagttaatgaaacaaaagtttgttattttcatttttcatatctaatttgggatgttggggtcaaactttaaagagtttattactaaacaaagacacccaaaattagaattaactagtgtgttgtgttttgtttaataaatgaaattgattattttaagtggttttacatcttattggttactagttatgagtgtggtcctatatatatatatatattatatattaaaagaaagatatccacttggtgttggtggtgtgatgaggaaaatttttggttgaagatataattgagatgagaaccaaaatgagttcttacatcactatctgcatttatatctcaatgcaaactttcttttacaagccatctattgatttagcaataaaagcctcttataagaaacttgatagtcttcatcacaaattttaaagtatttcacttcatattataaataaagactagagttaaaataatatataatttttaacacaacacgattaaataatgtgtcacaaaatgtatatttgtttgtaaatatataattttgtgatacaacacatttaacacgatatatataagaagaatctacaatgcgatacactcttcccgcaatagtgtggcacagtacaaaataatgatcgcacgctatgttcgcagaaaatactaacataaactgagcttccaactaccatatggatatatctaaattaaattatatatttttaaaatcatgattaaattaaaattgtcgcttcaatatgtcagttagcagtatattagacaagttggatttattccatcatctcttcacttttcaccctcttttcacatcatctttgctcaactttcttgctgttcttctattctttctttttcatcgtcccttcttcactgatttcagacgcaattattttttttttgtttattgataggagttttggtttaaatctaaaactaaaaaattaaaatgtgattgtttttttaaattacacagcctattcgattcggtataaatacctaaacttctatgaatattgaatagaatcaaaatttgattggttttaaattacctagtttctcggatttggcattaatgtttgaatttctatgaatattgaataaaatcaaaatcaaattagtttttgaattttaag

SEQ ID NO: 188919 - DNA, 4617 bp, Cannabis indica
aggagttttggagatttgtataggattattggatgatgataatgagaagattagaagaaatgcttctaatttgattcaggttcttagtgggaactactccatgaggtgaaagcaaaggaattaatagctgtggtagattctatttgaatattgaagttggatgcattttgattttgcagggttggttttgtgcccagtggaggtgagtttggtttttgttttatgattttgttacctttgttgtagttatttttttttaaaatttttgtacaaaaaagaaaaagattagattttgatttggataggttcttttatgttgtacattctaaataaatattgcgaaaattgggctagctgtttgttcttaactattttaattgttgaacaacatgacttaaatggcaatctggctggcgcaattcattgagatttctcgcacatattgtttctcaattctagtattagcagttttcataatttatttttgcagctattgcttgattttgaataatattaactatgagatgatcactagcttgaataagaagactttattggactgtttgacttatggatcaattttgacaaggtcaatacagtatttgaggttagaaaataaggtatttgcttctttctatctccgtaaattatacatgactataaggataatgtatctgttatattagaaactttattgaataactaatgtctgagatatacttgattcagtcatagtggacattggaagtttaataatgataagttagaattcttctttctggatagtcaatttagttacctgggtatggccataagatcacttaatcagttggtgagcaatttttaagccaacgtggatgttgctattctgattcaataacaattggcatcaacatctctgtactatgttatgaaatttggattgctcaatctacaaactaagaatattgtatcttagtagaaattcttaaaggttgcatacaccttgatgcccataaggtagacgccaataaatttggattgttcttgatgtctattttttttcatgtctttttgttcgtcctttcttgtttgtgtgctttctgattctgtatataaatataggatatattatgaaattcaacaaatccattttatcttaagcagtaatttaacctcctgaaaaggagagggaagaaggggaaaataatttcatgatgatgggtaaactgcttctctcttgtaatgctcaccttcttgattcattcgcttgcttgattcctaatctgatgtggttctttgttactattcagctttttttttcggtttatcatatttgttttgttttgtgcttgaatttcaacatgcatataaactatttaacaaactctgatacttggaagattgcacaccacagatttaccatttcgtatatttcaagcaatttacttaacaagaaattgtcctacttttctatgccacatttggcattgtataataagccataaatgagcattgagcttaactgttgtgtttattgtttttagctcaattattcaagtaggtggggctttctgtctgaagagaatgagatacttgatcagtgttggtttgatatgaatatgtttctcattctggtcaagttgtaagatggtggtttggcttggttggctgaaacttgtttttaaggatgttttgattctaatgctgcggaaaagaagcattgatggcattttcaataattttgcaaaggacgaacctgccaaaatcgtcttgtctttatctattctcttcctaattaaaggcccctagtacttccataagctgattgcttctctcctaggcttatccctttccagtttccaccaacctattattttcattttcttttttctttttttccattgtagttttttctttgctgacttgttaaaaggacaagttgatatatgatattccaatcgaaagaaaaattgggtttagaattataagactttggagtgaaccctttttgtcttttgacaaaagaccaatatcacgttgtcgaatctcatatgttaccccaacaaagaagaaaattttaaaaagagagccaataatatgaagaatttcaacgtccgcttccacttatccattgcaccatccaatggtggtattgtttggtgaactttccagtaaaccccacagcccctaaaaattatcattgccttttgagaattcattaacgatggacgtgaaatgggtatggcagttcaaatttcataatgggctttatagagatagtctatgaaatggcccattgagctataactgagaactggtgttagacctcactgtaaatttttgttagcgttggtatgtaatggcctacattcatacaagtctttagtgtcactggctacttatcatttgtaaatgttgagaatcaagccaactcagcgttgatcgtcagcgagacaagtaagcccaaatgctctacggtcttaacaatgccctgctaggaatccaatggtgatgctctaaaagatttgggaattatggtgtaatgatttgggaattatggttagaatattctccttgtaatttgtgtattgtatgacagttgtattgagtctaacaactacttttctcattgagtaaatttttttttataaatgattgagttcaacttcttagcaaaatgaggtgagaattatttttcatcatttcctttcttattcttcattatatcttggtattagagccaaacaaagcctaagctcatgactactccttgaaatgaccttgctgccactggttcccaaacaacaagctctcctgcaaattgctttgttgttacgggcaatgtcaataaccgcaataacaatcaatctcaactcaaaattccttacaataatatttcagcatacttaaccaaccattatcgctctcaagttagaccgcaataattacaccttgtgaaaaataatggtttcaaccgttgttagaactcatagacttgatggttttcttaatggtacacaattatgtcttgatgaattcattactgcaggtgatgctactggagaaactagacctgaattaatcctgaatttgagcactagactggtcatgagttggttatacagctccatgactgaattcattgtcactgaagtcaaaaacaacagatggactatgtcaagcccttgaaagattgtatggtgaaatttcatactcccaagccaagatggatgatcttatagaacacagatataatgagaaaaagatcttcaataatggcaaagtacttgaggcaaaagaaaaattggttacacattctagctctagttggtgacccttatctagaagcacatctagttgcaaatgtgctctctggtcttgatacaaaatatgttcccattgtggttagattgaggcaagacccaaaatcacttgtcaagaacttcaagacattttgctaagctttgatagcaaaatagagaagtttcaaactctcaccaacactgacaaagtattgggttcagttgttacgccacaagtaaacatggcaagcaaaactcccacatcaagtggtcgaggtagaggttcttacaacaactctcactcttcaaacaatagagatggcagattcaactcaaaccgtggtgaatttgcaggtagaggaagaggtcaaagaaatttcaatggtgattcctgttaaaagagttttagttctctttaacttcaccatcaataacatgatgtgatcataatataaagtaatgtatcaatctttttcattagaaatttcaatggggattcctgttaagagtttgccctacaacgttacaaaattttattttagccaatgattctattaaaggactaattggaattaatgtatcaatctttttcattagaaatgaatttcaagagtttgctaattctaggtgatcaatgtcactatttttttgatctcattattccttattttagcaaaatacaaacttctgataattaaaaaatggtttttttatttttgacttttataaatttatcaacaaataattaaattagtatgggctcatcaacaatgtttcacaacttgaaactactaaaaatctcttgtgggctgttttcattccccaggcctgttctctcttattttctctcgtatcaataatgtctcatcgagatattcgagtatatttgctagtcttgctctatacaatgacaatttaataataaaatgataaaaattaatttaattctcctaaaattggctataggttgaacaaatctagagtatcatgcattaatcattatgttatgagattttagctatcatagactacgtcttattattatatatataagtataataagtaacttctcttttctggcctatggatctaaacgacttagaatactaatattattctatggtttatgttactaaccagtactgagtcagtgaccactactatagtctatatctatatatgaatgaaatcgtaataacaattaatggtagtcaaagcaagtttatatgtattaacaattataaaatacacatatatgaagtgtcatgaagtggtagctaggtaggtctattcgtggagagtagagtagtggggacagggttggttctagtgc

SEQ ID NO: 188920 - DNA, 1772 bp, Cannabis indica
aaaaagtcaacaatattgagatgctgcctatgctaatatttcctgaattgttaggcgatggaatatacaatcttatgccttttagtaatgatcgaccaagaacagattggacactggaaatggaccagtatttcattgagcttatgttggatcaagtaggaagaggcaataaggttggtaatgcattcaataaactagcatggacagatatgattgggtcatttaatgcaaaatttggcccccaacatggcaaaagggttttaaggcatcgacacaaaaaattgtggaagtactatactgacataaaaattcttttacaacaagagggattttcttgggatgaaacacaacaaatggtagctgctgatgataatgtttgggatgcttacaccaaggtattaatggtttttatattctccttccaactctgtttgtttattgagctccaatttgttataactaattgatgtaaaactgatgcagacatacccacattcacgtacatatagaacaaagaccttaccaaacttttatgatttgatccttatctttggtgatgaaatcgaccatgggttgaacaattgttctcaacagagaaaagccttgaagatgataaagtacgagtaaaggaaggtgacgttcagttttctgtcacctagtgacggtaactctgttccaactttttgtttgatagatatgtaaaagctttgaagtttagttcatgaattcctgccagaatcttgtgaaaagtttgttttgattaataattagtaactgcttatagaaacagacataatattagaaaaacatgggaaatcttaattcctaatgtgatgtacaataaaccatgtaattgagcatctcttgactaggtaaaacatgtcaggtcgtttatgtcttcgtggagtatagaatcctacaaagttatgagcatgattttatttttacaattgtacattcatgagatttgtcatgatctagttattactatgttagagtttatcaacaaatttccagatatatcgttatgtctgtaggtgaaggaaagggtaaccaagcctcctgtgtgggtgatcgtacaagaacatattggacaccaccaatggaccggtatcttattgatttgttgctagaccaggtacatagaggaaacaaactggggcaaacattcataagccaagcttggatagatatggccacatctttcaatgctcaatttaaatctttccatgacaaagaagttctgaagaacagatacaaacatttgaagaggcaatataatgacattaaaatacttatcaaacacaatggattttcttgggatgaatcacgggaaatgatattagcagaagatcacatctgggatgcctatataaaggtaatttcttgtgttattgactatgagatatttagttatgctgaaacctctgttttatgcatgcagagccatcctgatgctcgatgctatagagtcaaaacaataccaggtttccacaagttgtgtgttatatttggagaagaacattccgatggaagatacagccgcttggcacgtgatgctgacccattttgtgaattacccatgttgatgactagtaagttcgtataggtatttttaacttgatattagtgcttttcttggtggtttacggagaaacaaatttacgcatcaatcacgaggttaagataattcatgatagtgaactcaagaggggtagttcgaatgactagacatgtggttcgctctctctaagtttgtggttcgagtccct

SEQ ID NO: 188921 - DNA, 3756 bp, Cannabis indica
gcaccaccatgctgaatttctagtggcaacgaattgtacttcaagctccggcccgtatcgccaaaactcattggcaagacgcaccaatgaaaaattaccagctttgattttatggtccctattctgtaattcaacagattggaaaagttacctagaagcttcaatttctcaacagggtcaccattcaccctgtgtttcatgtgtcgcagcactgccgagccatttgtgatagccattcttcaccaactcttcttccacagctcgagtcagatttggagcttcaggtgctatcatgagctgtcttacagcagcgtcccaaggcttcagacccatctacaatggaagtcctcatcaaatggaaatcgctacccgaattcgaagctacttggaagacttccacaccatcattgaacagttgcctactttccaccttgaggacaaggtgaaggtttttggaggtattgataagcctccaatacgttttgtatataaacttcccaagtagacacagtactatgttattttttttttttttttttttgttattcttttttggctatttcattcttttatctagcaggcagttttatttagtttgtcgctgacttgtcttgatcaaataggatcctagatgggattatgccaataaatagaagttggggctctttttgtaagggtatcttgaattagataagagtgaactatcgtggagagaccaatcctcttgaaagattggaataggagagacaagcttctcgagtgcgtatattgtttccagcaatttaataaagatttcttggagggatttcagcaattgtttttgcaaggttgagaatttgattctaactaagaaaaaaatcattttgtcgacttagatacacttttataagctatttctttctaggaaagaaagaaactcaatataaaaaattgttcaagactaaaaggcaatagaaaagcatgaccagatacaattaatatagttctcaccgtaattccttttgaagcattggaattagtttgtaaagcctcctcatgtgtaagcagtggaacctgctcaggactgctgccatcttccttagaggggccttttataggtagatttgcttcgtcaatgtcaaaggaaccctcaggagggggtgccaacatgctgaatacatatgtatataagataattgcaccaacctaaaatcacatgaacaaagaaaatgcatcagtacataaagaaacacatgtgacttattacacatacaataaggataataatcaatgagcccttgtaaccaagtcaataaaacccacccactggccaaatgaaatatatgcagtcccagacgtactacatgtgtttgaatcaccaaaaggattggacttgtccctacataaagctgcaattaaaacaagtggcacatttccaatgttccctgcatacattttaaggtaaattccaagttaaaccagcgcacacaagcacaaagtagcaaaatgacagtttataatgatactacttgcttctctaaagaccaaattcatacttctctgattaaaagaattttaaaatgaagaatgcaaactcaagcttgtggcatgaaaaatcataagcatcttaccaattccaatttgtacaacagtaagcttaaagaaagggtatggtggacgaacaatggtggctacaatataacctattattgagcctgatattgaacccagaacaacatttgctgggataaaccacctacacaaagataaatgctaatcaatgactgactagtcacacatttctattattatttattaaatatatatttatatattcttaccactccagcattttctgcaaagttacggcttgcccaagttgagaaaatattaaacacggcagcaaaagtgaaaaaaccaactgcaaccaaaacaacagtcagtaactgaactaactaattacaaattaaagagaaatagagaaatctacaaaacaaatgtattcaagtaactacaaaaaaagctttcttatctcagaagttcaataactcagcaacaaaattaggtttcttaaagatttattttggatggcatttgcaaaccataagaaaaattagcacaagaaatatttatatgccaaatgacaagacaatcatggtttgctttggaaaacaatcttttgtactatgtcattgctacccttatgggcttccgtgtgtaactcaaagattcatttcagcaagttcctctcaaaattacatcaatatagaagaatagtattcttgcttattcgatacttgtacatgaattatataaccaaaactgataaaggagagggaattgcacagcaaaattacgcttaccccattaagaagtttcctcccattggctggcaaaatgttgacatacttggatgccattagaaaacccaagaagcatactgtgaaaactttagcaattggtaaaactgcaatcttgatggaatcgactaaagactctcctcccacttggccatccatcattgctgacagaatcctttccacacccattttctcccaaatcttattttacatccaccaagaaatggatgtgttcactcaatttcttggaattctttctctcccagaaatggagccaggaatcccaagaccaaaatatttttattatatctgatttgtttatggagctatatttccaaatggaaagctttttctgttagaggaattctcccctaaaatcagcagaataacaatcaatagaaagaaagaaaaaaaaaatagtaatccaaacaaaacacgaatcaaagttgttatgattttatctgcatgaaacaaacgaacccaaagagcatagaaaaaacagagagagattagaaagcgaaacaatatcgagagagaaaaggaaaaaaaaaaggagatgcagacagacctggaaaatgaaattgagaaatctctgcaagtgttagatcggtactggtatggtagatagaataaaatatagaaaaatatgtgtggagagaataaaggaacaataattgagatttagagaaggaacaataaaacaagagagtgttgaggtacaaccagttagaagtggttctctttgacagtacttgaatttaaatactacaacacaacacaacacaacacaaccaacctacctggacctgggttccgtcggttaaacttgttattccactaataatactatatcaacctgacattcaacatctaatttattattttagtttttaccctccaaattcgcgaaccccaatcatccaaattccatattgaatgaccccactttctgtacataatgacgaaaactgacatgttacatggactcttcctctttccgtacctacgaaatttccctcggatttcgttcccatgccatttttttttttggattcttttgtaactatagaaaaaaaaataagagtttgctttcatattaaataaataaataaataaataataccaaacgattaaaatattagaaaccaaaggaaaaattataaataaagataataaaattttagctaattaagatttgtgcttcttaaactttactatgtactaaatcatgccctttaaatttttctggccattaaaaatcgtctcagaactattgagatggttagatttaaggacttttgtctaatttcattcaattttactatttcaataattgtttatatactaaatcatgctctttagattttgatgtctatcaaattatgtccctcgaactttgacatgtactaaatcatgt

SEQ ID NO: 188922 - DNA, 764 bp, Cannabis indica
tttttatttattttgtatttttttcttattttaatgtaaataaaggtcctatttttatttttttttcccatgaccctaaaagagattgggccgatcctaattaagttaagaaagccttaataagctggatcaaaagaagaagttagattgatattcaacttgaggcaaatagtttggcaaccattgaagcgttacaaagctctatttttatgcctttttattttggtttgtgtacaagattgtagcttactgttaggggatttaagttgaaatttgtttcgtgaaatattctgtaaataaagttacacgttttattatttctattcaatttacatttttaatgagaacaatgttcggttgatttattttttttattgtaatggttgaaacaagttaattaataaagtttttattccctttttcttaagaaaaagaatatttatatatttatattacatacgtgtggtggatccatgagtttctattgttacaatcagacacgcatataagcaattaataataattacattaataaattaatttttatgtctagtccatataattgtaataattgtagcatcaacatttatatattatattagaggcaacttatatatatatgtgcatgcacgttttgtaatttgttgttctttttgtatttttatttaggctaattatagtaaaatcatggttttaagaaaaattacttacagtattcaaatataattttacaatcaaaataactaaattaaacataagaatat

SEQ ID NO: 188923 - DNA, 1849 bp, Cannabis indica
actcaaatttttctaattttatctattcatactaatatccattaagagtacactcaaagagtccccttgcagatgcttttggaataaacatttagggttgagtgaaataataaaaaatggttctttatccttttattttaattaaaatttggctaaaaaactaaagagtctcttatagatgcttttggaataaacattatttagggtgcgttaatttgtaaaagttttgcttctaaattttctatactagaaaataaaatatacaatttttgttttgatttgttatttaaaaaaaaatgggttcggttaaaatttttattttttaattttaaaacgaacaataaaaataaaatgtgttttgtaactaatacttctatttttagttttttattcaaatgatgagagagagaaaaaatgaagtgaatattgatgagaaagattacaaaaaagattataattaccatttttccaattatattttctcgaaaaaatttttacttttctaattaaaaaaataaatattaatggttcaccttttattttcttttgttgttaattattataggcaacggagctcaaatgtggcagtgtagtggttgtaaccctatatgaccatcgctatgctgatggctactcaggcagcatgttcatagtatcgtgggctgaattcacacgatctaaacctcttatgatctataatcgcccctcatttcgccgatctttgctcattcctcgccgccttggttgcattgacacctctgtccaagatatgtatgtagacacaactatcactagtagtactcctaataacaaaaaccctacttcaccaactacactactcaacaatgatcataaccctaacataagtactataagtagtcgcttgtaccatattaaagctgaacatatcaaacaactacaaatccaagcttccttaaacaacaacaacataactaagattgagtcttttggtgctttcttgtggaagatgattgcgaaatattctctagcgaataataataagtatgtcaacaacaacaagttatgtagaatggggttttttattgacggacgaaaattgttagctcaagatgatgcattgaagttctactttggaaatgttttatcaattccgtgttgggccaagaaaacttatgatctaaacgacgagccacttaatcaagtggctcgagaaatccacgagagtctgagaggaatttcgaggaaggaacatttcttgggcattctagattgggtcgaggcacttcgacgtctaaagtcaagaggaacatttagaatatcaacttttgaaatggaggatggaccaaattttatattgtcatctggcctaagacttgagtttgaaaaggttgattttgggtggggtaaacctattttgtcttcaaatcatatgccaagtggatttcaagagatatcaaaaggtggctatgtgatgcccttgttgatcccaaatggaagtggtgattgggtggtgtacatgcacttacatacatcgctgcttgattttatagagaatgaagcttccaattttcttacacccttaacttttgaacacctaggaaaaataaataatacaaatctaaagagtaaaataataaaaagaaaagttatttgaataataaatatatatatttatcatgcatacaaatattaaaaataaatatcttataagacatatatttgtacacccttggtgttttgtactttaataataataataataataataataataatatcttatatatatttgtggctatatatagcacattagtatttttttttgttctatatattttactaaaattttactacatgttgtaagtac

SEQ ID NO: 188924 - DNA, 5780 bp, Cannabis indica
aactaagtaattacaattattctacaactaacaaaaggaaataaaaaatgtagtatattgaaattgtatgatatgttgatgctatacaaagtttttcaaaggataccaaatcacaattttgtgtgttcttcattgcaggacaaagatggccaagcaacaatacttgcattaaaacctatctgcaagggagaagaggtaaaagaaaaaacacctataacaatgctgtgttattttagtcaaagtccatctttatagggtcttgttctgttttatgattcaatatgtttaattttgaaagtcctttccttttccagattaccatctcatatgtagatgaagatctgacgcttgaagagaggcaggcatcacttgcagactatggtttcagatgtacgtgccccaaatgtttcgcagaagaaacttaagctaacattcagtgatctacattcttgatagatgcctatacagtacaaagagttagattatgaatcctcaaaagggttctcttggtactagttcaattgttcaagagaagtggcgagttgtagtttagaatgttcccttcatagaatcataattgcttactttataatttttacttttgttttgatcattggtatttggtgagaaaatgactagcgtaaaaggcccagggtgagtggttatggaaagaaatcttgaaccctgtatttttatcaccaccaatcaagtttccccttcataaggtatatatataaatatatatatatatatatttatttatttatatattttaaaatggaaccttcataaaggatttgacaagggaaaatagtaagatcgacaatatgaacgcaaacatcaatccagactacactgaaacttgtcgaaaaaaaacaaaagatttagttaacttgctgtttaaaaacccatatttcctgtacactgctcggcaaagaacctttgacctttctaaattaaaaactgttgtcatctcaaaatctagtgtcaaaaaatatcaacatgctccatctcctcgacaccatccacgtctatgtcctcatcgttaccctcatactgtaaaagcatcaataattgaattagaatgattcatagctacactggggaaaattctaatgacatagaagccagaaacaagtctcgtttggtaagaaagaggttttcatggaaggaaacgaaagtgtgcaactgctgacctgcgagtaattgttttttaggatcagaggaggtaggggaagtgcaagtggcaagccatctatctcatatgcatccacaacccttatagaatcagtcccagttgcttcaacattaaaatccaattcaatgtcgacatcttcatcaattgcatgggcagccatgctggttgatggttgcgaaaatcctgattccaatgtctttttctgctgcagatttaattaccacaagagtaaaatgcaaagattggtaaagaaacaataactaacagcttaacctcagcacaatagcaacagtattaatctcattctgggaatcagcaagagttaaaaatgcataactgagtttactcagcatatttaaatatatcaaatgtgcgatcaaggagagcatgtatccaacccataccataaattacaaagttctaaagttaaagagcatcctgaagactttgcatcagactatgctggaaggtaaaacagctcccatattggaaaataagacagccatcttttcatactgcaagaacaagttcacaacaaagaacaaaagatgcaccttatctgctgacccaagattgacaaaattattgttctcatgttttccttcttttgagatgggtcttggtctgccattcccagtagccacagcctgaatctccttgtcattatttgattgagcaggaatattccaccgagaagctctcttcactgtggctgtcacataagtatgcagattttctaaatcggctggtgtgtaccaagtgtaacaggttgaaaaccatcttaaaaaataacacttgcaataatggcagatttaagcgaatgtggaatgtaacatgagaaaatcacatataagcatgcagctagaacatcattgattgaagagtagcaaattatgagctaagaactgaaaaatctatttcttatgttacagtgaattgacttcaccagatagcaaatgaaattagtaaattaaacttttgcatatacttcagaatcatgcaagcaaatttccagtagctgattaattagaaaccggataaaagagaaatctgaagaaacttaatggttgacaaaattaagtaaaataccatattgttctgtgggaccccaaccaccatccagccttctgttgcttggagaaacattattctgttgctcactctgtgggttgacagggaaaccagctacctctccatcactcacaatattaatgtttgaatcctcttcattggcaccaattttgttgatatcggagccaagctcatccgccaacttatgaagccgagtttctgatctatatctcgaaatttttattaaatccggaaaccaatatgccattatgttcataactcaagactgaaaattttccttggagcacaaatggtagataactacgacaacaaaataataacttataataatgacttacctcttcagtctatctcgtatctgtatacaatgatcatgtgccttgacaaacttgttgatttttgacaagatcctgcacattacaatagcttaggaaagggaaggaagacagctagccatcaatggggggaaattgcaccaaatttcaaattccacgtaggtttgttataccttctattttcctctttttctctgtgtagctgagcctcaagctcgtgaattttagatgtaagactttccacttcttgaaccctctcttctactataacctgtgaacaacagaagtattagtggtcagcaaatatataccaaattaaaattgaacactcctaaggaggaaaggattgcagattcagacacatttattttggggtttaaagacagagattgaccagagaataacataaagtagagattgtaaacagctaaagtagcgagaacatgagaaagtcaggagtaaattttactaagtttatgatgagtaatagctataggtaataataccttagtgaaactaatcagcatccccactaataatttcaattaaagaccacaaattatttcatttcaaaataaattacaacattcaactttaaaaagctgaaacagacccccagttgagatttttggtgatcaagcctgttgatatcttcctgcacttgctttagctgcaaacaaaccccagaaaccacacaaatatgagaattttcagtaaaacagaaaagcttgagataactataggaatgtgtcttatcctgagattaaataaaaaatatacctgctcaacaacaacacctcttgaatcacttgcaaactttccttccttaccccgatcgtttgcaccatctgatattctcaaacttccagatccgtcactctgaccatctaaccgctgccttttcttatgttttctgtcactatttaatatctcaaactcaattaagtgagtaacactaacaaaagaacatcactcaaaagaattttatggaaagaaaaataaaaagttcattgtatacactattcaccaatgatatacagaagaacctttacaaacaatgagacaaaacccagcctccaataaatctgccaagtgtaatggcaataagtaatttcatatgcccaatattcacgtccaattttgttcaagaggactgcaccagtagataacatcctaaagtgagttaatgtgtgtgcgtgtgtatggcccatatatgagcatatgagcatctacaatcgtacaagagatcaaccctcaagcaaggcaaggtgctttttttttggacaaggatccccacctaacccgacagtatttaagaattagacaactacagcaattgctacgtagctaccaaggatgactcaaacatcagaccttgtttgagcaaaccacatgcttcaccaattgagctaccccctcttgcttaagcaacctttttaaaactaaattttatgtagtctactgtttgatttttcacttcattgttttctatattttatattctaccattatttaatatttataatccaaaccacatcaaaagaactaactttacattcctaaaagactaatcccagacacaagtaaacaaacaagcaaaactggggaagagaaatcacctttctttatcaagagacctagatggacctcttgcgtctctatcaggtgaatatgtttgtcgtggagaatgccgtctatctagtttatcccttaagtcaccatcttcaaatcccctccttcctaaagtgtggaacaaaaagttatcataaggcagattttaaatgagtcagtgtttatcatgagaaacaaggctcaacatctaagcttaccatacatggaatagcatgactacataataacgaacaacaatggtaccttcttgctttttccaaagtaatcatagaaattattgctgtcatacaatgaatgacatacaagtttgagtttatacattgagacacagtgaccacttcatacaagaaagaatcattgaatagaagaataggcattccgtcttgttgttgagcaataagaatatatacaagtggtgagtagagatttctccaaggtgacatatataatcaattctttgtttcttctcacaaatattccaagaaaagaattaattgatcaccacagaattattcttcatcataggaatcccttgatggtgtgatctcggaataagtaacaagtagagtgaatgtcatgacccacaggacaactaaaaatggcgggaactggataatagatatttgaacatagaccaaattccttttggtctttataagaacagagaaaatatagtccagaaaaagtcaacaacctacccctgatcaaagataacacattcaggatgcttaacgatgataagttttgccacagaaattccataaattttgtaactaaccagcaaaatcccccctgaacatacaatacagcaaccctctcagttttaataactgaacatgtctctggccaagacatcaggtggcatctctactcacacgaaaacaatagagctcgggtcttctggcatacattacaatccttgcaaactactattataagggggttcatagagcactgtcaagcaaaattacgaataacaaggaaagatcttatggcagaaattaacaagttagagaattcttttcattggttccaatcattaggctagaggtaaccccacctgaggtcctaattcgaatcccacaaccaatccaaagaacgacaaaacaaaatgcataaaactggaattacaaaggtttaatgaattgatgtgttgcttagacattgcctgaaggctgaagcaatttaccatgaatagggcttgataaacgccggagctccacgtttccatgagcgaaggagcaattctgacgagaacaccgacctttctgatgcaagacgcagagtttcgtcttgaagagcttccgttcaaccatcgtgttcacaatatataatagcaaagaaagaaacgtgtaattggtttggtatgggttattttgatgagcttctcagtgaaatgagagggagggagtgggagttgtatatgcaaaaacttggggttttcggagagaagagctttaccttgggtgactcactctcagtttcaatgccaacttttttttctttttttttttgttagaatt

SEQ ID NO: 188925 - DNA, 936 bp, Cannabis indica
ctttaaaattaaggatggtaaataaatcaatattatgcactcagtttcaagtttttttttttgtttttttttttttttttgttaaaattacacttagtttcaagttgattcaatatactatataatatacacaaatttcttttatatgatcagttgagaatgactcggtaccaattgcacagagataataatcatgaaatgtagattattactccctccagccagcctatcccatcccatgagattaaaattactaatttcatttactccaagttgatctactagataataataaataaaaaagaaaactttatatattaattaatcattacttacatatatggttcatattgaaaaataagtagaaatcttaaggaatataattaattatagctaggttcgaaccacttctcctttttattatttaagttagatgcatcatgcatgtggtcccacatcacatattacaaaaattgattactttactacaagtaattgatatgacggcattcatttgtcacttattttatcgctagacgattaatatgagcagatctctccaaactcatttattaatttccaactaatccctatatttatcttttatattcttataaattatgttttctttaacagaaatgttaaaagggtaccagtggtgtttaatatttttctgttaatatcgctattggttcgactaagtatcgggtctcatctagtttaatataggggaattaccccgtatactgtttttttaactttttcttaatttacaatttagggttctaaagtggttgcagcgctagttgcaataggggtttctatacgattttttattgcgatttaggttgcagcgctagttgcaatggaatttctatgtagaatcccgtaaaataaaaaaaaaaaaaaaacaaaacttaagtttaagtagtaaaa

SEQ ID NO: 188926 - DNA, 4090 bp, Cannabis indica
aaacactacatggaaaggagatatatagcggttaaaaagtttttttttttttttttttttttttaatcttatgatgttccttgctgaacaagaagtagtgaatagtataaatatatgtatatatatatgaatcgtaatatactatggctcagttttctgtttagatcgatcgttacaccgataactgctgggttggaattttgtttcattgaataattacgaacaattttccatttcggttactttgtttccccctactttttggggtgtggtttgattatttgatcattggaaggatgttgaatatatttcttttcttgtttttgcagtgatgtgaaatgcttttgggtggatactgaggtttccagctgtgtttttctttttcaaaagggtatgtgccaattctagtagatttttaaactatggcatcttcaaacagtaatgctcacactgaatcagcaaaaatggagcaaataattactgaattttttgccaaaagtcttcaaatattacttgaatctaggtctccctgtttatcctcacgaaattatagtggggaacagggcatttcatcaccatcctcgtcctcatcgtcctcatctagtgtgaggccgagggacaaatggtttaatttagctctaagggaatgccctgcagcgctggagaatattgatctctggcgccagaacaatctagaacctatggtggttgatgtgattttggtccagaggcctgttgattgttttccagtgaattcttccccaaggaaggaacttgttagaaatctttcaatgaaagagaggtatcctatctgtatgaactctgaccaagaagaatatgggtgtttggaaaggagtgagaagattgtagagagatgggtagtgcattatgagagtagaaaaattagagatactagtcacgggaacaggagatctagtaatagtactttgtataagaaaacaattctgctcttgaggtctttgtatgccactgttaggctgttacctgcttataagatatatcatgatctcaactcttctagccaaattcgcccattttttcttgctcatcgagtatcttctttcgctgagcccttcactcgtaaggaagaagcagaaatgcagagatttgcattcacacctgtggatacctcttgtggtagactttgcattacagtgttgtatcgttcagaaatctcagacataaactctgaaccatcaactcctttgtccccccaagtaatacctgattatgttggaagcccattggcagaccctctcagacggttcccgtcaattcctgtggcaggagtagcatctcatggctctccatcatcttcccaatttaccaggcggcatagttggagttttgatgcatatagaacttcaacgcctttgacttcattctctccttcaccaactcattcagaaccacaagctttaaactctaacccaagccctcgttgctttccaccttccagcttgcctcctcatccacctgagacatctttaattcataagaaagatacagcttttgacgagtattttcagtcacctgtattttctatatcatcatcaccttcggcttccccatcacctccaatccgtatctccgggagtcatctatcaaatgctcttttacgatccgaaagtgctccagtccgtatacctatggctaggattgctaattcccctgcatccaagcaaactttgcctccatcccctccccttaaaagttcaagatccagtacttataggtctgataaaggcatgggtttactgcattctggaataccgaatgagaaggtacatatagccatgatgattaaactttgcttcaagtatggttacttgtatttaatttgctttgcttttagttgttcccactcaggaaagaggaaactaggcaattttcaagaagctctagtcggtcattcccagaggactttgatgagcctgacttcacttgcccatttgatgtggatgaggatgatattactgatcccagtagtaggtaagatattgaaattatgaaacggacaataatttttttgtttttatcaatttttatatattcacctgtaaactgttttcttttaccagttaaactgttttggattataatttgtttgtgaaaagacaatagttatactaagatggaatcatttgtagctaagaatgagtacatgatgtttgttgttggtgcattcctagaaactcgtcaaagttgtttaggatcagaatcagatacgaatgttcaccactgagcttggttgggtatctctctggctgagcaaataataaaagttaagcccttactgtttagttttaagcatgcagcttttctcaccagtattttcgtgtagattgacctgttgtgattgtttcatttgtactaaagtgcaacattacacatgaaaatcctagtcttctttcaagtcaataatgatgattggtgacaaggtgcaataaaatggggttggtgacaaggtcaatgtaagatgatctatattatagttgtactcaaaatataaggggattggtggcaaggtagtaatggagatagtggtacttgcatttttgcctatgattttatgactactttgtagtgataattgtattgttgaggttctgtatgattttaagttgaaaggtaacgattgtgcatggattgttgctacaccagtttgggatagtaagtaaaaaaaattagcagacttgataaatgagtttagggtgtatttggaagacctggataattgtatgcctttcgaggatttcgtgatattatgtgcttgaactctcgtccttgaatccgatgttatttcactgccaacaattgaaactcactctgcatcagtgaggattgataactaagcccgttggcgagctagaaatggctattgcagaaaaatgaaaatgtggtttagaatagtacattctaccagtttattatgctactttttttttttgcactggtattacagtgtcgtgcatacatttgatggatatcaccaaaatctaaaagtctcaaagtctattatgtagaagttttccatgcgagccgtgtctaatcaccaattatatgataaatatggaaattgcttttgcagttattaatgtgttttattttttatttttaaaaattactgattgcttttattttcttctaatcctctttaccaacaataattaatcgttttgttactttctagacctgaatcttttgagcaaaaggggacctttctgtgagccacttgagcctggaggatcgtttccaactaggacccatgacgctgctgttggtgcgcttgttttgatgttaagaaaagccccacctctccgccaagatttctccaaatctgtagattcatcagatgcattaagacccgaaatctggggtaacaccaatcagacttcagatgttccagttcaggaagctgcttcttctagcgtgatgtcctcgagactcattgtctctaaaacgacagctgatgccctagaagaactccaaggatacagggacctgaaaaacttgcttttaagtcaatgttccaaatctcacatatagtctggtatatgtttgacattacataagctgggattttactggggtcttgaatccgcttagtattgaagtaaataaaaagacttacatgtgtacagcattttggtccaagttttcttggtaatgttttatacggctggaagttttgaaattttcttttgtaaatatttatatttgaggaataagttacttaatataaggattttgaaaagccatttatgtgtacatagtaattggttataaagtacttatataattgtatagttgcatttcttggaactattataagaagtgagttcttctttctttatcaatacgtgtactctttttttgatagtgattatgaatatatatgttgatgatgagatcggtgaaatattaagagaattacgatgaagattgtagaacttagaagaaaagttgcagaccaaaaaatagtgttcttgtttaaattttttgagaactccttttctaactgaaagaagtgctatttatagggcatgaatcagttacttttacatgt

SEQ ID NO: 188927 - DNA, 2796 bp, Cannabis indica
actgtttattggggtttctgggagtgtaaattgggtgtgaagtacagttttatttattggttgagtttattcaatttgattggtttgatttcaattcaaacaaaaatcagttcgttttctgtgtttttagtgtttttgagttagaagatttggtttcttgcttggaattctgattcagtagttgtgattatttgagggttttggttcgattgaagtgaaaactaagagttaattctagctattttggtgtgtggccttggaattccttagttacaaaatacgctactttgtaaagattaagatacattgatttatatataatcaaattagggttttgttttgttatgtaagctgattattatagtgtttcttcattttagattttgtaaggggagaggagaagtaaagaggaatattgatcaactttaagctatggcttcttctttgaccgataatgctgccccggaagaaacacaggttctttaattgttttcctttattattatatctgtttatgtatgaatgaagataagtatgtatgttgttgatggtgatttgttcactggatggtcttaacaggaagttttggtggagtttcgtgctggtaaaatgaattttgaagggaccaaagttgtccctgatacccgtaaaggacttgttcgcattacaagggtatggatcatgctatgaattgttgtgattgacaaaatacttgatcttttttgattgatttttttattttatggctcagggtggggagggattgctccattttcaatggcttgatcgaactctaaacgctgttgaagatgtatcctattggattgtttgctcttccgttttttcttcttcacattattagtactatgtctctttatactgtttccttcacttaaggtgtcacaggatcagattattttccctgatgaagccgtttttgagaaggtattgaacttggatagagctatgcattatttatgtgctacatactttatgtctggtttggttactatgacaatggggattggtctaagtaatggttcatctcacttacacaggttaatcaatcatcaggaagagtttatatattgaagttcaatacagacgaccggaaattcatcttctggatgcaggttgatactcgggctctttgactgtagttatccattctcactgtataaacttatggtccactttaacttaactcttctttatgattttactaatgtctttccaggagcctagtgctgaaggtgactctgagctgtgcagctctgtaaattactacatcaatagacctttaggtaaataaaatcgttgactgattaatgctttcagtatatattggctgtagctcaataataagtaaacattttgagctggattcttgtacgtacgattgctattgaattgaaatatttgcattgtttagcaatctatacagttttcattagtgattagtcttccgcatatgctagcatgaaacattagcaaggattaatgttatatttccccctggttttgcattgtctaatacaaaaggacgtagcatattgacatggaaattgaatataaatttttttctatgcttttctgcataagtttgattgtgcttatcgttctcttttggcagacttccttagtgaagaagaacctgatgcttctgttccactacaagtttctgaagatatgatggacgacgatatgtcatcaaggtcagctactagtactaacatgtgaaccttaccaaactctcagaaaaattgtaatacaagaaacctagggacatataaactaggtttggtgttatatgtataaagtggatcaagattatatctaggctgtgtcggactgttcagctgagcacagcttagagctgttggaccaaggaatccaaaacatacttgttgaaattgttttatgttgaagtgaaaattggttatagattgttaagaatttcaatgagcagtgctgtatatacacagattgtgatcatgtttaataaataatagtgttctaggtactatagtgatgtttgcacacaaaatatgcacaaaaatatcacatattctcatgacaatattcccaaccaagtatgtttatttaagataagatccatatgttgtaaaacatgcaagcaagtagtgttgtgaatgcgaatattttctgcaaatttatagtgtttacttgaattttaaaagtgtttaaaaatttatttattcgtatttgctagttgatatttgactttcttctaagaggtaatgagatggaaatattcaaatttggtttttggccaacttggctttctgctgagaagatatttcttgttgattcacatttttccatgcgatttgtatatttcactgtatctgtgacattgttgcaacgtgttaaatgacttgtacttctttcagagctggaaacttgattgtcccaaacttgggtgccgatgtatctagtgatgtttcctcatcatccggtccagttaaattagaagatttgcaaaggattttgagtaacattggacctgcagctgcaggtgtggagttttttcttacagtatgctcataattatagattgctatatagatgactccatacatatgtacatgaataaaatttcactgaactaataattgttcttcatatggtgcttgttacagatgttgctggagaccctgatggaggttgatgacacgactttgttgttttcttatttatcagctttactgtagaacaaatttgccgtttacttattttcgggtgtatatatttttggtttgacattgcttcatt

SEQ ID NO: 188928 - DNA, 3543 bp, Cannabis indica
acaacaatggaacaattaaaaaacaaccgagaacaacagtaaaaactgaacacaatacacattataaacagtatttttgaaaaaaaaataattccaccttacagttaaaaagtaaaaaaaataaaaaatttcagtatgtggtataaataattctatatattttgttaaataacaattcatattgtatattttacaaaataaattaaattgatacattaaacttaacttcggtaaaataattataactaaattagaatcttatcaactaaaatttgttgaataaatgtttaattataacggagctaaggtatcaaatatttaatatattttgtaagatataatatttaataaattgttatataattgtacactaaatacgaatgccaaattagtatttttgatgaattgaaatacattatatatatttaaggaagctatataattaagctagcacagcaaaatacatacatgaaattaattaattagcaagctaagtacaattattgttttgaattaataatacaaaatatggcatttttttggtcacatgaacaacaaacggcgcaccttacttaatttgattgtaacattattaataataaccctttaatcaaaccaattcttccatgtctaagttatatataatatcaatcactatatatacacatataattatcataacatatattatacataccaaattttgagtttcaattagtgtccaaaaatctatatggccaccaaactaagcttgtcactatttctttgcccaatactaatattgatcaactcaaccctattttgtgatgcggcagcatcttacaatgttgtcatgaggttcggggccaaaccgaatggtcaaagtgactccaccgaggcgtttcttcaagcatgggccgcagcgtgtgcctctactgagtctgctcttatatatgtcccgaagggtaggtacttgcttcggcctcttattttcttagggccatgcaaaagccctcacatcatgtttagaatcgacggaactctagtggctccgacggactaccgtgtgcttggtggagttgagaattggattaatttcaaaagagtgagtagtgttactattcttggtggctcacttgatgccaaaggacctgccttgtgggcttgcaaagctaaacccaacaactcttgccctactggagctacggtacgtatgtagattcatataataattactatataagtaaaatcctcatagatttttttaagtagttttagctagataatgaagagtgtttatatccaatctattttttttttttgtgaaaaatatttcattttaaaattttttggtaaaaaaatatataagtatatatttttagtattttcaatatatagctaattttgtattaaacgatgacaactaaacttttcagactgttataaattttttttattaaattattgaaattgttagatttaaaattttttgtccaatttcattcaattttgttaatgtggtaattgttcatgtgtgcccccgaactttaatatttactaaatcataacctctaaattttagtatgtatcaaattgtaccctaaattttcatttacactagaatttctttaataaaattgaataaaagtccttaaattcaaaaatttcaatagttcaggaaaaatttttaacgacttgaaaaattcaaaaataagtatgattttacaatatagtacatatcaaactttagagagcaacaatttaaattagcctactttttttatatatgtgaatattcaaaacagttagtcccatcttagataaatataattgattgattgggaaaaaatagtatggtttaatgtatattttgggtttatatggtttaaatattacgattttaatatatatatatatatatagattgactaatattaatctatatttacagactttgaccattacatactcaaacaacatcaaaatcgtgggactcttatcattaaacagtcaaatgttccacattacaataaatcattgtgaaaatgtagagataaaaggagttagaatattagctaaggaaaatagccctaacacagatggcattcatcttcaattttcaaaaaacatagcaatatttaactcttcagttaaaactggcgacgattgtgtctcaattggtccgggcactcaaaaccttttgattcaacgcatggcatgtggtcctggtcacggcattagcattggaagccttgctaaagaattggaagaagaaggtgttcgaaatattacggttaaagaagttgtttttactgaaacccaaaatggggttaggataaaatcatgggctagacctagtttgggatttgttaaggaagttcagttctttaatattgtcatgagaaacgttcgaaatcctattattattgatcaaaattattgtcctcacagtatcgattgccctaatcaggtataataaactagtaagtttatgcattattgtgttttagaatcatatatctatacatattaggggctcaatgcatttttttgtctctcgtaactattttgaactctattttcttttataaatgagtaattaattatttagaactctatttttatattaattatataatttttttaaaaaaaaaaatggtgaaatatttattattccatcatataaaataatttaagttattcctattagtagaagcgaaactgcgataaaatatcctataataatttttttttatgttgagtcggtcttgaaattgaatggactttaagaataaataaaattattgagccctttattatataaatatatagtatttttaaaaactactaaatactatgtatttattttcggttcctaagttgggtaggtcatagacgctgacttagcctaatttagcccaagtatcatctaatcaaatacaaaatacattatatatgaaactaattatgtctttcttcttcatactttcgaattattaggtatcgggtacaaaaataagcgatatagtatatcgaaacatcaaaggaacatctacaaaaccgattgtgatgaaattcgattgtagcagtaaatatccttgcactggaattgtacttgaagatgtgaatctaacaagttatgatgatactaatgtgactcagtccgtttgtgcccatgctcatggaaagtctgttggcctagttctaccaagtacgttgtttattaaagtgataaatcataattagttattaatcattgtcaaaatgcaaataagcttttttatttattctagtaatttattgtgtattgttatttattttttattttttttttgtaaattttaacatcatatatatacataatagattactttttattatgaagtaaatatacttaatttaaaattgaataattagggttttgttcccgaatttatacgatagtaaccagatcatgtcccttaaagtaaagtaaaaaataaaataatggaaaaatagtatagaaaatataggatccattttatcatttaacaaaatagagggtccaattagtaacttttgtaa

SEQ ID NO: 188929 - DNA, 2869 bp, Cannabis indica
ttttttttttttttgaggaaaaagtattaaccaaggagcaagagcattaagtcctctaaaaaaagtggaagcgaaaatttatttaaaaatatcatccgctattaatagattctgaatacaaattagattcacgagccaacataccgaactactacttttagtcaaagcaagcttaaccaaagcgagattattaatatgtggtaagttacaattagtagtttgtttgtaaaacatacaattttttcgatattattaatcaactaaatgttaattttatactatttcactcaaattaattgagattattaatttataggaacttaatctagaacttactttaatttgccaaagcaaattacacacttgaccatttaaatttacccttcttaaactcacattctccatcctcattggtatataaatgtcaagaaaaagaattatttaccaaagttttggcgcaccatggtgaacttgtaaatagttttgattagggagccatatctcatgagcttcagaggtcccatatgtctgtgaaacaaaagagcaattcgggttagaactcgaaagaaaatgatgcagaagacagaattttagtagtcaataaacgattctccagctcggagcaatacagtgatggagactaaatagtttctcacaaattagaatctgacatttaacaaaaaaaggcataacaaaatggtggaatgatggagacaatgtaaataaactgaaaaataaagcaaactgaaacaaaccaatccatggatattcattgctccatatattatcatgtatttgacacaaactttaaagcattggttttcttcaagtggtgagaattgtatcaagaatggaaagtagagcaccttgttcaaattgagttacttttagtgagtcactcaatagtttgtgagattaaagaagtgcaacgcaagagtggggaacacagttaaccatattggcctacataattcaaggaaggtagctcaaatggctagacatgtggttttctccaacaaaatctgaggttcgagtacttccgggatacttgtataaaaattgctataacttcttgaaccgcaaatatttgtagggataggtgggcatgcacctgggatagaccaggaactatcaaaaatcggttgttccatcagacaaaggtgaccttctgcgggcaaggcttgtaggacgcgtaattcctatctattccaaactttcctctcccggttattgattagggcagagaaagagcaatggataggtcaaaataagatgtataaagagctttgtaattctagtttcaaaagaaaatattagcctacttagaactaatcaggtaactgagtcacactctttccatacatagtaatttaattcctgaactaatcactatagagatataccagaaaaaagatacataactaatttcatgactcattttgcaagactactaagtacttacacgatctcagtgtaacgaattctccaagcagggaagcctaagtggcatcttacaggtccatagactaataggaggtccggttctggtccattgcaccctgataagatataaataaatcgtcaaatatgatagtggaatcgaaaccaatcaagaaacacattaacaacaaaacaaaccgatagctttaagtgcatctgccatttgagcttctgtgaacgtattctcttcctggtttccattcaaagcagtggatgtcatatactttctaagaagaaagttggctgccttagccacagcttccttcccatcagaaaatgaagcaaattccagagtcatacaattctcgctaagtaacttgtcatgttcactagctttctgtaaaatgataaacattaggttgagttagttgttaattaaactaaagagtaagaaaagctataaagacatgggagtttctatttctaattaaagtatcataaaacttcagtcaacttttctcttaataaaaatccttacaatcttggtattgtaagcttttaaattaatattatatagaaaagatataagacattgtttaatataggcataaaagaatgatcacaacacattaaaaaaaacactgcctggctaaataaatgaaggcaaaataaatacagaaacatgatacctcaaacaatgttgcattgtttaatttctccaagatggcctcctttgatttcttcattattcctagacatcacaagagaaaaggcaaaacaacaatcctgttaatattgatgatagagaggaatagagatgcctaatcaacttaaaatatcaccttctgcatcataaagacagatatgtttcacaccaatactttccagccacaacaaaagcttgataatatttgaagtttggtaagcttcttcactttctaccacaatggccaggtaccgaactttgcctttattgaaggctctgtatttcttccataacccactagagataagatagctttctgcaacatgtgtcattcccagagctacatagaacatactgacaagtaaatgtagaatatgccaaacaagtcgaatccccatttttccaatctgcatcagcaacaagattcaatggatggtgaaaataagctcataaaatttctcaataatcatgtctccccattaacctctgactggcaaacaaatgtatacacatgttcacataagcattctaagatgaaaataagaaaatttcaataaccaaacttttttcaacaataaatttcgagttaaatgcggcagaactcccaatactttcacttcgctagcaattaacgtggcaaaacccacaaaactcgtgttctgttagcaattgagcttttccaacaattttcatctgttttttgtaaaatatgtacagacttta

SEQ ID NO: 188930 - DNA, 972 bp, Cannabis indica
caccaagttggggactcccctcatggacgttcgggggaggattaatctttggtggggaggttctcaaggagtggaacaaggataagaaggcggatcttagggctagaacaaacgacttaaagaggaattgaaaaacctttctgcttcaagtggggttacggactggaaactacaaaggaatatagaaagagatctgaatgttgcggaggaaaaggaagagattctatggaaacaaagaagtagggctctctggcttgctcacggggaccgcaatactaagtatttccatcataaggcctcccaacggaaaaagaaaaatgcgataagtgggttatttgatgagcaaaggagatggtgcaaaaaggacagcaagattgaagccattttgattcgttattattcagatctatttacctcgtcaggacataaggagcacttgactgatactctaacccggtgtgtgccaaaccggttgtctcaacaggataatgataggcttttggaggagttcacggaagaggaggtcaaagaagctatcgaacagattcaccctctcaaagccccggggagagatgggctgcctggtttgttttatcagaatcattggaaggaggtgggtaaagaggtcataaatacttgcttggagatcttaaataaaggtagggactgtagctgcctgaacgatactcttctatgtcttatccccaaggtgaagaacccgaccatggtaggagacttcagacctttgagtttatgtaatgtcacatataaggtgatttccaaatgtcttgccaatagaatgaaagtacacatggacaaagtgatttctgagaatcaaagtgcattcatcaaagggagacaaattcaagacaacgccattcttggtttcgagagtctccattgcttaaagaagggtcggtttgggaatggaaggaagatggcccttaagctggacatgtctaaagcttatga

SEQ ID NO: 188931 - DNA, 3262 bp, Cannabis indica
aaaaaatttattagcaaattacactgtgcaactataaaacatttcttgttatcaaaaaaactataaaacatttcttttgcgaccattaatgtagtcattttgcaaattttacaattttatgatgttaatttggcaaatttccccccaaaataacataaaactaagaatcatgatcagtaattcaagatcaagatagtaaaatataaagccagacaatcagtatattgttctgctgtgtctatagcttatttttatttacattaattcatcataaaatagaataaagaatgtattctcctcccttaaatcactcaaatttcatctgatcatatcatttaggctccacaataatcttccctgttgcatgaccatccatactcttagcccaagcatcctcagctttggttaatggatattttgagtcaatcactgtcttgagctttttttctttaactaacttaacaaggtaatccaagttctcacccttgggatttagaaataatggtacgaattgctttttcgaaaaggtaagctttttcaaagcaaaagttgccatggaactaagtccgggagtaatatctattaccttaccatttgtgctcaaattaggctcaaaaattgaccaaggaatgtctgttgcacagtggattactgcatcatatttttcgacccgagggactaatcaaggcttccccttctggtgtcttgtaatcgagaacctcatccgcacctaactttttcacaagcttgacatttcgagccccacatgtagctgtcacatgtgtgttgccaagctttgctagttgaactgcataatgaccaacgccacctgaggctgcagtgaccaaaatgttcactggttggccacttccatcgagcttcaccccagcagattgagagagggcttggagagctgttagaccggctacaggcaaacttgcagcatcagctgcagacacttctcgtggcctagtgaccgttatgctttccttggctgcagcaaactgagctagtccacctccaatctgcattttgcacaaagattagttttagaaaaagattggatttttatcagaaagtctattgcttttacttatggccacaagaaataaggttgtagaattctaatattctataaaatcaagtgaacaaaaatcttaatagtatttagtagatagggaaaacttacaagagggttaagcatagcaataactttgtcaccagttttgaaatttttaacacctgctccaacatcaacaacttctcctgacacatcattgcctgtcacagaaaaaattcaccatatttactcaaattcacctatgttaatagttaaacaatgaaaatacaacctgataagtgataacattaggactaaaaatttatatatgaatatcttagtttggtattgggaaataagtagtttttcatattagaaaatgtgtggagcaactattgaaacactctctttctagtaatcctatttttagcttggactctcttctttccaaaggaaaaaaaaataagaaatgtcatgcttctgagaatctgatcttataaattttttgacagtgtaacagatgccatttgtaagagcaactctggtcagtttggtttttgggcacctcttgctcatttctatactagactctttgattttgatacttgaacttgaaagtcctgtgttggtatcttagcaaaatattagaggtttctttagttaaactatgaaaaattcaacctgataagtgataacattagctgacttaattagttcactttgttagttaatactgtttcagttaagtgtaattctgttttaacagctagctttattgattagtttcactaattacttttgtaaagccttttcaaggctgttaaatctttggacaatcttctaagagcttttctaaattctctctatataactagtgcacttttttgttttctccactagatgaattataactttatcctaacaattttttaaaaattttgatactgctgtattttcttttctttcttttttatttgcccaaaacaaaagaattaatttttgagtccccacataattggttccctataaatatagtttgaatgagagaacttacaaggtgtataggggaacttgcgaggcaaaaaaggcctgagcatgcctttttgaactttccaatcaaatgggtttatacttgctgcttcaactttcaacaatatctcatctttgtttggattaggaattggaacttcaacatgctttacaagttcacaaaatatgcaaactcagtcaataatactatatgaagcaatatatgaaaagagtgttaatttaattttatcaagctagtctagtttattggtcaagatttgattttgtttgatgatatagtaagctgagttaattcaaaagacaaaaaatgaaaactgttaaagggtaaatgacctttaagccagaagcacctccgccataaccattgtattgaaccgcttgcataagcttctctgccatatctaccagtttagaggacatgatagaagattagaagaagacctctttacgagcaaagatgccagatggcagaacttggagaacactcttcgaggttttaaggaacagtttatgcattacgtggacaaacatgcatcacatatcactcatttaaattacgagaatagcccccttatgttgtaagaagagctaaggaaacaacgctttcataataatacaatgacgaggataacacttgacttttctgttcaaaattcaaagggtctaatctaatctctatgtttggttgcacagaattaagaaatgcactcttgtaaaaatactttataaataatatgttctatgctttataataaactgtacatagtacatacataccaacaatcaggacaactatagtcctcacaagaaagacatttaaatagataatggtaacgagaaagtgtttggatcatcacacaagatttgcaatataattatatgagtgtgcattgaatgtacttaaggctccacaatgatcttcccagtggcatggccatcaatactcttggcccaagcatcttcagccttgctcaatggatgttttgagtcaatcactgtcttcagctttccttccttcaccaaattcagaagatattccatattctcactcttggcactcatgagaagtggtactaattgtttttgaaagagaaggtaaaccttttttgagagcaaaatgtaagtaaatgctgctggcccgggagtaatatc

SEQ ID NO: 188932 - DNA, 4966 bp, Cannabis indica
gccacagccacagagcctcgaacccagaagctcgagcgaatcgccgacgagctcctcgacctcacaaagctcgagaggtacgactactctgttctcttccgccataaaatgggcctcaacaggtacggtccggcgatctcagcccccagttcaggcggttcaggagcggctggatctgggccggcatcagctgacgctaaggcggcggagaaaacggctttcgacattaagcttgagaagttcgatgcggcggcgaagatcaagatcataaaggaggtgagaacttttaccgatttgggtctgaaagaggccaaggagttggtggagaaggttcctgttgtgttgaagaagggtttgacaaaagaggaggctggtccaattatggaaaagctcaaggagttgggtgctactgtagtattggaataagtaaactcaatactcaatttttgtttcttcttcttcttttgagtttagttccattgatgtagaataatgattctttggtttgatcataaatggaaagggataaactgttattgaagtttcttgtgttactcataagcagattatgagtggagtttgaaaagaattttggtatttgctaattcatagactgcttttcttttgttattcggattgagtttggtttgggtccaagtttaatgctttttataaattttgaagtgtatatatgaacatgatgttagcaaaacactaactcagattgtgtatttttaaggtggataaaatgttaccatttggttaccatgttttgttgttgaatgttcattgttcttgtgacacttctggacctttgaaggccttcctttttataaccatccaaattggtaattgtcgaaaatcttgaatgttttaaagggttcattcgtagttatttctaaatcattttcttctttgtgggtttgattgtcttaagattacaagaaaattaaacaaaagtcccgtcaaagttaaatcaaaatctaaagggttagttgcctttgttcttcgtataatgaaaggaataccctctcataagatgatttataaaaaaaaagtctaaaaagggtttaatccgactaggctctgctccaaaatgcattaaaaaaaaataatgtgtacacaaaatgacactaatggcaaattttttaaccaatcattttaatagaacacacttattaaaagtgatttgctattgcacgtgtcattactcttcgtaaaaagaaaacaacatatgagcaaggaagtgtaagagagaaagtccacaatgactaataatgtaacacaaatggccacaatgctcctactaccatacattgttaattttctgttcagtcgatcttccctctggatcaaatcaaaacgagtaacatagggaaggggttctcatggggtatccataactctttctttcttacacaacttttcatctgttttcaaaatctaaaaacaaaactccatatgcaatggaacccccaaaaaagtaacataagttcacataaaagtcacattctccagatttacaagcctaatttatgtacaccagcagatgcatgaagaagacataccgggtgggataattttcacataccaaagacggttcttcctttcgtttgtgtcactgacatgtgaatttaatgtcatgtcacatctgaaaaatggaaaacccagattaacaacctgaataattgtagttgtagaatgtatgctttattaaaacatgtaaagaccgacacattttctcaactatgggaggaatacttgtttcacccaaagcaggaaatcccctccccccacccccaggacttagaatcaaattttatgccagcaacagttccctacaaaaatcaatttagccagagtagtttaccaacaccgaagcgtcctacttttcaatgctttcattgctgctttggcaaaaacttgtgctgcctctgcttcagcttcagctgcctctgcctctcttgctgccacttcagctgctgcaatggcagcttctgcctcagcaactgcctgtgcagcggctgcagctgcctcttgcgcagtcatgctcctcatctttgaaagatctgcatcaacctgagatttagtaagaataatgacatcactcttctctgctactgagtgatcctttggcctttcctcgagaggtaacacagatgagtttcttctcttttcagcacctgttgagcttgatccaatcctgtatctatgcttaacctgtaaacacaaataatatggaaatgataaactggaaattgtacttttaacatttaaacttttttttttcatttaacgttcacttctagcatatctctgcaattactaatgtgctttcataaacaccacattatctgaaattatcgaatcactgatctagacgtgtgcataacaatggaaaacgatctacatgtgcatacttagattacagattgaaaaaaagatattcaattttacagagcaatgcttttcgaactcaatcgattactcattgcaatgcacaaatggcaaatgtattaaaacaagcacttttaatctagatagtcttaccttaatcagtttcccgttttctgtcatatgctttagttttgttgataacagctttttgaggtttggtggcgcccaatatttctcctgcataatgaagttggaaaatatcaagaagcattttaagggagaaactaaacaccaaagttgaaaaaagtaatgtgaaatatgtgaaattattttcatattctggattacacagtttgtccttattagttgagatgacattgtttacttagcagaatgcagaagcattcaatagaattggtaagtggctacatcacaaagttcacaataagcatcttgaaactgtcgccaaattttaatggttgtgaatccctttatttatttatttatttatttattgctgtgtagcccagttggtgcactgcacaacaccttaaagaaccaagaggtcccaggaacgaacctgagagcaccacccttttccccaccatccctcaggaccctcaccactgagatatagcctcagtggcttagcagtagtgaatccaattaatttgaaattggcaatattatcggtgacacaggtgactcagccactacatgttactatctgtgtcctctgctcttagaaaggagacaactaggctatagtacaaatcagcttacaattactctagtacatcacaaaaaacaaagtaaaaaaagaatctttgaaacgattatgcagtttgactccatgagtatttgtttaataagtatgatatattccggatagtttttcaaatattaagattatgaaaagcttctcaaattgttattaattcttaccagaggcttctgagaccaaattagaaaatataagcacagatacctctatgtacattgcaattgcagccctgtcagaacccctcagctccctcaaattggtaatagcatctaatataagcttatccaacctgcaaccaaccaaagaaaacccaaacaaagctagtcattacgcttcaagcaaaatgaaacagtacagcctccaatataaatttctgtccattagaaccctcaaatttccacctcaacaaagaagagtgcaatctagaatcttctaggatttaagtaatttttagaagtttatgcaaattaccaaattggccacacacactagtataagcagacaaattttggccataaacaaatgcaaatcaccacttaagcacttctaacaactcaacagggataagctaatcaaatgtctatagctgaaaaatccaagcatccaaccaaaagcaaggctgtttctagaatgatatcaaagaatgagaaggaccaagtaagaatagcttttcttcagaatgagttgtctatactaggaaaagaaaagctacaatcattagtgaaaaaagcaaaattgttaagtcaacttaatctacctcgcatttggttcttttgaattggtatttcgcattgttccactagcaattgcaagaggcttagcatcaacaacttcttcaacattctgaactacagtaaccaaagccaaagggttgttatcaagtttaggtgttggtaggttctttttaagcgcaagcttagctttctgccttgacccccatattgcagtcacattaatatttctccatttatcctgtccgaaccaaataaaatgtgatcttgaaagatgcaaaatgcataatataattggaaaagagttaaaggcccaagaaacataaaaccatccatccagactgatgatattctgaaacttacttactgtcaccgcaagaaatttacagatggataccttgagatcaacatttgaacgcaaatgcaatatagaactgaactctggatctgtgagtatcgtgcgccattttcctgccccatgtttgattaccccagctttaagggctgcttcttcttctgctgtccacttctgtttaggagcacccatcaacagaagtccaaaagccttctagttctaggacagtcaaactcagcactaccactgtctatacatagaccaaacataacataaatcttccatacaaaaggaacttaaaataaaccaaaaaagcacaaacagaaccacaagagttagaataggttgagaaatgtacacctttaagggccacagtagcggagaacatatgcaaaagaaggaataagaacaactaagagaaagacaatataccaaaaaagtcgaaaatggtataaatcacaacaaatacaaattactttgtccaattccagacatttgatcctcttagaagagacgtgtggcttggacacgggccaacaaaattaaatctacatgtagcaaaactaacatatgaacagaattatagcaacccttttaagctgaactatcacgtttaaggtctccaattttatataattgacaaataatagtacgggtcttgacaatctttaaagttcaaaccattattactagtaaaaa

SEQ ID NO: 188933 - DNA, 1421 bp, Cannabis indica
gtgcaaccgtcaaaacacatttcttcatttctgagtttttgaataagcattaaatgctgagatttgaagacactaaagaagatacactcacctcgggtagggcaaatgtcacatcctaaacaacacgtgagccctaacatgtgttaccaatccgagtaatgtacaaaccttggaagttcccatgcgaccaacaattcctatgtagacttggatagcaaatattatatcaaatttcgcacaagatgactttacatttcacaaggtaacacgtggcaggtatattaagagttggtcagagcatattccccaaataagttgactagatccatctcaaaatcggtttcatctaagtgaagctatcctgcaactattcttcagacggagcgagtttctcatgatatgtcgtgcaactgatcatatcgggcaaaatgaattgtctgctaactaaatacaatgggaagcatatcttttccaaattctttcttaaattatttccacaaaaatagcaaccaatactcctattcattcaggatcaactagccagacagaaatttgtgggattgctagcctagagccaatcttcacccactcccaccaaaatagggaacttaatttactgctcttattgtttagtacctaaatgtattacatttcctctataaatagtgaggtcattcactgaggaaggggctgctttttttacactttgaagagcaattactctacaaaaatacttgtaaattttttcgagaatattaagaaactcacttggtcagaccttgtaatcttaataattctctaagtattacacattattccttaattttttaaggatgatgtagtactttaaattactgattgtattgaagtcacgtttcccattgtttctcagtagtcgccactaggtatcagagatgagtaggcacgcataacctatgtcaagttaagggctctattctttttgttttcaattcttaattaagatttatgcaacataattcccaaattcctgtaatatagactagttgtaagagcaattatcacttgttagtattagtggaaccagccaataaaagtaggaaggaccaagtttaacaaagattaattattttaactcaataaaagttacttacaaaaagcatcaattaatatatatatatgtaggactgaacatattgaacgggtttgacttggacccatccaacctgcccgaatctgacccagtcaactcgcaaattaaaaaaaaactcgaatttattcggacgggtcaggttggtcttttatgattaccgagtttcgggttgaacccgaatccggtcacttttactattttttattttttattttttatttactatatataataatattaaaaaaaaccttaaaaattaaacttcattttatttttatttacattagat

SEQ ID NO: 188934 - DNA, 2683 bp, Cannabis indica
ttattatttttggcagatggaagagctttgtaaacgaatatcagagattaaaataactctgtttggtgacgaagcggaacctagtcaagaagcttgctcacaactcactcaagagtttttcaaagaagatacttttcgtattcttatacttttcattccaacacttaacttaggggtatatatctatggatcacttatatttatatttacttcattagcttgttttctattgtttatctgtatatattaatattcaatcctcaaactcaaaaacatataaaatttaatattatttatgtacttaaataaatatggttattcttcaaaaatatatatatggttatgtgatttccttttacagtcacgtatagatgctactcatgtgattgctaatctactaaggcaacaagtgaataagtcgaggtttgttggtttggagtacttgaaaaataacttagatatcgtggatattcttctatctgggtatgttttaattttatttccattgttcttaataaaattgataatattattctatagagttaaataattgttacttgcttttaaaaaatatcagttatgaagacacaaacgccagtgatgttactttatcttatggctctatcgcaagggagtgtattcgttatcaggatgttgccaagtaagtataatttaattattatatataaagagtaaatacaaacaaaaatctgcttagaaaacatgaaatatatatttgaaatatatatgtgatgtacaggtatgttctagactcacagcacatgaagaagtttttcaattatatacaaattccaactttcgaaatatcatctgatgctgcattaacttttaaggtgaatatatatggttaattatgattgatcatggttaattttgcttttctcaattaattatatctgatcaagttgaccaactaggaaatattaacagaatttattcagttcaagtgtgtctctctctctctctatatatacccgattgagttttattactttaattatttcaggagcttgtaactagacataaatctactgcagcagattttcttgctaaaaattatgagtgggtaggtttaattaacctcctttttcatcaataactcactctcttctagctatatacatatatagttaatgataatccattataatataagtttttccaaacctgtattttcagttttttcaagagtacaactctaaattgcttgattcttcaagtaattacatcaccaaaaggaatgctgccaaggtatttcatttttcatatatatatattatggaagttttttatgatgtaataaaagtaactatatatttcattgggtgtttttcttaatagcttctagcagaaatactacttgaccgatcaaacactggtgtgatggttcgatatgtgagctcattggataacatgagagtcctaatgaacctactcagggtgcgttacataattagagtaccaaataattaattaaatggggtactaacccaataaattttttaaatgacattaattattttttgatatatatattaatttgcaggaatccaatagaggaattcaattagaaacttttcatgtgttcaaggtattaattgtaccgttaaatatatatatcgacaattatcttttgttttttcctctttaatatttgactaaatctatttttatgttggtttttaaaatatgaaaaagctctttgtggataatcaaaacaagcctgaagatatagtacttgtgcttttatcaaataagagtaagctgcttcgtttttttgaagacttcaatgtgaacaataaaggtgactaagtttattaatttatgttatcatctgattatattttattataatatctgtggaaattttatgttaatttaattttgtttggcagaggatgatgagctgtttttagcagacaaagatagagtggttaacgaaattcgtaatcttaaacccagaaagcttctatgcagagctaataaacatcacgagattatcccatgtgtattatctaagcctgtgctacctcagcaaagttagtatccattttgctcgatttgtggctatgggttgttactttagaatgctagcttattagtcttagaaaatgttgttttagtctttttcatgctataagtgtagtataaatagcatacaattttgaataagataaatacaaaaggaacacttttaagtatcatagtaaattgttattgatgtattttaatattgaatccaacaaattttaatttaataaataatgaggggaacggctaaccgattattggatgccacatcaaaatttgataaataataatactattcgaataaagcaatcatatccttttttgaaaaaagataatacatgccttagctgtaatattttgacatctcgcagaaataataataatgaaaatgcacattaaaagagatataaaaatagtattttatttggcacaaaaataatattatgaaatatttgtattaatttttagcttcaatgcacaattaaaaaatttgatgcaaatttgatgaaatattaaattttaaaatttaatatttttattgaaaataataactatatcattaattttattatataaaacaataaaaattttataaattatcatataatttaatgttatagctaaatatact

SEQ ID NO: 188935 - DNA, 3811 bp, Cannabis indica
agccaagcattttcaaatcgaaaatgcttattctccacagcactaggacgtctaacacactccaataaaattgggctatgatccgaagttgagtgaagaagattatacaatgaagccataggaaatacctgattccaagatggatttgccattgctcgatcaagtctaatctccatccaatttggttccccacgatgcatctcccatgtatacggatgtccaagcagctcaatatcaacaagctcacactcagctgtgatgttgttgaatccttcaataagatttctggggtatggattacctcccctcttctcctcttgacacatgatgttcttgaaatcaccaataacacaccacggtatattagttgaatcatggagagttcgtagcatgtttcaagtgttcgttcgcaggtgtcttcgtggttctccgtagatgcctgtaagcctccaattctgctgggaatcatttgtgacagtaaaatcaatgtgagaatgagaatatcccttgatacttccattatcctggtttctccacaacaatgcaagcccacctcttctaccttgggcctccacacaaaaaataccttcaaagcccaagcttctccctacccattctactctacttttttcacattctgtttcacttaaaaatacgacattgggtttcttttgagaaataatctcctttaggaattgaaatgtccataggttcccaagcccacgacaattccagcttagcacaatcataactcttggcgggcctgtaaaccagtacccgccccattcaagtttttttgaaaaataccatcttgttctccatcataattctttcctccatctcagctactgtactactttggcccattctgcttatatcattgttcggcccaattatttcctcacactcaaatcttctcctttttgaatcaataacaattaaaacagcctcctcctccatatctccccccatataatcttcagtaatagcctttccttttttaggaccccccagttgaccctcataactagcattattaccccttataacttcttccacaaaatcctctctatcaccatcagatattataggatttccccccagatttcctccatttaaagagctgtgattgccagctgttgatggtcggagcatactgaccggatttccaacaatcggtgttgagttatccgttctcttcggcatagttggtttcaaccatttcgcaccaatggtatgattccgtcgacgaggcgccgctttcaactcgatgtcatatggcttggttagcaagtgtgttggtgtatcaaaagctttctcacaaaatctttcagaatggccaaggattccgcacacaaaacagaacgtggttaagtcttcatatctgaacttcacatagcaaatcggcccatttctcatttgtagcttcatacttttcttcagtggaacatccacacaaatagacactctgattctaagatattccctccaaacacccttgaaatcattaggatcagtttttagaaactttcctatataattgccaatgtccttagccaccgatactgatttaaaacccgatgtgatatcgtgcaattggacccagaaatccagatgattaagcaccaccatcctggggttatctccactttttagtctctcaaacactaaagggactctatcaaatgtccaagggctggcttcaatcactctgtcaatatcatttcatggtaaaattggaacaagaaacggttcggatcaagttccttcacaaataaacccctcactggtctccataaggaggccattttatgttgcattgcttggaaatcgattgtcctctctgtaagaaatctaccaactaaacaccagcgatcatcaaattcctccaagtcctccgccccaccttcatacataatatagccatcatcctcacccatattcatattctgatactctgcctccatctcagtttcaccatattgagtagaagccatctcaccaataaaacactattaaagatcaaaatagccaacaatgtcaccagattcaattagagagaaagaccaaccatgtcaatagacaagacagtgcagagtaaaagcattcttaataataacatgtgattcttgatattggtttagtgtgcgtaatgtaatagtggtattattgaaagttccaaacacatcgattttaggttttgattgttttaaatatatacatcacttataaaaacttttttttttcatttttttttaaaaagtaaaattagaaaaataatagttcaactagatgactacaaaatgacccaactccaaagaaattgttattattcacttcttagttacaattattttttgatttgtatgcataatgtttccgtggcataacaatgctagttgtttaaatgttttctctattagaagtttttcatttttaaggtagtaaactatataaagatggtaaaattataaatttatattcaaattattttatttcttcaggtacaagagcaatccaataaatcatctcaacaaaaaccaacaaaaaacgagaggtatattttaaaagcttgaatataaaagcttcaaactttcgattttgcttataccttgtaaatgccatgatggcaggatgtgtgtttgaaaaatctaggataggcaatatattttaaatgtttgtcaaagttgataatgttaagtggtgatgagtgagtggctgagattgtctaaagtaaaattgtcaataagggtattgggaagtttatatcttcacaattaaggaatatttaatttaaccattccctactttttctaaacattttatatcctcttctttattggtaacacttgacataagaaaaaagaaaccaaatgaatgcaaattacatactttttgttgtagaagatgatgtaggtgatagtggcttggatacaagagaaataacaacgagatctttattcctgaaatgacatgggtggcatatagattgaaattgattaactaaataaaagtaaatgcgtaactttacattaacattgatactaaaaatgtttctaaatttattgctaattgtattcatacatttaatgttcttatgcagagagacatgataaatgatgaaggtaatacacccgtggaggataacactcccaatgatgataatcagcctaaactaaagaaattacgaggtctatcagtgtgtaaagaggtacttaagtggcgaagtcaagagtcgaaagtttctttaaaatggaatgaacatggccaatcgattggagataattgtaggatacttcaaacttatcttggccaccatgcacgcacgttgatgcctatagatttcatcgattggccaagtgtttcagatacagtattgagtaatctatgggatgatatcgaggtaaaagtacttccatgtaactatattttttttttaacacgatggattgtttaattttttttcattaagatgcattgtttgcaggagatatttatagttgatgtaaattttgatcaagcttttatttttgaatctattggccataaatggagggatcacaagttagatttgagttcaaataatacatattcttacttagaaaatccaaagtatgcgaagaaaaatctgactgcattgatagagccacgaaaaaaataagaatatcacaaaggaacaatggaaaaaaaacgttttagtaagtcgatacctgaaaaccaaaactacctcgaattaaaagtaaagtttaagttttaaatttaattctaaatgtaatacaatctaaagtatgtaatgtcaatgataatattt

SEQ ID NO: 188936 - DNA, 2509 bp, Cannabis indica
taatgaagataatttgataaataatgcattcttatcttgcctggttaaggttgaaggcatggaagttgggcttactttaggtttggagatccaagaaggaacgctgaagctttcacttttggactgtggatgtttagttaaagaaatctccataaatttggatggaggagcttcgtggctttatcaagggtatgcaaattttttcaattgttttgctgtagagtactatcgttttgtttggctcctctcgaaaaagggaaaatatgtatgtgttatcacacttttcacttgtaaactagcttgagacctctgtgattactggtcattatccgtactcagattaactcaagtgtaaaatgtcttgaaggctccgctgttctcgctaatcatccacttttacccttcaacactccaaaattgactttgaaatctcccttgttttttacctgaaggaacagttcttctaccttgactgtcctatgttaagtaatttggacgattttgcattgcaatctacatattcttctcagcgtttttatctctctactgaagaaaatgggaggctcaagtatagtggttgatcgaacttaaccaatggcagtgtttagaatagtcaaactgaaatctcttttcgctgtttgctcagagtcatagttctttttctttggcagtgctataattttttggagaataagtattttggctttgtattgcacactacacattcttgatgggcttttcttatcatttactttaaggaagggtctgaatctgattttatgctttttaatccttgatctctttcaatcacttaggttgattgatgcctttgaagaagaaatagagtctgcagtggagaatggtatcaccaagaaactcaaagaagggactttgaagcttgattcatttctgcaagctcttccaaaggaaattccattggatgataatggttctctgaatgtgacactagtgaatgtgcctttactgagtaattcttccattgggtttgacatcaatggtttatttacttcaagtagaaatgccccagttcctagatatactgagaagaattcacaatctttgagtgcttgcgaggatccacccaaaatgctcggaatttcattggatgaggctgtctttaactcggcatctgccttatacttcaatgtaagtctgtaacattaagaaagtgtggaaaatcctatattatttgttttcacacaaaattcatgacttctattcgtgctttttaaactacatctgttgtttataatataatatggttttgtcttttagttttatgttaaaataaagttcttatatctgggcaggcagattttatgcggtggattgtagataaaataccagatcagtctcttttaaacactgctggatggagatttattattccccaactgtacaggaagtatcccaatgatgatatgaatttgaacatttccttatcgtcagctcctgtcatagtgatctcagatcgtggtattgatagtactgtgtatgcagacctgataattgatgtcgtggaagcaagtgaaaaaataactccagttgcatgtatctcattggtaagattatgattttaaaattaaaatgctctattagaactgaacttattatgtcgtttctttccttctatcatataaacatgtctctgtgtaccttttcttttcttggtttccacttttccatcaacagtataaacctgttatgatgattgtggtgatgtggttgtcaactcaacataaaaacgtttgtgttcaaaacatgttaccatcactggtctcaatttgactaaaggttgtctagaagaagtaatacacaagtgacctttgctattaatagtaatgttattttcacaagtatacatattaatactgtctattaggcatatattgtcgtatttgaagaattgaaattgtatgtgatctctagtgttcttcatattacttcttatacgaagaatacacgagctattaatttagttacccttactattattggacattgtgcaaaaagggttcttcgacttgatggaggaggtattgaaccactaaaagagcctaggaagtatgcagcatttagaaagacttaaggttcttctacaaaaattttcttggagcaaggaaagttttttaaagtttcaaacattcttgagcacacagtagaagtattttgaacacttcaaacaaaattatcttttgtctctgcagcttcatattgtcacatgtatgcacccttttcatggttgagcagctttggtgttttcttatttggtttttggaggctatttctctactctacttgatatcatttctgatcatgatgctccatctccctctaccccagccctaaaaactattatcacttctgtcttacaggtgattcgtacctctgcttcaactaaaattatagggaataaccttgctgggagtgtgagattgaacgacttcacaatgtcattgaagtggagtaaagttggtaatctacactt

SEQ ID NO: 188937 - DNA, 4090 bp, Cannabis indica
cttgcgaataggatgacattctaaaatatttcttaaaattaaattgttattacaaagtcaaatagcttcatgacgcaagcttttgtttgtaagaattaagttcttctatacctgagaatccaaagcactctccaatacttgaggtagtaaacgtgcaggatggcccactctcaccaactttactctagtaaataaaaatagtagaaaagaagagtcaataataatgctacctaacatataaaactgaagcactacaacatggaatccactcaatggaaacttaaataagttagacattccaatgattctagaaatttgagagatgaccaaataattcatatgatttggtcagataacattttagatatgcagtaatgacatgtttgcatgtacataatgatcctattagttttgcgagtagatgacattctaatttatttctaaaaaattaaataattattccaaaatcaaataatttcatgacaagcttttgtttaaaagaactaagtagtttttacaaacctgagaattaagcagttttggtaagacattccaatgattttagcaatttcacagatgggttcataattcatatgatttggtcatccatggaaagatatagtgtttcttaatgcaagttaaaatacaaattctatccacagcagaagaattctgtttgatagcatttttagaaaataacataatgaaaaaagtgtcttctgtggatgttcaaacaacacccaagtgaagatgtaatcaaatatcatagacttacctgtgacgaacaagtcgctcaacaatgttgtcaacagcaatatttgaagcagcacatgcaagaatcttcgatccgcgtttcacttcttgcaaaattatttccaccaccgttgttgttttccccgttccaggagggccatgcaacaaaaatacgttctttgatgccaaggcctttgaaattgcttctttctgtggaaagaagaagggaaaaaaagagaagccaataatattgaaaaggaaaccataaatccagtacggcattttcacacacacatgcacaactccatacataaaatatgcaaaaatccacagaaatgtagaacaactggtgctgtggatactatatagggataattcttgatctttggagtccattggttcaacaaaaattaggaagtgggtaaataaacatagcttatgttttcacaaagaaaaagtatacgattgttatgcaataaaatagtgcattgttctttggaattactttcaatcacataatcacgaccacctagaaatatgaaacgacaaggctaaaagtattctctgaagactgaaccagaaaccacccatgaaaacttgaaaggtaagtttagagaagttgctagaagaacattcttgtcttcgaaagaatcttttcttttacaaagaagacttaactgcttgtcaacaatttttaaatactgtaatcaaggaatgtggtttaaatggtcagcaggatgtaattataaacagatctggttatgtcaggattattgacctgagaatgatccaagttagaattaaaggggctgaatgtgaggtccttcttggacactgctggtggcgtttctccaaataagacagggattagatcagaagcagggcccctctgtatgcctttactcaattgtatcaaggcatccttcatcctacgataagtaacctgtgacaaaatatttaatgactactactaatatagagaatggcaatactgcaagggctgaaacattcaaatattttacctcatttgccaccttctcaagccgcaaagaactatttaaaccctcctctgggatgtcatcaaaagcaaccgtaattgatgaatcctgttcagtactcacaacaaagtcaaagttcagaggaagatatattatttactttaactgaaaataccaaaaacatagtgagctaaatttctatctcaaggctgtagctacctttaatcggtaaacaacaccctgtccaagagcaggggatcctatatcagccttgtttggcttcataacaaccacatcatgcgtactaaactgcaagttggggagagaggcgataatagtaattataataaaaggcaaatttaacttgcgtctttatgagtcaaattcaagaacaaattaaggaaaacagtaatttttcaccttgtgagcaggaagaacatctcctttattagattgaaactcaataagagtttttcccattagccctgtctgttggaaaagcaaaagcacaacataataagatgtgatatttcattttgttactaagaagatattctggaaatgaaaaataattagcaaaaaaatgggttttattccaagtgaaattcaatgcactttgacagcttctccaacatcattcttacagtaaatctttggattttttagtttcatccacttaaccttagcagcgtatccacataaaaaagaaatttgcttcctttttcccttatttatcaactactggaggttgatttaataagtcaatacagcagatattacatatataatattatatgaatacctgagcatccacacatttcaagttgatgattgtcgatcctttcttttgggcggtctctaaatttctggatgcgcctgtgtttattgaggctgatatttcagcttcctaaaaaaaaaaaacaatcacagcttcaaaatcaaaatgtatatcgagattttcatcaggaaaatcccaaatttggtctaacgtaacaaaaattcaaattggagagatatccagtttgtaacaaatataaacataaatataatcgaattgattgaaagaaagaaaccttttccaaatcaattagaggagccatgatggagacgaattgatccagagtgacagctgatgatttcatcttggctttccctccctccatggctatttggtgttcgtttcgagggaaaatggaaatgaaaattatagagcggagttgctcagatagtgtctcttctgaacactccactttgagacgttatgggcaattatgtaggatgcagtgtgcgttttgggagtgatcctgaccctccattttgttctacgatcatctcttaccgtggtctgcattctactctatcatattcaaattgtatttctttttttattattattattatttttttttatgaaatttaaagccttcattatacatcaactaagaaacaaatgtgtttcaaaaaaaaaaaaaaaaaactaaagaaacacatgtattttgagtaaaataattaaaaaaaatagtctttttttaatttaatttataagccttatttattgggataatttcaaaacatacaaaaatacggtttgtacaaaatttttaatatttttacggttttttaaattttatttacataaaatacggtttttgaatgtgtttttatgttatactcttgttatttagttgttgattttttgttgttttttttattattattttcttaatagtttcacgtgatattcttattattttcttgtattttataaaatactataaatatatatatatatataaaaaaaaattaaacgtacaaatgtaaaaattttacaaaattgtgtgttttattcaattatcccttatttatttatttttttttttgaatttctatataaaaaaatatattatttttagtttatataaagtactagggaacaaaagcgcgcttcgcgcggatttgatcctaattttacaaattttattttacaagaaatataatatataatgtaaaatataatatattaataaatctatacttatatataaatataaatatatatttatatataaatataaatatatatttacatatttttaagtagttggatcgagaaataattttcttaacaatacacactcaagattttttttaatactatttcaattttcgttattataatagtatcaaatgtatatactaatcacaattttaattttattattgttttttttttgttgttgttattaaattttttttcttttgtaaaaaaataaaaaagaatgtaacatgtaaaatactatcaatatttatatttatttttaatagactactaacaaata

SEQ ID NO: 188938 - DNA, 1976 bp, Cannabis indica
cttgaataagataggctgacttgcacgagaaccagctattacgccctttagcccaaacccacttatcagaaccttgtcaagaaagattgcccccattcaagatagcagaaatggtatctttatcaaatatgctagtcagcttctgaatgtcccatttcctatcataagtcaaaagatcgaccaccttatgtaatccactcacgggacgaccattcgacttgggaaagaaggattaccatgagacacccacaaatcctcccaaattcttgtatttctaccatcaataaccactttacaagctcctttttgaatgatatcatttgctttcaccacattcttccagaaccaagaatttgaatctttatattttcaatgtatgaactccttccctttcaaatacttggcttccaagatcctgcaacaaagagactggctacctgtaagtaagttccatccccacttagtcacgaaagcaagatttatctctttcgatttcctaaaggcaaggcctcctctagatttgggaagacagagcttatcccaagccttcaggtgcaacccatagtttcctttctcaaaaccccacaaaaaatcacggaccatgccatcaatcctagtgacaaaacagttagaaatcttagtagttttcatggcatacataggcaaagaaagacccacgaacttaataagcgtcgctcggccagctttcgaaagcaactttgctttcgacccttgcaacttagagcaaagattttccaaaataaaattgaaataagcatcttttgttttgaccgaaaaagagggagtcccaaatacttaacattaccttccgacccaccaattcccaaggcttcctcaatctcatttttcatatcaaccgaagtgttattactaaagaaaaaggaagttttgagtttattgacctgttgaccagaccaatcgcaaaacttctcaagggagtgccaaaaactacaagcttgttttggagaggctctaccaaccagaatcaaatcatccgcaaagaatacacgggaaagagtagggcctccgcaggagagacagattcctttaatgttacccctcccgaaagcctcttctggcagtcttgataagacctaggccgcccaaataaaaaggttaggaggaaaaggatccctttgacgaagttcgcacgactgggagatctgcccaacctcacctccttgaagatacacactcagggaagtggtcaaaatacatagagaaacccaattcctaaatacaacgggcgcatcaaagcaacaaagcacatgatcaatgaactgccatctgatcttgtcataagctttcaccagatcaatcttgatagaaaaaaccttttttttttccttttttccttttgaatgagtgaacgatttcttgtacaatgacattattgtcatggatattcctacccggcacaaaggcagactgggttggataaattattctcagcagaataggcttaattttgttggcaataattttgaaaatcactttgtatgacacattaaaaagggaaatcagtctatagtggttgtccctgtttggattctgaattttggtaatgagcattaagttagtagcattcacccccttatgcataactcatgaggaaaagaaatttgagacagccttgtaaaagtctaccccaactgcctcccagtagtgcttaaagaaaagaactgacatttcatccggcctagaagctttattagtacccatggcgaaaagagttcttcgaatttcatcatgatcaaggacatttactaaatcttcctgctcaagtggggagagtttatcaagtataaggttagaacaattaagatccatcccagatccaatatctatgaatatttcctttaagaaacccgtaaactctttgccaatcgcactacgcctattaagcgaaactattattcaaaatactctcaatagtgttgcacctacctctaata

SEQ ID NO: 188939 - DNA, 4306 bp, Cannabis indica
aaatgtcattattacaaaaggattattataatttgttgactcccaaaattcgctaagtgtaaattttggagttattaattcggacgagaattaatatttgaaaagttatctaaaaaatactcagtcataaagtcggggttgttccacaatgaagatccctgcgcaaagaaggtcccgacacgaggagcaacaagtcaacacaggtctccatacgcaagaacccatgcttcgatgcgctccttgcacccaacacgttccatgtgacaagcacacaatgctcctcgcacacgtgtgctccatgtgatggtctgcctgtgtgccaacctgctcgtgcacgttagctagcagctcgtcagctagttgtgcgttatttggtcatgcgtcagctaaccgtgtgtcagttggtcgtgcgtcagctggccgtgtgtcagttggtcgtgcgtcagctggccgtgtgtcagttggtcgtgcgtcagctggccgtgtgtcagttggtcgtgcatcagctggctgcccatcaactggtcattcattagttggtagcacgtcaactgaccgtttgtcgactaactgttcatcagcttgccgtgcgtacttctcatccgcaagcacaccaccgccttagtacaatgataaggggcaaatattaataaaaattaagtctaaaatacctataacaaataagctcaacacttagtgaaattctcaaaatgtcaagttggcttagtgaacaagagaaaaatatacaaagaaggtacaagtccattaaagcaagcacgcatctgccaaagcccgtggagaggaggtgtgtgcatgtactaaaggattcaatgtgtacaagtggtgtaggcatcatctgcctcatgatcagtacgggttgacaacagaccaacacacctccactatttcccttatattttagaaccacttgtattttaaagtcattagagctccctataaataccccttttttttattttaaatggggtttattaatcaagttttgtagtctcatgctcttaaaactaatacaggaaatatttttcaccattgctgcttctttttctagaacttatttagtcgatcatatctaagctctcatctacatttgattttccaaccttaatatagttgatgagttcctacagtcaataattagacaccttctgtgggaagtgcaagtccataggctatgtccttccctaagtattaaccaaccaccatgcttagacattcctgatgtctccaaaacaatagagttcaccaaaatgacaaccagtttgtcaccgccataagggaacctccagtgccggtcgccagagatgacctctaggccaatgctcaaaaatagcccccaacacaagatgaggcgatgacgacattgatggttaaccccatcaatataagtattgagccattgagagagctatctccggtaaaacatattccaccatctatgctagaagaccatgatatttcaagacgtggacccaaaaaggagaagtgggtgtacttagttagctcaagctcccaaactcactactatgaataggagataagtaacctccgctggaagaaccaaaggctagaaactgcagtggctgacatgcaaaaaaatgttgagtggtaactcaaaggcaaagcccgagcctcacgcttccagtacaaaagccaccgacaagggaacgaggtctcatctacatatgttaattgaggaaaccccatgtcctccgctgataatatcccgcaaggtcagctttgaaacacctgtcacgaggtaagaactctatgggttagttgagattacccgagcttactcaccatgagaaggtacactaaagggaacaccttataaccttaggaagagacttcacagaatggtcttatgttagggggcgaccttgcctatggccctttcccaagagcaagcaagtgtgaggccttatccttcagccttagacagaagtcacacgatgatgggataggagtattacatctcacatgcccttagaaaaccacaaaaaggacccaagtttcacttgctaactcccgagaaaggatgaaggagctgggagcggagatgcaagacttacgtcataagatagctgacgcctcaaagggagacttggatgatgatgagtttgatgaagaatcctctttcacaagggagattcaacttgaaccacttccacccaatttaaaaggactatgaataacgccatatgatggtacaactgatccaaaatactatctcagtgcttataatgagctaataaaaatgaaaagagtctcaaacaaagccaaatgtcaatgttttacgatcacattaagaggatttgcatataagtagtttaagggactaaggctaaggataatcacttcttgaaaataatattcaaaagaattcctcaaacaatatcaagctacatgtgagtatattatgcccgtcacatgtatccccaatgtgaagcaaggagaaaaagaaacttacaaagctacatccgacgcttgaacacgaagttaccaaagtggagaaattttctaaagatgaactcaagatcgtcatgttgcaagagtatgccttaagagtggactatgggggaacatgatttaaatagaattggatggtctagacgacttctacgaaagggcgaaaaaatacatctgtgtggaggagggcaacaaaggcttaaaaatataaatgattgatcactcatttggaagctcattagacccttacagggtctgctaggtgatacccctagcactaataagctgatacatttgagagaagcctccatcccacaacccgtaaacattaagcatccaaagtaaagttctcctatttccaacagtcgatcaaataaggcactcctagtgatgccaagtatatctttaataagttgtactaaattaaatagaacacctaagttgacctttagaaatagcaattgtacccaggcgttacacatttgtcttattaatgaaatattaattttttgcctaacgtgtggcattcctcaccctccacacttttattcaacttgttcactatacttgtcaatcaaaattgacaaagtagacaaagcgatgcgatgagcaaaagtgcctagcggcgttgaatgaccacataagggtaaaaaaagaagaagaaaaagtacgtttatgagaggggcgtctctctaagggtaatacaaattctctagtattcaaaacacggtccaagcgccacaaatgcggtagaaaaggttgagtgatgcctaaaaatccaaaagcttccctaatcaaatattataccatgaaaggggttgagtggtgcctaaggggccaaagctcccccaataaaatcttatatcttaaaaaaggttcagcatagcctaagggcccaaagctcccttacatcccatgagtaatcaaaagaaaaggttgatactgctctaagagtcaatactccctccatggaaaggttacataagagaagtagtcaagaaatcctaagtggcaaaaagctccctcaaacaaaatgataactcatgaaagaggtggatctaacgctcccaccacatgataagtacctaccataaaaggggttgagatagctcctacttaacactcccccataaagagtcataacaaaaagacccaagggtataaatgcctaaaggggcaaccatgggaccgaacaacaggagaaaacttcaccaaaattagtctacaagaacacttgaaagaatttttatagactagggggcaagtgttgactcccaaaatttgctaagtgtaaattttggagtcattattccaggtgagaattaatgcttgaaaagctatccgaaaaatactaagtcataaaacacgggccatcccccatatccctgcataaagaaagccccaacacgaggagcgacaagtcggtacagatctctgcactcaaggctcctcgcgtccttgagctcctcgtgcccagtgcaattcccgcgcccacgcgctaactggccattcatcaactagtcgtgcgtcaggtggttgttcgttaattggctggccattcgtcagtggatcgtgcatcagttgtatgtctcattcgcaagcacaccgccaccttagtacaattataagaggacgaagaacgatcatactaattctaaaagacttatgacaaataggctcaacacttagtgaaattctcaaaatatcaagttggcctagtgaacaagaggaaaatattaaaagaaggtacaagtacgtttaagcaaatacacttttgccaaaacttgcgaagtggaggtggatgtaaaaaaggatt

SEQ ID NO: 188940 - DNA, 1704 bp, Cannabis indica
taactattttcccattcttaggattaatgttgtctgaatgttttaatcatttttggtaaatatttgaatgtaatggctaaaatcagaatgggaagatgtgggctattcgattattatcagtagcttgtttatcattggcggctaagatggaggaatgtaatgtcccaatactttcagaattcccaactacagattatgactttaaaagtgatatgattcagagaatggagctaatggttttaagtaccttggaatggaaattgggatcaataactccatttacttatctaaattacttcatcaataagttctgtggtgattctagaccaaaaggactagtctctagtgctgttcaactgattgtggctgtggcaaaaggtaaaaaaaaacaatgacatttgataccaatcccaaattagtttttccctttttgttacatttgccactaataatcaatctctttctctttttattgctaatcaatctgtgttatatctggtttagaggctactttgatggacactcggtcgtctattattgctgctgccgcggtattagctgctcttgattgccaattaacaagaaagataatggagcttaagatgaatgtggtctcattctggcgatcagatgacaaggtgagtgagcttattataatcataatcataatgttttcaatgaattaaggaaaaggggttggttggcataagatgtttcacactgatataatctttttctctattggaacaggaacttttgtattcaacttataatctaatgcaagatatagaaaaaggaacaataaggacaccagagttatcaatccattcaagctctcattaccttaatgagaatgcatcattcaactctggggttggaactaaaagaaggcttactttcaatgagtctgatcacagtagtccaataaagaaaggtcacaggacataggaaaatttgttcttcttcttctgcaccagagattatatttgagtttccctttattagacttacaggtttttctttctttctttccttttttttccaccttttgaaattgaatttttttctttatttttatattagatggagttattataggtttaatcaggggtttaaaaaccatatgacatggtattatttgcaatttgatgattgaggttacaatttccaataccaaaaaacaaaagtttttcagccagttgagtgatgagaaaagaagatagagaaaagggaaagtatgtaaataaaagaagataactttagcctacagtaagaaacaagtaagaagctgactgaagttcaaaagaggccattaagggagtgaagaaggtcaatagtgaaccagaaaagccatggaagactgcttgtctatattgagtgtttagcatagcactagctttcataatgctactattgcttaccagcctactttttttttttcctttcttttttgatttatttgtttcatcttcatttaagaagaaaaaaaagaacattttattaatgttatacatcactagcaaacccctaccttttgatgtgggggggacttgggatgcttcctatgtctttcaaaaggctgaaagccatgaggaatgaggaattgttttagtttgatttgatgtatctgtgttaaatattgggccattgaatgaaaagtatataaagttgaacatgattttatttgctgggaatgttgggttt

SEQ ID NO: 188941 - DNA, 1352 bp, Cannabis indica
ttttttttttttttgcaataatagagataatagaaggaaaataaactcaagagcatataaaatcaaaattaagaggagaggagtgttgtgacaaattaataacgagaaagattgggtatgttgagcaatttcatattgtttgaaaaagatcaagtacgataattttgatactgtgtaagtatgagattacacagttaaagccttgaagagatcttaaatagatttatgagtactacctatgacaatatgatgcatattcttttcgatagcccatcactagggatgagcatcagtcggtgtggttgatttttttctatataaaaatctataatttagtttttggtcttgattggtgcaattcaaaaactgaccgcccaatccagaactttcttaaaactgactgttttgaacctcaatactcttttttttttaaaaatctgatccaatttgttctataagcacattattctacattctacaactccaaccatataaattaattgttcaaaaaccaaattttcttattcttttaactttaatattaataaaataataatatatttttattatatattatcaataactacaatacataaagcaaaaacaacttaataaattaatatatatgtataatggtcggtttattattcaaaaaaaaaaattgacattcaatggcagttttaactgttagtggttttttcaattttcagtttcgccgatttcggttccaacagtgttcggcaggtcagtctgaatggtttttttggttttctaaattgcatgctcaacctatccatcacttaagaacttcaaagttaaatgtgcttggcctcaattaaccttagatcataagtgactttctagaagttttcctaagaagtgtgcatatatacccgtgtatactgtgtaaatatgagactacttaagtgaagcgaatgtattacaaatgctaaagagactctcttttaaactctcttcataatttagtgacaactctcactccttagcactcctctaaaatcattggctaaaaagaaatgaggaattagagaaaaaagattgagaaatgatgtagttggttcttcattaaggcaaactagacttgtgttttgtgccttcaaaaagcagagctataaattctttattaaagaaatgaggacttatatcaaaatgacttgtaacaagtttgttatttagatttttacgagtatttctaatttatgtttgtttggacgtccaatgttatgtgactatagtatatagattagttatcgatattattcaaatatataaaatgataaacaacttgtaaatcttcgtattgttttatctttggagtttttttttttttt

SEQ ID NO: 188942 - DNA, 2539 bp, Cannabis indica
cttgtgtcttaattacaacaaaaactctttaagggagagctcaagtaggactcaaattgagatctgaatcacgataattgcttgttctcttaacttccttttctattttctacatttgttattcatttcagtttatgttttttttttgatatcatattagattaaccttgatttctcaagtcttgtatgtagaagaattactatagtggtatcagaattggattctaaagttagtcatgtgaatgaatcttgagaatgtaaaacaaatgagatgagcctcgttaatctcacgatgagatctatggatgtgctcagttagacatgtgatgtgctttttggaggagttggcttgagaaagagtaagaactcttgagatagtggtagtactccatgcaaggtgtgtgctttaacgtatttgaaggaagtacactaatggtggagagtggacagatggaagatcatttaaggggaggcgaggtggtctttatttgaggatgattattggatggacaactaaagtcatacaatggctagtaattttgtgaggacttaaacttaaagcagacaatatcataccaatgtagaaataaatagtgtctaacatctcaataaaacttttaaaaaagacatgaaattaaaataataactattttaaaaatcctatatatttataatatataatatgttatattaaaaatgatataactttctgttttttttagggaaaaaatgatgtaattacctaaacaataatattaatacagatgccgaacggctacgaaaccttaatacagtttagttagttatatattaatgttgacattatttatttatttatttattttgtatggatgttgacataattatttataatcatatatatattgaaaagatcaaacactcaattaataataagcaaaaaaaaaaattgttatttaatttgtggattaagtaaatattacattggctgacacagattgggcaacgttaaatataatatataataatatgtaaataaatgaaatcatctatatatcaacttgttaaagaacaattaattgttttgtcatttctaagcaataatatctataagaatatatcattttctatatgattgcttgaaaatgaattaaacatataaccattaataattaattactttgcggtaaccattattagtacttttacatacacatatatatttggaaaatatgagtgacttcataccctatcatgccacacatatctagctatatatagcttattatataatatttaagctacgactttatatattaatattgacataaataaaaatatattatgtttgtctagtaaataattattttttggttgaaaataaatttataattaatattataattagaagggtgatgaaactaattaaggagataatgaaagacgacgaccaaaaaccaaaatcattaatgtataggcaacctgctggccttgttttttgtcaccttttggatggcttgtgagagacaccattagtcagcaccatgtgagagagacacacacagagagttcttgggagagaaggaagggaatcacactactatatgtatacatatatatctatatatatatatcatcatatgtgtatatatatactgtatacatgaacagtactcctatatatgtactagtgtcttgggggaatgtatttataagctaatcatgtattttgtttcttatttgtgtaatttttataaaattgttcaaattataattgtaataatttaattttaataagaatttaaataataaaattattaagttaattatgatataattaaaagggatatgttaatttaagtctattgagcttaagttacggtggaaaaatcactttgacctaatacttagtgttattccgccatacaagtgattttacatatttaatttagttaattaattatttagtagttatttaactatggtcaaatcaaaaagatattttaatttaagtttactgtgtgattataaatatatctattcagtctctttttatactttatcgattagaaacatgattctagcactaatataatttgaacttttagtaacactatttagtgacccgcacaaattctcaatattcagtgttagcctcatgtaaagtgcgtcattaaaaacataaagagtcactaaagagtaaaatccatttttttaataatttttattaatttgaaaaatgttggtttatagtgacgcgccagacgcgattggctaaatatctcccggcccacctgtcgtgtcactgtatcataatcctaaattttaaaaaaatacacatttgtaattatactttaataaataaaaaaatataaaaatatatataattagggtttacatgagaaatcctagctgacgcacatattcttctccctcttctcgcctctcttcttctccctcttctccctgctgactaccatctccaaaaaacagcggccaagaggctccacgatgaccagccctccttcacccagatatgcatttattctctctctctctc

SEQ ID NO: 188943 - DNA, 2160 bp, Cannabis indica
acattcctcataaaaaccctacagcacctagggatttgaccatgcattactcatggtatattcattgggaatacccaactttatggatacttacagatacacttgtaagaacaattctagggattaccccaccaaaacactataaataccccctcaaagctcattaaatgggatcgagaatcttgggctgcatatgagcaagaagagtaaatactcaccaagaacattctctgtatttataagggtgacattctctcaagtgtagaatctgtattaaatacatccattaataacaaagactcgtggactaaggctcattaacgccccaaccacgtaaaaatccttctctcactttcttacagctcaatattataatcatattttattagttgccgaaaatctcggtcaacacaaattaaccaaaaatatttttttaaaataaatatacataatttagttacaaagcaagattaaaattatagttactactactgatacaaattaacaaaaaaaaaaatagttccaccataatataacgctttatttatctagttttttaattttattctaccttattttttaatttaaaatgagaaattaactataattatcaaagattcactaattagatataattatcgaatctgcaatttgtttagttaacattctttgaggcagttaaaattctcttggcagttttttttaattttttttcttttatttctttaaagcaatttcttcaaaaactttgggatgatgttattttttttcagtcgatttgggtatattggcgaatagtgtcagagaaattgaattgtcaacaaatgataatgccattgatgagtgaaacgtatttttggaatacctgaatgaagcaattccgatgttgattccacatgttatttcatttaacaaattatatgttgcaccttaatttctgtgagatttttgttgtaacgtgtcacaatgtaacaagcaaatatgcctttccttttgtatttgattctctatataaatgaatcagtagcactcatgcttatcgagttgaattttcaatctttgcatttttctcaaaatcaaacttggtatcaaagcttttgaaggctaatgctaatggcaaatgaaggcagagatgtcacaggtcacaccaacaaagacaagtttagaaaactcttcagcaagctccggtgttcagccaagttcatccatggttgcatcacctcaggtaactcctttcaacagcacattgtgtcaatcattttcactcaagctggatagaaataactatccactattgaaaactatgattttcaccataatcaggggacatagactcgaaggcttcctcactggacagaggacgtgtccacctgaaaaacttcagagttcccacaactgatgagaaaggaaatgttagcacaatatcattcccaaacccagagttcctcatactcttttttgacctagtcttggcctgccaccaaaacatctccaagctcggagacaggctcttcgacctcatcgtatccaccaaatggaagagcctgaatctcttcctcttcctcttcttctccttcaacattaggagaatcgacaggacagacctcaccctggtcctcaatttcctggatttcaacatccccagtggtaacttcagtgtcctccctaggaagtctaggttggtccgtccaagttatagaatctttttcacgtgtcacccaggtagatgccatgtcaccttgtgtataaattgagataacacaattcaacatggcacttaacatctaaaattagatgaaaatgctaaattactaatataatatgagtttttgaggttcaaccgtcaaaaaattgagtttaaaaagttaattgctagcgaggtaagatttttagagattttgccacaatttacttatgttactagtggcaaagatcaatacaaaatgaaaaaagtaactttaagtagtataaatgtaaaaaaaattaagtgaaagtaaaaacataataaactaacttattttagtattttatgtaaaaatctctaaattgttcttctttttattgggcttaatttctcttgaccctctctttcaatgtcaatccacgttgaaggcaccaaaaatgttctatttattgattattctttctttcctttttttt

SEQ ID NO: 188944 - DNA, 2913 bp, Cannabis indica
  modified_base (2855)..(2855): a, c, t, g, unknown or other
aaaacaactagagagagagagagagagaaagagagaaaacttgatttcttatttttttttactatcagaagtaattgatctgtatcaaaaaagtttgtttagtaattgatgtgttgctcacaataagtattatggaatatgtaatgccccaataaaaagaaataaaataatgctttaacaaagcaatttttgttatctaaattaggcaggaaagaacagaagagattccttattgatgtttctcagtgagaaatcttataagagaaaggcccaaattctatcttgttgctgccccttcaaagctgcaaaattgaaaacctttcatgcgggtaaatatatttgagaggagcattaaataaaaaaaaaatctgcaaataacacgtgtaaagatgaagaacaatttctaagatatccaatttagagttttgactaggaatggatttaaatattatgtatatatatagttataaaggtaaagagacagcagtcattatttgccatcaacaagtttgaaaatgcagtttacaggggagactaatgaatgatactcaccagaaggttcatgctggattcgaattaaaaacaactcaattcaaaattttatctagcaaactgaagaaagtaggagtatacatactgtttaacagaatgccacaccccaaatggtacccaaaaaaattataatatagataataaaccactgattcttttaagcatctattccagtggctaagagaaaaataattgttagccaaatagaaaaaaataataatagtacacatcatcaacaggaagagcaagaattatctaacctcagtgaaagcaagatttacgaggtacgaaagaaattgtccaccagtaatcataagaacattcattcccactaatcctccccttatttctgatggtgatgcctctgcaatatatacaggagcagtaacagatgctatgcccacaccaagtccaacaagtaggcggcccaatataagaatataaggatctggtgcagcagccattacaactgatccaagagcaaagataatatcagcaagaagagtggccttcttacgtccataagcgtcattaatccaacctcctgctgatgctccaatcatggcaccaaccaacgccatgctgacaattgtttcctgtcaagtcaccaaaacaataagataaattcataggaagaaatattcttagtatcaaaatcatctcccggtagaaatagatactaacaaagagataagttgaagaaaacaaacaccatagaagagatgcatagctccaaatcatatcaacattatcactacacccaactagatggggaccccaaccatcataggaactatgtatttaaacttttgttttcaaactgtgcttttaccccaaccatcttagaaactttgtatttaaacttttgttttcaaactgtgcttttaccccaactctgtgttcataaaagtatagttttccattgtttttcacttctataagaaaacaaatagtaagaatgcacaatgtcccaccaataatgaaagatttaagggtaacagcttgtacctgtagaaaactactttccctaacagccacaaaatcgtctttgatatataaaagtgctccagatataacacctgcagttaccaatttaatgagataataatttcaaaagaaacccaaaaaagatagagaaagaaaattgagaagaaaaaaaaagatttgaaggaaagcatataagaatatacacgaatacagaaacataatcacgaaggtgcaatttctaactaaactccagaaacaccataaacaaatccagcacataaagagtcatatttagggacaacggtaaatcaagctaaacggtaggaagattaacacagtaacattcccattcctattctaagtctaactaatagaaattacatatcttccagaatcaagcatgtatgtatgcaacacatttatacataaacgaatagacaaggatatgcagagcataatgaacccttatctccacaattgtattcagcaaatatttaaataaaattatccacaaagattggaagcaaacaatattttatttagtaaattattccttgattacaaatagaccaaaaaaaaatatgatgcaatagtaattcacatgtgatgttatagatttataaaaaaacacgatcaaacttttctagttggatgatccaataaaaagcaaaactcatatacacacaattgattataataataataaaaaaataaaaagatggataactaatctatatatggataacggtgaggtagaataccagtgtcgtatccaaaaagcagtccaccgatcccagcaactatagtgagacccataatataagggttcttgaaaagtgatatctttctctctgggtacatatccaaatacccagagcttcctggtaatgaatcgatcgtcataattccagggaagaaaataataacgaagatttactcttccactaaacgcaaaacaccccagagatcaaacaatatatatttttatgatcttttctttctcaaatccgaaaatagtgaactgaatttccagatgaaaattgatcaaaatagagaaatcccagttaaattttttttcttgaagaatttctcttccactccaagtgaatttgaatactcagaaatcaatcccaaaaaaggtatgatccaatgaagcaatttcgagctcccttttccaataattaagaaaagatatacttaggtgaaacggaaagaaaaagtaggagaaaactgagccttttccgttgaagacagctgagtgacccgtgaaggaggccaggccaggcaattgacggttgagatgtgatggtggaggngaaaattgagagacaaaagagagagagagagagagagagagagagagagagagagaga

SEQ ID NO: 188945 - DNA, 1791 bp, Cannabis indica
gtttgtgctctccatattcttggatgttgtaactctaccattgtttcctaaaacttcttcacctatcaccacattgttgtttgatatagcagcaaacttcttttccagggaatcattatccgtgtaacttgtactgtcttcaacaatagcttgtattggcttctcttctggtgaaggaatgttatttagaacaatttgttcttcgcgtgggtctaccaacggtttctcttgtgtagtcacatcattattagtaatggttggctcattgtatacatcagacaccaattcctcttgtggatgagtcaagttctcatcagcattttgaatggaaacttcatcttcctcagctactatctgaagctccgtgttttcccaatcttcatagacggtgattgcattcttagtctcccatgtttgaaaaacccgatctggaccaggctgccacaagacctccccattgctgtctttaagtatgaacttaaagtggatcgattttccaataggtatatcctatcatagtacaaaacaaagcaccatatcaaacattgtctgtaacaatcaacttgtaaatatgtagtagtctatctgaattccaactcaccagctcaacaatccacgcatgcccatctgaccagttcaacggtattgcactttctggatcccacaaaccgaaaataggatcatctcccactatgaaaaaatgctcaccaaacatacattctttctgtaacttgaatatgacacgagctgtttttgattgatctacaatacagagatgtggcattgaaactaaaagttgcagaagaaaagataaggaattagataactcaaagtccgaactcacatctgcctttagcttgaacattctctgcctccaagtccacctgaaaatgaaatcagatggggttgtcagtatcaacaacaagatcactttctcccaatctacttacattaagaatattaaaaaaggaacttcattacaatgtggttactatgtatatgccctcttcagtttctagttcttctttttcaaaaaaagtaaccattcttcaaaaatggggtaaaaaactacaagaagaaagaatttaaagtacagaactaaactttgttagcagtgctgacaaagtttattgtattccttgcttgatcagcaaacaaaaagagaaaaaaaatatataaattgaaagagctgtaaaggcaaaaagggtcattttggtatgaagcagcttatatagaataagcaaaaatagaagtaaaatagtcaaaaattaacttcatgggattctttaagctctgacacacacacatacaaacacaaaagctgacaatgaaacttccattgatgatctaatcataaattctgtaaatatataaaaccacaaaccaatccaaaaaaagattccaaactttacttattggacttggacacgataaacaacaaaacaaaagaattatcattaacaacttcaaataaaaataaataagaagaagaagacgaagacagacctggtttttgggtgagatacaagaaacgggatcaataaacgtgttggttagcttaacattgttgaagttcaagaacccaaaaccagaaactttaacccaaggccttaaaaaacacgtctcgatcaaagacgaacaagaagaagaagaacctctttccctgcagtacgagtcgaaggagaccctgcaacttgggttggttagggttttcatgactgtggtgactcagtgactcaactcggtacttccccagtccacaacaaggtcagtttttttttttttttgttt

SEQ ID NO: 188946 - DNA, 744 bp, Cannabis indica
cgcttaacacgaaatataaaaactgattaattaaaatatgacacaaacaagaacacaataatacgttttaccacacctaattttaatatcaaacctcataaattttaatttaataaataatatataaaactattaattaattatttaataatatagtgttgagtatgtatattagtctcaaaaaataatgctgataaaataaatataaaattaatattgatatgagtgttgttacctagtctttccgttaagttttttccaatcactttcgttactatttaacttatattaaatgatgaagccttttataggtctctgtctcattctccaactctaaaagtttacttagttttaaattggtcttattggttttttttttcttttattaattatttttttcaaagatactattcttggtattgtttaccactactcataatccaaaagaggaagattaataagattttaagatcatttgtggtgtaatagcattagcagcactaatattttatgataaaaatataattagtttattattgggatttagtcaaataccactaaaattaattatgaatatgcagagaatcaaaaatgataaaaccaccgtcattaatgatttatttatggagtaagtgtcattacttactccattatgaatataatgaccctcgtgttgataaatacaattaatgatattttaccatgtgactatataataataggatttatttctactacaactct

SEQ ID NO: 188947 - DNA, 1897 bp, Cannabis indica
taagaatcattttctctgagaaattttatagagtgaatcaaataattcaatgaacacaaataggagttcatgtatactcagaatttagactgatctactaatgatcatcgttgtgatataaacaattctttcatagtaaacgacatgttgatgaaagaggttattacatataggtcaagtcatgtacaatcaaattatacacaacacctttactacatgtctatccacatatgtgatctgaatcaaaatcacacacactagaaatgtatagtaaaccgtacttgataattccatattaaagatctcttactttaagacactacatacttgttttatttatattgtataatcttaattctcttgtacggccttactagattatactatctctatatgaataaagaattttcagatatttattaattatacttctataattaatgtattcatttatcttatatttgtatttcatatattctataacatattagccattaaatactttgtttagagtataatacctaacatcctcttcctttggctcgatttccacctccttcatttgaatgtcttcctccatgtccaccatatggttgagagtagtgggaaaatcctcagccttgtcctcccgtttgtggcttttggacaaagtttccttgagggttaaccaaggtatgatgcttttaccatttgaggataagccttgtagtctttctatcttgctgtcaaaactgagtaacatctcttggagcccttggtaagaggtatttggtcgagcttcaatttgaagcacattggtaaagtagctgacatcaagacatgagagaacattggtgactaattgtgagtcaggatttggctcactagccagggctagccgatttgcctaattcttcttttgcatgaggtacttagtcattggcgtatctcttgtcctagtctcttaatcttcttgtttcatccattttagaattagaatgagcaccataaaattgttcaagggcttgccataactctgttgcagtagcaactcccatcacttatgttgctatagtctcagtcattgagctatacaatcatcccatcaacaactaatcatttatgatccaattttcataagctagattgacaatttgagagtctgcaatgtctatgctctccataactgttcttgcattaacaaattcaggtggacaatatattagtgacgttgagaaacccatctagcagatggcctctaactatagttgagaccaggttttccataagttgtagttatgtctatcaagtttgaaagagaagggttggttcaaggtgcgaaagtggtttgtgagtgggttttgaaactgtggtttgctcgagctagcacccatcacaatggatgttgctgcagcgcttgagggttgagtaggattgttgtttctagggttttgggaatctgacgacatggtgaaaatggtgtggctctgataccaagtttaattttaagcaaaattaatttgtgaaatctcagctcaaactttgagagctagaataattgctatttattatcaaaggtcaagggtcatttacaacagaggagcatatagctcaattacatttggcaagcaatactaacaaaaaaagtgaatatctcgtacacaccatagtgcaatcatcgttacatttgcaacattataatctacctaaggatcactaattctaacagcttcttagagttgtgtcatttgtccattgaaggaccacagtcataatagaaagatgcagcaaagaaaaaagattaatttcgtcacaccttcttttctatcaaatatagtgataatctcaattcttaacgcctttcaactaaaatccactaacagaaactttacaccaaacacccttttttttttttttg

SEQ ID NO: 188948 - DNA, 1295 bp, Cannabis indica
ttttttttttttttgttaaatccagaattacagcagcttgtatagcatttaatcagccgtgccatgatagattggctagtcgttgtgttatagaacgaacaaatttcatagtgctttcacaagaatattatatttcatacatattaaccaaagccacaattagttcactcttatatttatattactataccaattctcattttcaacaatcacatttttctgaaggaaatgaaaggtttcacatgaagatatttgatattctggtcactggaaaactatatctacatctgggtcaagattaaataactaaaaagaatggtaaacgaattaaataggttttgtcagtgtagctaaataaacacaattaatagaatcatttccgaactatggccgcgactgatcgagattcttttctcctcatatatttctgtcgcgcatttattattgatgaaattaaacattatgttaaaactcaaattcttgaataaagctactccgtatacatttgctcatgaaaatcaatatatatatttatatgcttttataaatatctattacttggtcctaatctgactacatatagcaattatctctatgtgtcttttactttctatatgcttacgcaagggtttatatttatagatcaggatcaatatatatgtctgcttatattgtcgatttggctttttacaaccgtgcatggatggccatgtaagccaattcttacctcttctctcttgatcgtatacgcatgtactcctctggtttgtggttggtttcgattttctatcaaattggtttgagttgcacatgacttgatttatttcatctgtgttttaaccaaatcatatcataggattaaacaagtcagtttctaaagtataatacttataattaaataaaattcaagcattttattgagttagaaactcatcacgcactactatagtaaatttcctagctaatataacattgcagttggaggtggattgcacttccaataatttttctactctatcttgtacctcaacaaaaccttagactatctctcatagatgatctaatatctgtactaaaatttagtataaaaaatgagtttatacaatatttgacttactatttatatttgtgtttcaacgcacaaaatataaaattttaaaaaattaattatattaatagtcatttaatataaattttattaagaatatatcaaaattactttttttattcttttattatttataaaaatagtaaataaagaatgtaactttcataaaagtcaatgaatcataata

SEQ ID NO: 188949 - DNA, 921 bp, Cannabis indica
cagtagtgttaggtgctagtgttcgggtcaattagaaacccaaaacattagatagttatgctccaaatcttccaagttttgaaaacaaatctttgtacagaattagaaactcatgcatgcctccactcattactagaaattcaactgttaaatcacataaaatattatgtacaagttctttatttttgtttttacagatatatttgagattgactttgtaaaattctaaatcaactcagaaaactaagcattaaatttagaagaagtagcttacaattagagagaggtggcataatattaatagtattttgatgtatacaatgtatcatacatgtcttcatctgccagtaaataccccactaaagacctggctattccctccaagtgatgcttcccactctgttgatgacatcatgatttgagacagcttcaccacaatctccctcatctctggtctgtctactgcttcttcttctaagcaagactctgcaatttcacccatctgcacaacaagtttatataaatgagttgggattaactttgatatgttaaaaatgagatttttagtgtcaaaatgattaactttgaagatttcctcaaaagggtagctgccacgaagatttccatctatttcagcttctaaagctgactctggatcttcatcttggaatattgtcttaacctgatcagatggtacaaatcaaaaacacgcataaaaaaccaatcttgaaaatgattttatttctttcataacttactaatgtaatcaaagatttcatcttgttaggctctctattgttacggattagtgcacgttgccctgtgattaactctgctagtaccacaccaaatgcgaaaacatctgtcttaggtgttatttggaactccttcaccgatcttatcaaaagatttataatgtga

SEQ ID NO: 188950 - DNA, 6088 bp, Cannabis indica
gaaagagaaaagggtttggaaagtcgaagattttgtggaagttctcgtgaatataacaatggaagattatggtggtaaaacaacatcaatttcattgctagaggagtcgccagtttcggttggaacgggaagtagagcttcgacggttcaaacgcttgccaacatcgtcgtttcgattgtgggcaccggggttttgggtcttccttttgctttccgaatcgccggttggcttgctggctcgattggtgttatggttgctggactctcctcctactattgcatgcttctcctggttggtatattattataaatttatgatcttgtgtttgtttcccgagaaaatttaattatttgggtattttgtattttttttttgggaataatgaaagaaagaattttactttttgaatattcttaacgagttgaatcctctttctgttcgaccttttttcgagtgggacaggtgaagtgtagggacaagttagcatcggaagaagaaaatgatggtgattcagacacagattcgccaaacactaaaacgtatggagatttgggttatgaaagcatgggaacgacaggtcgttttatagctgaatcccttattttcattgcccaatgtggaggctctgtggcttaccttgttttcattggacaaaaccttcaatcagtttccaaagggcatctcactttctcttattacatacttttattggtcccaatcgaaattgggttgtcatggattaggagcttgtcttctttagcacctttcagtatatttgctgacatttgtaatgtgttggctatggggattgtgattaaggaagatgtacaacaagctttaaacggtgagttctcctttaatgacagaacagccataacatcaaatataagtgggttgccttttgctgctggcatggcagttttttgctttgagggatttgggatgacattggcattggagggttcaatgagagacaaaactacattcccaaaattgcttgctcgggcgttttctgtgataacccttttgtatgttttgtttggattctttggttacatggcttatggtgatgaaacaaaagacattgttactcttaaccttcctagaaattggtgggcactagcggttcaggtactgttttccaactttaatgctttgtgcgttttagtttcacattttgtttgtccttttctttctatttattgcttacccttatactagcttcatctaatatgtacaaagcttctattttgcaatatggtttgcttatttgctctagaattttttatttttttcccctttttcttttggagagttattataagtgttccgtagatgggattaattgctttcatattatatacctttgtaaaaatatgccaagctttgtccttctgtccgtcctcattatgtattggatgtccggatatagagcattattctcatctgcatgcatgtagttattaattgctgtaattctcaagttcagatattagttctttatagatgcacatacattgtttatgaagatactttattagtttatttgattcgattagctggctactggaaaatctgtgacctcatgtgacactgacagatcttttccttacttaaaaaatgagatatagaccttcatcgagatgcatgatacataatttagccattaattttttggtttattgcgtgaagtcactctttgatatggacataaatcagtttagtataattaaatttaataatattgtagtgacgtcaatggtagtatacttgcatataaatgtaaatttttatagttagccttaaataactagttgagtaagtcaagcttgtgttggctcacatttttttctttccaattcctgttggtcacatacttggtataaaaaaaaatgcagtgtttcacgctgctcaaaagtttaggaatttcgataggaactccaatttaaagctggagttgggttttgagtgatttctgagatataatacaaaatgcggttattcagaagttgagtttgtgacttgggccatataagaatattgattttgagccggtacactctaaccgttataaagtatgatatatctatatttatagttctttagttgagcttcattgaaaggcagaaagggccggcactgtgtgcttgttacgttttctgaagttattataggtgggtgtactttttattttattttattcatgtcaataaaatgcatattatctgtaccaaaggttttcttttgtccaactctactgtataaatatagagccttatctgcattgatataattcttgagtttgtttattctaaaacaagaaaattcacgtgtcttcccttttttatggagacaatggattagtttatttcattcaactaactagggatcaagggatgcattacacaatggtgatgtggcattaagttagtggtctatgatgtagtttactttaatgagccacgcatatcattgtcctctcagtaaaattgaatcccatttgttgagacagagtatttaaaagctaacccggtgcgggtagctgatggatcaggttgtggtttgctccaacatatgttttgggctttggtggtttagtattacattagtgattaatcacaagttttatacttcccaaactttataggactaggaagggagggggcccctttcgaaacttgagcccataatgcccattaagcaggtttgagggatttattggatataaaatcaaagtatgatttttcaagcattgagtttgtgactttgctatgcaactatgatttaaaggtcaagcttgaccttgtgtaaaccaacgcctatcacagtattacatgctttctcagttttttttttctttcagtgaagtctttaaatatgatggtctttcctttttctcatgacctttttctgctatatgacaacagattggcatgtgtttggggcttatattcacatttccaatcatggtccatcccattaacgagatcatagagggacggttgaaaaataacaaatggtttcaaaaggctgacaacaacaatggtagttattcaactacaagaataggaaagtttggaaagtatgtgagccgtgcaattttggttattgggttagcggtgttggcctcatttgtgccggccttcagtgtttttgcctcatttgtcgggagtacagtatgtgcactcatctcatttgttttgccatctatatttcacctaaaattgttgggttcttctctaaatttctggcagagagcactggattggtttatcctatcatgtggggtactttttgctgcatatggtacttacaacaccatagttggtgtgtgattggtttcccgaaaattcgcaccagaaatgtactttatattgaactcaatgagtaaatcactggttatacttgaaatggatacacatggatgattgcagcctattcaaactgtcatacaagcagaacaatgtaatttttttcatattgaattatgctagggacagtcaccacaacagtatttcaagatgccgggattcaacaacaggaattataccatggcaactgaaatgcttttgtatcaaactcaaattctcaactatcgccgggattcctcaagtccctccctaaaactcgtgtttactcgatgatcaagctcttgtaatttttttaatactacttcagctgttcaatcagtgcttgttcactttggttgagaaatgacaagtttaaaggtaatgaaaatacagcttaccttatctaagaggatcatgataacagttagttgttgtgtggtcaatttctcattacttagttttcagtttgttccatctgtctttcaatttcgttttagttgccatgtaccttttcacaaaaatgcttctttcattattggtaattgaatagtggacacctaggtttagtcacaccatgtctacctctttttacctgaaaaaacaaatataaaaagtgaatagatatgtgcttgttccattattattgtcatgcctatccattaagttggaaaatgtttagtgcaacttcaactttcacatttctttttataaactaacttgaaaacttagtagcccacttcagcaaagcttctatatgctaatattatttcaaaagaacaatggggtgtttgttgtagtaggcattagtactttttgtcattcaattcttctttagaactctattatcaagcatacatacacatgttgtatactcccttaaaactttcataaagcaccatatatggactcgaaactccctttgagagaataactttaacaacggtggccaagtttacttctttctgcccccatatattggcagtgccttcctttaatgaatcaattttgttagcgaaccattaaggtagtgtttggttggaaggaatgaaaatataggaataggaatgaaaatgagaattggaatggaataaaatttaaaatgcataaaaaaattgattagaaaaattattaaattttttcaaatcttgcattggaatggtctttcctttcattttaaaatagaatagtcattctactaaaatgatagaaaggtcattctatcagaatggtatttcaatgattttaaatgcaaccaaacaaagaaataaaatgaaaattatttcatttccatttcattccaattcattacttctaaccaaacgcgactataatttcttatttccttgcatttaacccaagaaaaacaacataatgagagagcacatgtttttagtaccgagaaaagttccacaaatatacttcttgttttcttctcttagaacatcatagggcatgttccttcactctctctctcttaaatctagactattcttaattataaacaattaaaaattgagtaaacaaattgtaatacaacttgattttccatggaccctaataaaatatagcacacataagcgtataaagtagtgcatcaaaattaaataatcattgtattctatatatctatagagttatttaagtagatttcaactcaaataagattacctttttagttgtctatttgatgggttcgcgcgtgctaccaagtatatttacttattattgatattattgttacaaataataaaaaagagtatgacatgagagtatatgggtggccgtggcaatgtgtaaaggaaatctaaaaagtaataacgaaaattgtcaattctaaaatctacaatttcgaaagttgaaagtgatgttggacacaagctctagcacaatcatccttgccttaacaacaatgccataggtagatatgtatgagatagcaaaacaaaacttttatttccaaaattttgctcatatttatatattttttgaattgacaaatttcatcatatccgttcgtgtacattttgattatgatgtgttctaaagagtttattattgagtggtccctaccataattatttaagtaaaattttgattatgtagttgttgttggtaccatcacatgtactcatttatgaactagtatgatatcatatccccatacttttcctctgctactaatttgtgaaattttctttcttattttcaatgaaccatattgcatattaattggtagaaatatatggttttatttttctacgatcacttaaagaaaatgatgatgatgatgatgatgatgatgagaagctcctagagttttgtaactgaaagaaaagtagataagaaaatgaaaatagaaagggcatggagcactaagattggacaatgagaatagtatttgacacccccaagatttgtaaccctaccaaaaaatattgatcttaaaaatgattacattatttgttggtatatgtaacttttcaggtgatggacacattcggatgctctaaacctaatgctctttccactcactcattcacactctctctcaccctgaaagcctcatcaacatatacacacaaatttcaagcttatatgacaacaaagtgaaagtggggaagagaaaaaagagaaggacaaattcctcattctttagtcacaaaaaagccaagccaatttatattataaatcaaaagaaaaaaatcaggtttaaaggcaaaaaaaaagcccaatataa

SEQ ID NO: 188951 - DNA, 2115 bp, Cannabis indica
aaatttctcttactaaataatctacaaatataagttgacaatatctcaaatctcaagtaagatcactgagataaatcaattcattttgagatccaagacatctaaattaaggtcaatacctattggtccccgacgtacactttcacacagtatatataacaagaatcattaccaacaaaataactaatttgcttacttaatataaatatatttggtctcgccactgtaaaataaaaagtagtgatctcattcatttagtaatacgatacaaaattcccattcaaattgtttgctctcgtcacgtaagttttttcctgcataaccaaaataaccccaagagttaaaaacgaacaaaagagtattaaagcaaatgttaattattttttgtctgggttctgaatcagggaatcaattaaattcatgtgaattaattttatttatttagaagaaaaattacctgtaaatgaatgttatagaagacccttcctccaaatgagtcaatagaagaagcgtttagtaccgaaaagccatcttcctccagatcaaccagaatattggacaatggagtttgttgagccttaaatgaggaaacttgtagtactatttctctatcattaagcctattggctgaaacattacacaaagatctccaacctgatgaagagcttttcttatggctttcttcataaatatgctccactctccttgaaattctcaataaaagatgttcctttttctgaattagtcctttcacttggttttgaagctcaggtatgtactttatggttcttgaaattgtggatggattacttagttttttctgaatcagcataattaagagtaactcattattaaaaataataatactatgaagacagctattagctataatggtaagttgggagtcaacttctgtccctttaatttaataaattaggtcctatctagctagcaaccgatattattaatttatacacatacaaatagaaataattgggtacatctctatctaaaaactcaattaactattttagcattttgaccacttgtttaaacttttcactaagttgtctagagtatatgaagtttttttgtaaattattatataaaattcatgaaatacgattcactttcgaaattaatgcgttaataaaactatatttaatttaacataagaataaacaaggaaattttaaaataatatatataccatttggtcagctgccggaagaagagagcgaagagaggaataaagagagttgattttcttcctacggtcacgttcactagcattgtgacatagcttcttaatgaccgtgggatcatcaccggtgacagctgttgtggacggcggagattgattgagctttgctgtcttctcttgttgctgttgctggagaagagattgaatgtcgatattattgtgatcataaaaggagaatgcatctgcaaagtgatcaacggctctgctatgatcttcaaataaagccattggattaacggctgagactgaagaagctcgcaatgctaacatattatgatacaactacagtactgatctaagactaattagtattattatttactactaccttgagaagattgattaattttatggggcaacttagtactttcttttgcgtagagatgtttgtatgttgtgccttgagtaagtatagtataaatattgaaatatatatacacacaacagttacagaatcaccttcagctgtcaccttctacctgaacattttcaaataattagtaatatagatatccatttaaataattaggattagaatactccaatttatatatatatatatatatatttatattctccatactcgtggagatttttttgtttcggaaagttacatactcgtggagatggtgacacatttgaatataaaaaagggtattgtgtatttagtaagcgcataataaattattgtaattaaacagtactgatctttctctttcaatcaaccatcattatttattttgcagcaataatcacttttaaatttatttgattagcaaataagtacttctactactccgcgtatacgtaagagaggtagatgaatttcctaacaaaaaaaaaataaaaaa

SEQ ID NO: 188952 - DNA, 4170 bp, Cannabis indica
tatcgctagccaattgcaagtcgacactattagaagtgctaggcactactggtgtccaatagcaatgctcaatcttaaattaccaataacatttatttatttattgatgatttatagtaatatacaaattgtgtggaattactatatatatagtaaaaaaattacaggttggcttattaaataaaagtacttgtttttttctctctcaaaggttagtaaaaaaatagttaattaacccgatttgtaattatcaatttattacattgagaccagcgtcaattatttctacctgaatacgcattgaataggagtagttttggtagatagagctccttaaatggtgaattcactctcccttctaatttttccccaaaccaactttatttcacgttatataagactcccatagtctcaccatcttttccccaattcacatttctctctctctctctctagttattacaacaacacaacttttaaatattatcgttttataaatctttccttgatagagatcgagaattttaaagctatatagtactatggagtatatagatattcttatgctcttcgtggctctaatattcctccgtgtgtggtggcgtcgttgctccgtcatcggcggaggaccaaaaaatctcccacctggaccgccgggatggccaatcgtcgggaacctaatccaagtcatcctcgaacgacgtcacttcatctacgtcgtccgagatttacgtaaaaaatacggcccaatattcaccatgcaaatgggccaacgaactctcattattgtaacaagcccagacttaatccacgaggccctggtccaacgaggcccagagtttgcaagccgaccagccgactcacctatcaggcttatatttagcgttgggaaatgcgccatcaactcagccgagtacggtccgctttggcgcgttttgaggcgtaatttcgtgactgaactcattaacccaacgaggataaaacagtgcagctggattagacactgggctatggagtaccacatgaagaggatatataaagaggcttcggaagttggttacgttgaagtaatgagtaactgtagactcactatttgtagtgttttgatatgtctttgttttggtgcaaaaatctctgaagaaagaattaaacgcatcgaaagtattctcaaagatgttatgttaataactttgcctaaactccctgatttcttgcctttactcacacccctttttcgtggtagtgtaagagaagctaaagagttgagaaaaaaacaactcgagtgtttggtcccacttttgaggaaccgtaaagcttttctcgaaagtggtgctaaggttaacgaggaaatggtcagtccagccggcgcggcttacatcgactcgctctttcagcttgaagctcctggtcgtggacggctctcagaagaagagctggtgacgttagtttcggaaatcatcaacgcaggaactgatacaagcgcaactgccttagagtgggccctattccacttagtcacaaaccaagagattcaagaaaaattacacaaggaaatagttgaaacggttggtaaaaacggcgtcgttacggaaagtgaagtggagaaaatgagatatctcggggcgattattaaagaaacgtttcgaagacacccgccgagccatttcttgttatcacacgcggctgttaaggatacggaacttggtgggtacaatataccggctgacgctagcgttgagttttacacggcttgggttaccgaaaacccggatatgtggaaagacccggatgagttccgacccgagaggtttatggaaggtggtgatggtgaggacgtggattggactggaaccaaaagtgtgagaatggttccttttggtgccggaagaagaatctgtccagcttggactttgggtacattacatgtgaacttattattggctaagatggttcaggcttttaagtggttaccactacccaattcgccacctgatccaactgagacttttgcttttactgttgtcatgaaaaatcctctcaaggctgttattttccctagaccaaactagttttatttatttatttatttaaatgttgtttggtcaaaactttaaggaatgtgtatgtttggctgctgctataaatagacccataaatatatttaattaattattaattattatgggtgtatatggtttggttcatatatagaagcatcatggtttggagttggagaataggtagctagctgagagtaatagtaatagatatatgtgtggtttaattaggtttcctttaatgcgttgaagattgaagaagcgtctccattattgattgtcatgccaaaccactgtcagatataaatgtaatgtaattaatgtttttttttcttttaatttcacgtattattttgtacgatggagaatggacaagagcattaatggttattattattttggttgttttattttctgaggaaaattaaatgcaattttaaataaatatcttggttcacattgcattaattaatgcaaatatatgaaaaaagattgctaaaaaatacaacattatatagttattgtttattggtgtagttttatttaatatggatacagtgtatctaaattaattttacaaataattattaattactcgtaaaatgtcattttataacttagaatttagatgatctttcagtcaacaccaaagtcccgacctatatatacttagagttcgtttgttatatggtataaaaatcctaaaattttacattgtattaatctcgaacccaactctacctagacctaatttcaaaatcttaccccggaccaagaccctaaccaaccgaccccggaccttgaatctgaaaactcagacaccgaatatcgaaccccaaacatcgaaccttgctcggaccacaatctgtggtgagagtttggggatgggatccaaagcccatgaccaaaaatgagatttgaaattgaggttgagtttatggtaaaaatagtaaaattttacaaaattactatacaaattagtatcaaattatagaattgtaataaataatagtctttgataatattgtattgtaaatagaggatcataaagtgttaattacaatttctaagtcaactcccacgtcggaaattatatattggaatatttttttttgattttttttcatagcaatattcattataattttagtattatcgctgtaatttttaaaaaatttcaaatattttgcagtagcgaaaatagagttcatgatattccagtttattacgcgtgttcaaaaaatttcaaatatatttttaacactgtaaattatttgaaatttttaaaaatacagagataatagcataacaaacaataccataaaaaaaattaaaaaactaacatgtattttcgaatagaaagattaatgaataacttataatagaagattgacaatatcactcatctaaaaaatacaatccaacatatacaagataatacaatatatatacattaatgaattattaattaatggctgcgcaccttactaaagaaatccattaattaacgtaactaattttcttttactagattgaagggatattgataagtataataagtaaagtgatgaaaaagtaattaatttcattaacgcactctataactatgattactaactttatattatatttactggtgaaaaagtatatatatatatatactagcaaaaaaactacctgcgaggcacgtatactaaatttatgctagtttttttttctatattatttgaaagtgatacaattaaaaattaaaaaaaaaaatattattaattattaggtgagattattattatgtgtatctaaatatgcaatttgcggcgaaacccccttatgttttgatttttatacacttaacccccttatctttatttttggtggcaaaacccccttatgttttaatttttatacacttaacccccttatctttttttttggtggcaaaacccccttatgttttaattttttacacttaacccctctatcttttgttttggtggcaaaacccttcagtttacttttctttgcaaatttaaagttttagttaaatattaccgttaaatactaactagattactactgtatcgacttcgaggttttaccgttacatatacaa

SEQ ID NO: 188953 - DNA, 2776 bp, Cannabis indica
atgtaaacttgtgatatatgtatatacttgactgaatctcttatttagttttgattgtacatgcatggtagcatgtagctgcatttataaattgcagagtttctgtttttgtcataaactatccttgtcctcagctgttcattgcttcctccttaacaaggaaggcactctaagaatatgattagaggttataaattgtctgtattaaattcttagcagtcatccaatcatgacatgggcatattaagtttgaaattgtagaatgcttcctttctcctcatatcagtgatgttgctaatgtgagaatgtgtgagaatgcaggcatgacacgatcttttcttatttaagttcatttctgtacttgctaattctcctctttttatagttgtacaattttaaaaatatatatgtttttaacttttttttttctataaaaattttgttgatagggaactaagatcgagtatcatcgtcctggctggaatgcttggcacatacttaaacgtcttggtttgtcatgcttcttttatcctgctgttttcctcattatttgttaatatttaactgtgatcccttgttttttatgtaagagagcaaaaaataaatatttgcttctatttggcgtttggacttccttcttcttttacattaataatgatcctcttgtggctattgctgtttacgctcttcaattgcaggctctatggcttctctttcttctgtttgctagttgggtagcctatgtcatgtttgaggatactgaacaggggcaaatagtatttacttcctatggtacaacattgtatcaaatgtttgttctattcactacatccaataatccagatgtctggattcctgcttacaagtgagtacaaacttgaaataggaattagtatgattcattcatgttgggtttcaaaaattattatttaaccgtgacatatcacttactaggtagtactaacatttttgagggcttataccccccaaaataagtaggaatcacatgcactagatgtaataggatggatgggatgatgccaacttaaaacaaaacacttattctagctgactaattttctttttcaaatgctatctgtatcacttattgaagaatgattggtctgtaccacacaattacgttttcctcttattgcgcaagcatttaatatttccttatgtttaacttaatcttatatttaagcaggacattgcaggtttaaagctagatttgatggcatttttgtatattcttaaatccaactttctagatgcgttctaacatctttttgtgttcttcaatttgtagtgtctatgtaaattataataaaatgttgcaacacaaccaagtaccatagaatgacttgatagacccagaccaaatatgaaatctagagaataatcttcattgacgtcaaagacataattacacttttccaaattttcgagacacttggagatctcccaaaaagcgttttactttccaatatacacaaataatcagatgccctcaaatggggctactgagatttatttatactcaaaacattctgcccgctcctaactactctcctttggctacgcacaacctagcaacaaactacttacaattcagctccctaatagctaatcaaatacatacataatgccacctagaccgtactaaactaacacaactatgattacttatttctagaatatgtgggctagcatgacttgctttagttgccaaagacttaaatcttgtaagacacttggtcaataattccatcagagtttttttcttacagactagcagctatttatgtgttttctaggctatctatggttctcaacacaattttgataattattatgtttctctggctctattgatctgcattgtgtgtctatggacatttccattagaataattagctgtttcttttacatcattcgtattagatgtttgaataatcatatgtgagtgtataatatagtggattattatctcttcttctttttaatctttttttctttttttcttaagggcttcacgttggtatagtttgtttttcgtcctctatgtgctgattggggtgtactttgtcaccaacttgattcttgctgttgtatacgacagttttaagggtcaggtatgttttagatgtttatcttatgtgtcgatagtaaaacaactcttgattcagtagattctttagtagcaataagtgtttactacttgagaaattggatgcatataattactcattttctttattttgtagcttgcaacacaagtttctgagatggaccaaatgaggaagcgtacactagaaaaagcctttaatttattagataagcatgtaagtaaagtgtcactaactagcgaacttgctttgtctgtttgatatgtattcttatacgcggctttagttttttctcttcccctcctttcctaagtttccatatttactagatgatggtcatttagtctcttgttgtttagtaatcatgatattttactaatggatcacttgttgttagctggctagatgccaatgaagatgcggctttaagctttttataatgattagagtgacttatgtaattaggctaaatgatggaaaccataatagtttcttgcttgcttaagtgagtcataggagagtcaaccttggggaaggaaacgtttaaaagaaaccatgtaaaataattacagtattgtgaaaaacacatgtttcgacctaaaagaggctacatttttgtgctcatatgcatttaatgcttaggagaa

SEQ ID NO: 188954 - DNA, 3812 bp, Cannabis indica
tttttttttttttaagaattagatggtttattcctatgaattcttctgcttctgctgtggcttttttccaattctgggtgtcttcttatttgcttagtttgatgaaaagtaatgaagaagaaaaaattgtattcattccgtgaggttttatttttgttttcctgcatttttctcggtaaccaaacggaacagctacgtttggtcgttggtaggtaaacaagcgaatttctttatgaagatgtcctatttcacggtttctcagcttgcattgtactatgcaaattaataaacaaaataaaagagcaattgctttttaacacattccatctgtattatatgggttaacattttctttttcccctcaatcttgatatatgtaaaagatggtgtttaattctatatttatttttgttttctgtaggtgattgaatttggtataaatttttgtttctatctgtgaaattttctggctttctgagctgcacaatgccatctgaagtaatggaacaaaggggtgtatcactatcagctccatctcacctctttgatgaaattcgttttccttctgaggtacttattgttttcagtattatgtattcaaaagattgtccctccaatagggcgttcattagatttttgtgttcttatttgctcaactatgccttcttatttatttgtgttatgaataatttccttagggatacttgtcttcttaagatccactataaatattcagtacttaatatatttttaatttttattgggcagaaacaagttcggaaggtgaaaaccgtgcctgaacaaggtaagaatcgcccagccgtagcttcccttatatggccccttctaagttagcttatttagctacaatctatgttgatgtttaattttggtttgtaagtattagagtaatacatttaaattatttatttatcttggaaggtatgcacttcgaaactcctgacatttatgaataactgaagtgttgtcgaattaccgaattaccaaatacgatgatgttgattgttgtcattggtcagtttcaattctcttttgggaaaaacaactgtagtttataactgaaaccgaaaggtccaaaactttcagttttgttgggagctaaaaagagttttgcttagttttatcggtccatcaatcatctcattcccaccattcttagttccaggatttttcatgttattacattcaactgtagatttttttttatctgggtttcatgttatgaatgtgtttcagtttttctttggaaagacctgttgccgtagaaacaaaaacattgctttgtagttcttatttataaacttcatttgtgtggtgtcatttcccagtctttctgcatttattgttattattagtgtttgcttatgacctgtgtggctaattttctatttcctagcatgctcattttcttagttgcccccatcccccagagttttggcagttctatttcctttacgttatattatatggtttttttcaaattggaaactgttacggaaggaagttattacatctcgtgtacattttgttgtttagctgatagggatagatatatattaccaacctggccataaattggatattctctcacgctttggatattttttaccagttgttggaagatcaatgcaatgcttggagatgccacagtccaatccaaaccgggttcaagcagaaagacagacaaccggtggagaaggaattggtaccatccccggagcttcttggaaacctatggatcacgatctcaagttgtggtcagatttgcgtacgaagacagaatcttatagttttgatgaaaataaaaatttcactagtaatattcagcatgaaagtagtctcttttcaagctcattgtcagatatcttttgtagaaagtgtaagcttcccgtttcatgtctattataatgattgttatatgtgattgctttgatctttagtttttgctgagttagattattaatatcatctaattctctatagccatgctgacaaacgtattactttgacaccgtttcatgctaaatatgcaaagggagtcaaaagcttaatttttcacagaaattttatccagaactaacaagcttttatctgaaattattatattataaatcactgcctttgaagtaacttggttcaattggtatctttatgtgtctatccttttcttttttattctacattggtgatacatgctattatttttgtaagatttgtgtagtgatatttataattcattcccaattcaatatgcagtgaaattatcagcgaatgatgtcacatatcatcagccttcccatactgttatctccaaagatcaggaaaaaccactaaactattttggagaaattgagggaaaaactattgggagtcttcttcctgacgaagatgatctcctttctggaatgaatgatatgatggcatacaattctaatgcaaataatggtgatgaatttgaagactttgatctgtttagcaatggtggaggcttagaattaggagaggaccgtttatctgcaatccaaagaaagcatgatcttattgggggagttttgaatggccaagctggttgtaatgggtcagctggtgaacagccttctagaactctttttgtcagaaatatcaacagcaatattgaagacttcgaattaaaagctctttttgaggtgctcatactccctattctctcttgtttgcagccaagtagtataccttgcactatgaattgacagtatttttttttagcaatatggagagatacggactctatacacagcctgcaagcaccgtggttttgttatgatttcttactatgatataagggcagctcgaaatgcaatgaaagcacttcaaagtaagccaatgaggcgcaggaaccttgacatacattattcgttacccaaggtatggcggtgaccttttgatcttggttgcgtaaaactttaaattttatttccttcccagtcttcccccattatgcaccctggtttattgtagtttaatgcatttttcccatgcctgtgatgctttgttgcataatgtttactttctaatgtgtcaggataatccttctgagaaagatatcaaccagggaatcttgatggtatcaaaccttgattcttctgtttcaaacagcgagcttcataaaatttttggattttatggagaagttaaacaagtgagttgtttgttttctttcctctattatcctgattttttcgtagcgggatgatgaaccttgcaattttggttgttattttgttactagattcgtgagatttcagacaagtatcatagcaagcttgtagagttttacgatgtcagagctgcagaaatggctttttgcaagctaaataagacgaacattgctgggaagcagatcactcttgagccaggctttcctggtggcaccagacccgggtatcatcatctgtttatcttttcttacttaattctgttaacctatggtgcttactcaagatgtttgagttttctaacacaactcctatggtggctgccagttgcgactttctgttttattgttccttatctactagtttctttcctatttccttgttcttttgaattcgatttctcaaaattgcaactccttacagataatatatctttgcagcttgatgcaagtgtccaacatggaacaaggtgatcatgaaccccatctttatcatagcttttgtgacaacttttcctcagtgcacaaaggtaatctttctctgctaagattgctctgatttttcaacatgtatttttttttggtcgtcatagaaagt

SEQ ID NO: 188955 - DNA, 642 bp, Cannabis indica
tttttttgacacccactaaaatttcagtcccaagaatgaaaaatatcgatcttatatatgtttcatattatttatgtgttatttatgtgtgaatgatttgtagactttatattacatttagtagctattaaaaacttaataatattttaataattaaataaatattattttattgtgtttaattaaatcatttaaaaagcaaattgcataaaatttacaatgttgtttgtacaggtcttgttttcttttatttattttcaagatggatcttttgacaaaaatattagatgctctcacacgtttttttaattataataattaaaacccacaaaataacagagttagatggcagtggggggcctccaaaggctcggccacatttggaagctttaatgtgccaaattgaaaccatgatgatcatcagcgaccacttagttggatatgcatacatagttatagaccactagaaaatgtatgaagataaggtaatgcaactagttaaagctatacatatatagctagctaataagtcaataataaacatataatctaagaattaatgaagaagaagaaagtagttgaaatggggagtagtgaagaaagtgggtcaaataataatggtgaggtgcactttgtgctagt

SEQ ID NO: 188956 - DNA, 2068 bp, Cannabis indica
gtcgaagttggaagagatgatttactccttaccttactcttttattattattattattataaataatttcaatgtcttttaattttgatttttttgggttgtttaatttgttcttgaaggttttttttttattattattatttcttttatgagaagagtgaaaatgaaagagagtgatggtgtacagtctgtttttttggggggttatttaaccttaaaaagtactggattagaattgtgtacagcttttctttcctcgatttttcgataaagattttgctgctttgtacattttggtgttatatatatggatgtatatttgtatttggtacttttttttttttttattttcacttattattgttattatttccaattccatttatttaaaaacaaaacaatattttattttttatgtgataaacatgttatctctattctcttctcacaaattagatttccaccgtggttgttgtcggagcaatactttcatgtctggctaatccaactaatatattgaaaaacatccaaaaatatggatcctaattttcaggtagtgctctacattgggtgatctatttttcttataaatatcggtctattttcttacacaaggtcgaattctaactttactttctcacttattcaaaaaaaaaactttactttctcactttttttcaataattaataagataaccactaaattatatttaatattttagttttaattactttttacataaaaaatactcaaatatctataatatattgtgatcgctatagctcgtcattttagtcgcaaaaattaacgagaaagttatcgcgctttttgagaattgtaccttaggattgtcaccatagtgtaattttacttctattttaatataagtttagcgatcatgctacataggacacaaaaatgatacgggatgttacacgtttaacatgacacaaaatttatacaagttgttttcgtgttcgtgttttattaatttttcatgtcacgggttatgttcaaatgacccaagcataacataatgacactgaaaataacaatttaacttacaatacgctaacacaatacggatataataaagaattttgcgaattcgacacgacacaaaatgtatcttaatcatgttaatgtctgtgttataatattttggtgtcacgagccatatttgtgtcagcaatttttcaataaatttgagacctcaatatcatggcatgaattgtaaccctagttgaaaaactgctagcctaaatacttggtggagggaacatagattgaattttatatactttttaaaagctcaatagtaacaacattgtgttgttttttatataattttttgcttaacattaacaacaatgttgataataaagaaaaagtgtcgatggtgttgttgaaaatgatatagaaagtaccgataataatgtagaatattaaatcatataatttcttttatattattatttgtgtgtgagcttggtacaataaaatactattttgttcatattttgtgttaagtttacaacaaataatttttataaatatatttcttcatattctgagttattttctctcatataataataataataataataataataataataataataataatgagacgaaaacaaccaacttaccctcacacttatgggcctagctctattaagccaatatcaaagtttgggggcctaggccgactgtgagtttactttacgcaagtctgtttaggtgtggtttgatatgcttatataccaattagtctaaaagcattttgtttttagttgcatagatgtgattttgtttggtttacttgtaaactagtagttcttcgtctatgtataccaattggtttataagcttcatgtattttaatagtgttatttgtttaaaaatactacttttattaatcaattaattaaatttacctttaattttatatttaattgaaacatacttctttttatatgtattgtacccaaaataccatgacataagagagtcacatggagagtatcttgaagtaactggggtaaaattaatacaatattt

SEQ ID NO: 188957 - DNA, 2317 bp, Cannabis indica
tttttttacttattaatccccaattggtcaaattttggccgacaattttcgtcaaatctaaacgatgttcaagctgtgtgttatataatagttatttgatgttgaagtttctttcaaaatagaactctttgttagtcaaggtaaagaaaagaagctaactatagtatattttaatttctttgattgggtggggatatatatgatacatatctagacaactatatatatagaataaagtcacattttatttttttctctcaaacttgaacaattttttcaaaagaaacattgaatataattaaaaacgataaagcaaaagaatgtcacgagaagttgaaaaatatgcaaattcatccagaaaaattagcgcaccgtaataatgaggggttaattaagtacttaattactaaaatgcatttaataattgttgttttcactttcactgctttgataatttcaatggcattgcataatacataataattaatttaataatacgaggcacaccgattatgatgggttttacttttttgcttatttgaaaccaataatttgtataatttaaattagtaaaaattaattaaaaaaatataaaaggtttaatcccaaaaatgtaagctaactatatgctaaaaggaaaagtattatgattggccgggaatggggttttcattcaaattatagtatatagtaactcaatcacatcccaacacctaaggagattaattatgaccaagttagttataatatttaataatgacacccatgatagaatacttacgtaacaactttgactaatggaaggagaacataaataagtttcttattatctaaaataataatcgtttactttgatggagacaggtgtattaattcgatgggtaatccatatgttatgatcaaatgacttcattttaatcagcacacagtgttagtaagcccagtacgtaaactacccagttgatcatatatacttgatcttccgtgtgtaaaaatgtttaaaattattggtttttcaaaacaatattgttatcggacattaacggtgttaacactttttataattatattttacgattatattttttttaaaaattattttttaagatcttatatttaattataccaatagcactaagaaaaatattaagtgccaataatatgtctttttcatcattcatgtaagagaataaggcattttttctattaatatagcattggttgaagaaaatgtaaaattccatcttccagattcttaagaaaattttaaaaaaataaaatattcaaagattacttatctatatatatgtgaccgtcatttaaaacgcttcaatgtaattttcagcattgagaaaatgaaaaatcggagtgtgatcagtaatatatttcaagaaaattagctcgaaatgatcaaaccgtggactttgaagtgctgagatgtaaacttacaatataataacattttatagagtaattaactaagggaatattccatattcgatttaatattttctttcctaaaatttcttagatgttaagccaaaagtattatttatagtatataaacaaaaattaattgataaaaaagaccgtctacctattccgcagggtgtatttccacaagagaagagaaaaaaaagaataaatatgaaagaagaaaaggtgcatcaaatcaagaaagtctaaagtcttaaacccaataaaataaattaaattaataaataaagtctaagtaagtgactcggtccccagagagggtaaagagtcaacatgaaagccggtacacagatctgaaacgtgggtgagatgagataggtagggctttaattggggcccacacaaagacttcgttactgggccagacggtcatcggtcacgagtaattctacatagcccaaatccaagcccaaaaacagaaaaagtaagagccgggccgtcaattttgttgacttggcttcttttcctttccctctccttaaccctttctttcttttttattttcctcacgtggaaggcgccgcaccattcggggcggtggattcaatttttctttattttcccttttttctttttcatttgattttacgaactagtcaaactcttgtcttgacgaaatgaagacgaaggtgaagtgggccccagataaagagtcctaacttggttcgggtcgggtcaccccggaaaattaaagggctgtgctacagaaaagaacctaggaaataaagatcgggttgggacttggataatgaactgtcagagattatgccacctgtcatctgacgcactgtcttacgcaaaattatttttataaaaatta

SEQ ID NO: 188958 - DNA, 4457 bp, Cannabis indica
aattaaaaatatttaaaacataccatttgaatttaaatttaattagctataattctttatattttctcattattaattaatgaattttatttgatgtatttcctttataaaaataaaagcataaattcacttatttataaagtgagtagttaatttattgtttatttatttatttatttattttgtaaagagtttattgagaaggatagtgacgattacaagtgagatacagtgacaattaatatactaacaaacttttcaatccttgtagtaaaaataattattatattatagtaatatggtgaaatagacttaaaaaaaattctcttattttatagagttttgttttttaataaataaaattatgcaataatatgacgtaattttaatattatataaaaaagagtaattttaagttgttatttattatattaattaagaattaattctttctattattatattaaaaacaacttaaacagtaatgcgaagagcagttatactacctaatttgtatgtaaaaatgagaaaatatttctcatagttaaaaaaatatataagactccaagagatgcagaatatgttaactttgcttgtatgcaactgtgggtgcaagttcataacctcccccatgaatacttctccatacagagtaagctaagtttaatacagagcaagctaagtaacaaactctctaactaacaactgaaccaaactaattaaccaattctaaccatataaaccttatgtagtattgattcaataatgcgcacataataaacaagaacacataataattatgattaaatactgcatgtcatcctatatcagtatatgaattgttttctttttaaatgatagtcagtttgtactacttgttgcctttagcatttcttgatttgctttaattttcagtaaataataaaattaaattagaaacggtaggatctaggaagtgctatttctcaatatggtattacttcttttctcttccctccctattaaaaaaaagaaaagtttacaatatgaacaatggtttttattggttttaccttcccattatagatgttaaaagtaataataataaaaaattaatacaatgaagtgattctaccacttcttagtattccaaaatatgctattactataagatgaatactccattgttgccaaggctgagcatgtagctgagttcatgatccacaaaatttccaacctccaaatgactagcagataagcttcacattatccaaaactcaaatgccattctttacattttctttcaaaattgggttgatctctatattcagtatcagattctgtggaatgttttctacaagggcttctaactagagtgtgcgagatgaagctcacactcttgaaatcggagaaaatggtggattgagcacataagatggtgggatttcttttaccctcttagtgacattcctcttctccgctgtgactgcttcgatcaagaacttcacttcctcttcaatgagtagtttcagcgaagttccccgtgataactctttgcttctatcctgtgtggtgtccaccgaggtttctgtcccatgaagaatggaaacacaaatggagaatgcttgtaaactagataactgggcatgaaaaccaactgcatacagtccttcctcaatgactgtcatggtcaatgctggtctactatctttcactccctgtgttcagattagaaagaaaaaaaaaacagcctttagatgctttgtaactggtgaaaagctaaaataatattagaaaaaaagtgtgtttgtacaatgcacaaattgtctaattctagaaattttttgtcataccaaaactagatttttttgtattactaacaagtgtctcattaaccattgctgcataatataaatgcttggcattcaagatggcatagattgttttgctttcctctttaaaaatgtttggaatgcaacaattggcatcggaatttagtaattaagaagtttttctttgtaagatggaatcttctcctgtttattcaatgtctaagtccttgtttcctggacgttattctagcactataatttccaattatctaatttttaatcacactctgggatcacaaagaaagtttacctgaacatataactccataggcatctgattctccacaagtgattgactgttattggcacaatggaaatgtggattgcccaaaacagtaagaggacaggccatgtcccatccaccacaatcacaccctccacccaacctccaacgatttagtaacgatgatgggctcccgctttcagttcttggcaagccatgatttcctgctggaatgaccaccttcaccttatctggagtcctcccatcagaaaaatcttgcttcctttgttcagccatagagagattaagtaagttcttatgtgttctctctttattcttatcacctctcttgtattttaagctctctctcttctcaaatggagcatgcatgacaatagctgcgatttcaagactcggatgcaaacttgcagatttccaagggcatgaatttgaatgattaaattcatcatcagaaacatgtttttgttgaaccttgacctcatctccacgagtcttattttccaactctaatgtctccccaaccaagccttcatcagaacctctggaaactttgtcactatcaagggtacatttcgtggcagtatcacttagtcttgcatgagcaatgtcatacagcacaaactctgtcaccatggaattgtcaaaaacaccctcttttagttctgaacatagataacaggaaacttgcatctgtccaaccattgaggaatctttgtcattgtcaagcaaacccaatctactggcattactcttcttaccgccgtcactggagtggaatgtatacacccagttaaatgcatcctttgctttccatgtcttagctacaaggacatcttctggagattttagtgaaaactcaaaaaccggtaaaccatgtttattttccagcttaagataggcatgtaagtgaacaggtgaacatgaaatgaaagactgatttttgctcttgatgtgagattcacaatctaaatcctgtgctctatcagaaaagttctgcacatgagattttcgatttgtcttgtttgttctcatgtttgtcaatccatttgttctgaccgctcctggttccacaacatagcttaaaggacttcgcaaagactttgacttcatgaatggatcaaacatctttctaatgggactgaaccgaacctttgagctggtcttcgaggagcaatcactttcagattgagaaggggaaggtggcaactctaccttggcagaaactgatttgtgcagtgtcctaaatgcatctctttctggaagctcattactactactcagaggaccaacaacaggatcacttctcatttttgaatccacagaggctgctgcacctacacattcagcagaattgttccccctactaccaggatccaaacagatttcgaaaaagctattcgacttatgtggttccacataaggcttggaaacagatgtcataacagaacttgaaccaaaagcgattgctggagatcttctttttgaggtttcttcatctgagctacacaacgaatcaacaacagacaaagaaaggtcactatttcttgacacttcaatttttttcctcccctccatagttcccattttcttcattttcctcacctcttttgagctttgatatatcgaacctcgcttaaactctacactacattcttttgtaacaggtcgagatgcattgcttttacacgaaacactgcgataacgactaaagttgatctctctgaaatcatcctttagaatcaataactcatctttacgtgaaattcttccttttgtgactccattcccattatatgaacaattttgatgagttggaagaacagtattaggactcaaacccactgtacagttcttttcatagtctaactccatctccaatctcattgctggagcacgaaaagaaaatgaagagatttgaataagaatctacacaagcaatgctaaacaacatgtagacaaacttaacggtaaccccattgttaaaggctctaatttgtaaacaaaaaattccattttgaagtccttgttaggaaaacccagaaaagaaaaagttaggaaatagtagaaacgtagagtctgcatagacttcatcattgaccaaagacaaacataaacatgcttttgaagaagaaaagaaaaatatcaatgctcataatttgttacaaacataccaaaatcacatatgaagaatgctcaatttcagaagcactgttcaaagatcttaaccttgtaaaaaaaccatcaattgaaaagatgccaatcccatgaaagattccaaacattgagattaaaaaacctcaaaaactccgaaccttcttgatctagattaaaaaagaaatggc

SEQ ID NO: 188959 - DNA, 1360 bp, Cannabis indica
ataagtaagaattattctacttgtaatagctaggtattatgaataaagtactcttctccctaaaataacttctcacattttgtagaagaattctttaaaatatataattttaattaataacacataaaaaaatgaaatttcctttatatgttgttaatattaccttagcattacgaaagatcaaaaataaataaataaataaataaaaagcaaagtaagacacactcacacatgattggattgagctctatgtggggtcaaaaccaatcagtaagtagcattttttcaaaagaaaatggtatgtatgagcctaataattacaaatattgaaatgtaagacaaatatttgagaatatataatcatattcaagtaaaatggtactcttaattcactttcacttttgaaattaatcacattatttataagttgcctggatgtgcactactgcatgatcataattattatggtaaccaaataaagttcattcatatatcatagctataaataatggataaatacttcctagctaactaataattaatataattagatatatttcatttcatagaaataaatttggcaaaagaaaaaaatggattagaattttactttgacagtttacatattctataaagatttgatatatatgagcaatcaagttttttgaaagcatgtgtaataattaattataatttaattagttatgggactttgaaattacttgacaatgaccccttcctttatagttatatgtcattttctgttttgaattcttctctttagaagtttttttgctctttcacattactacatattttagtggttgcaggttttctttcacaataatgaattaagggttctaattttccttctatccccatgattatggcttaaggtttggctaattattataatagctgtatatatatatatataagaaaggacttttgaatcaggtcataaccgttaagatactatacaaaagcatgccaataaatttatgggaattctacaataatatatacctttttctttttcttttttgaaaattttacaataatataccttctctaaataatttaaaattaccattaaccaacttattatttacaataacatcagtgttaatataccaattaagatatataattataccagaagtcaacataaaatagagaaatctcacttctaaaatttttctatttttctaggcaaaaaagtaatattttagttgctaatgatgtaaataatatacaattgattactttttcatagaaagatccacttaaattttttttaaaaaaaaaaaaaaaaattaatactcatacaaatttgagttacttttaaatttatataatt

SEQ ID NO: 188960 - DNA, 1434 bp, Cannabis indica
tttatatttatggctttgcttgttttggtaggtcaaggggtgtcatcagtgattagccaattaccaaatcacaacactgataaatgtttacaaatagaaagtttatcaaattaatgtacaaattaaactcaatatatatatatagttgatgatgatgatgatgatttatttttggtcaaaaatttagaaatatctactcaaacttggattatatatatttatcaaataatgatgaataaattaaaacccatcattcatgccattctttgcaattaatttttatctatatatataaaaattgtacatgctatacatactcatagcttataggtcatttttttcttttgttttccatatatgtgtgattattatgtatcatccatgtgatgactatgtgagttgtaacactcaaaaaagttatgaaagttaggcctttgagtatggctagaactagaaggaacaaaccttcagatacacattgcagtttaatcaggtacatgtcaatttcacaaaaccttaataataaaattaatattaataataattaaagaaagaaagaatattattgcatgttcttggcttttcattaatccttgtgtgtgtattaaccacaaggatgaaatgggcttgttaggtccgcaaaggaaaatatttataagagtgatatactcaatatagattagttaggttagaagacatgttatgtaattgcaaactattttatatattatataatatatagaacaattagtacaaatacaatgctgtttcacacaatgtgatttcatatttaagatcaatcgattatgggttagggtgtcttgaggcatagctagcgaatttctccacgattctaagagtctaatttgataatcataataaagattaattctaccttagattagttaatcatgaattgaagaaaaaaattaagggaaattctattttttttacaatgaatttatgacgtgttaacttacattaatcagaatcagaattagattgttgaatctcattagataattaatttattacttgacttgcaagaatcaaaataaacagtattaatttttactaatttgttagaaattcatacacaacaattagctagattcatctaatacctacttagatcaaacacaatcaaataaacactcatacaaataattaatgaatctaacttaaatagaaaattaaaaagcaataagaaagacaagaatttatcctggttatggtcctagagatcgaattgatccctagccatactccagctgagagccatcatcactaatccaatataaaaatattgaacttacaaactctgatggtagagatctaaagagctctttgtacacacaccataagaacaatcacagttcttcttaaccttatgtacacacccttcgagttcttagtcacaaagaactctctctc

SEQ ID NO: 188961 - DNA, 3726 bp, Cannabis indica
atatatatatatgatagaaagcttatacttccacttctttatggagttgataaaaagaaatcttaaagccaaaattaaaaagatgaataagcgagatttagctattttagatttttataataacttgtaatgggtttttgttgtcctcacttattatttaagtttttttttatcaaataaataaataaaagccaaatttttacaatagaaaaaaaattataggtaggtttggagtgttttaatttgttggacaagaaaagaaaatacacagcattttcaattaaagcactcaaaattgcctttatcaataatcaaaaataattttcaatttaagggtttggttatcatagaaaaatgtggatatgtagattcacaattgaaagtaaaacattatattttattgaaattaaatttaagtaaggcttaaaattaattcacaatgtctataaataatttatactcatacatgttacttgacattcttgtatttatttgatatgggacattctaatataaatgtgttaacttctgttgataactctgttttaagatgcctttaaaatttggcatggctcaaaataaattggtaccttaactatcataaaacaattgttagatgacacaccttaaaggtgtctaataacattgctcttaaaaaacaaaattcatagatacactcacacaaaacaacactctattaagatgatactcctgttatggggttacatccacaactcatttacaagatagccaaaaaaaatggcccaaaaaaagacaagaaagaagtaaagagaaaaaaaatgtgtgtattggtaacatagaaaaaactaaatctaatctgtgcttgcacaagttctctcaatcaccttagaatcagtcctataagaatgctttgatggtgagcttgaaccccttgaagaactatgtccaaagaagccaagtttaccaatctttctagagaaagaagtcataaactttctagagcttgatttctccatatcccttttcatacaaacatgttctctttccaaatcattaagcctcatccttagtcgggccagctccagcttgagctctcggttttccctcctcagcgaggcgtagttgtctcgtggagacatggctgcgctgagcgcgccactgcttatccgccatgactggtggatggtagttggcttaggaatgccaccgccaccaacaccgccgtcttcatcaccataagagctgcaaagagagtttcttagccttatttgctcaaagtagagaacttggactattgattggagagggagtctttcattttgtgctgcgtgagctcctgcttcttgggatagcttttgaaagtctatcaatttgcatagtttctttctgtctggttctggtaatccttgatgtgcctgtgtgtgtagatagacattgtcaatgaaaaattcaatagtgacccttttcaaaacaaagccattttatgagaaatgggttaatttacagttttttcaacattacagatttaaactttctttttacaaaaatacgaatggtcgttgttttcacattgttcctagattatactatgttgctgcaacttgaaaacaaatttaaaaaacccaaatttcatgaaaaattgaaccttacttttaagtatatgtcaatggctcgatatagtccatcatgtaaggttcgagcatggtctggtaaagagtctgcaatgaccaaaaacttagcaagcttgagatttgcatctggtgcaatttcggctaagtaattatcaactaacttggctactttaaacaatgctgtttgagaaggtgagtgaggactatcagattcaaatacagaagcatcttccatttcttcttcactatcatcttgttgagaaaaattgactaaaattctgtgaactgtatcaacatcaaatagagtatcccctgcgtgtttaaaagatgggattaggagatcatcaagtgtagcaatatctaactgtgatccaatccttctctccaaatcaagcctgcaagcaatggtacaatcaagcatgacagcactacgcaaaagcccgaaaaggaaagttatcggtacagctagtttttcgaccggtaagaggccaacaattgtctcaaccacaagcttttcttgcccatttgagcctgaaacaagatcaactttagtttggctagaagggttccaaaggcttgatttttttgtcaactctttctgagcataattcactagtgaaacacctatgctctcaggcctaaccccacgacacttcatggctgttatgactctttgaaacaaatctattctcaaaacagaaagatcttcaatccaccaatcaccttcacatttagtttgtctgttcatatgaagcctccctgagctgctgtactcaagtctagagaagctagaagcgatttgctcggcgcaagctttcgaggctatggcgtctatacaacgacatactatctttaactcatctgctaaaggaagcaaactctcacattgttgaagaacttcaacacacatttcaagattcttgcatactatgctgtctagatattcttcagctcttgagcctagattgtctttagcatactcttcagtcatttcgaggtaatcagaaacacaacagagctgagcaacatttgtggacatgatttcaaagttgatgccataacaaaacttggctgctaactcaaatgtttcagctcctcctggtaaattaagaagctcaacctttgatatgtctgtgtctctgtgttcagctactagttttcgaattcgaccacttcgggatacaagagggaacttcattcatcatcaaacaaaaaccataatcacatcagatacagagcttgataaaagggttgaattaagatagctcaaagctcaaattaaagcagagaagaaaaagttagttaccttgtgtaatgaaaatgttgttccattaacttctaatgtaatatcacttggaacatcacggaagatcctaagaacaaacaacagttaaaaatcaatcgaatgtatgaatatgaaagtgtacataaaaacacttgggaaagaaagaaagactcaacaacaaaccattcactacaacgatgccttgagctcttggccagagagagttgttgttgttgcttttccatggatgaaagagtgtagagaagaaacccaatagagaaaacccaagaatggaaaggagaaaagagaaaggaagattggtttgagtgatgaatattgaagtggaagagagagaaagagaaagagacccagttgaagaaattgttgttgaacttctttggccattgtcatcaaacagatggtgttcattgttgaaagcatagattgcaattagccaaatcaatgggccactttggtgggtcatacccttacttcttttctaatatatattgcaaatattgtaataatgtcattatcaaagttcaaatctttcaaaatctcttgactattcttcttcctactaattaataattgatcttatgttaaaacaaaccaaatcaatgaactcaacttttctttgaagggaagaccttttactctaattttttgtttctctttccaaaaaataagccagaaagaaaggaagtggtgctcttctaactttgtttggagaaaaagtcaaaaaaccaatcaagaacatagccaaaaagtgagaacaaaagtagttactttagtttgacaactttgacacttttaaatttttttttt

SEQ ID NO: 188962 - DNA, 1110 bp, Cannabis indica
cagagccatatcccttgcgagcatgtgctcctatccgccgatacacacctatatagatagtgaccatgttcactctgatacaatttaagattgataagcaaaaaaatagtcactatcttgaagggttggggaatattgtggacattgtacacatggaataaatagtagattattataaaagtcatatataagaaaatgagctacttcacttatcaccaattaattttaagatacaacctcttacatattaccatatactcatttattcttactttctcaactttacatttccttatcttaacacaagtatattgacaagtcagagtatttgcacgaattcctcattgatagcacttgtgggaaattttcttttttttacgttgttctgcacgtgagcttgtgtaaaatctgttcagacgagtataatttttaatacattgaagctcctaaacataatacatcttattattataagatatgtactattaacactattcacgagcttaccttccaaagtctatttagatttttagtgatgagcttcaaagagtgttctaaaaataatgtaaaacattactgagaatcacaaataatcataagaatacttacacataaaaaaaaaaatttagatggaaatattatgtttgctcatttcctacacagggcattttctctttttggtatatcgaaaaattataacttaatttcttttatataacaatttacatgcattattgttgtcgtacacatgatggggcatttttaatttttggtgtatcaaaaaattataacttaatttttttttatataacaataatgtacattgttataattgatttttatataataatgtacattattatattgtattttttgaattttttttttaaatatttttataattgcacgcataattatattttttatatgtgtgtaagttactattttgaacttcattttttatattgtaaattaaatagacaaatagaaaaattaagctgtgagctagatattataaaaaatttaaaatatattttcctttagctggttgttaaaaatataaaaggctattaggatgaggaaaatgttaaacatacaaaaaaaaaaaaa

SEQ ID NO: 188963 - DNA, 2209 bp, Cannabis indica
atacaagacttaagacttgtgcaaatatgaattacatgctattacaatagaaaaaataatagtaaaaattatattaacaacattatagaatagataattgatgaaatcaaatgttttatattatttctattaaattaattttttctgttcattttattttgttcttttatttatattatttaacttgattttaattagcacaataataataataagaaattggtaatcaaaagttaaattggatttgccaaattatatatttcacttatgatatgtatttgtgtctttaattttgacaatacatttttgagtcattatcgaagattgaatttgtatcacctacatgattattaaaatattttaattgtaaaatttaaattaaacctttaaactttaatgtatatttaaaatattagtgattattctaataaatatggaattattttaataaatttactcaaaattgagtaaaattttatcacaagtactatcaacacaatagagtagttaagaaaaaaaataaaatcaatagagttagagttaaagataatgaaacaaaaatacaaaataaaattaataaagtggataatttccttatttatttttgtcatcactaattctacttccattcgaactaggatttttcatcatagatcaaccaaactagtgaaagtgcatattggtgttaataacttagcaagtgtcctcctactaagttattatatgtttcgcgctaaacggtgtcggtttgtttaaaaacacaaagtctgagttggattgggacttattgagagccgtttttataaagaaaacggtgtcgtattagccgaaatcgcagtttccaaattccaatattgtcccaagcaaagcccggaaactgacccaacttttacagggactctgatctcttcggcgaccctaaaaacgtccaaacacaccaatcttccacgacccacttcccccgatcgctctctctttcctcctctttgtttgggatccaagaaaattacaaacccccctttttattttccctttcctcaatttcaatttcaaaggtgcgttctttcattcgcttaattttttattttcaattaaaaaaaataataatcacgtgagattcaattgctgacctgacctattgttttgattattttctcggcagccaaacaacctgaacttagcttattattgctaaagaacaaaaatcaaattacttgtttttatatagagcttcaacggggttgtcctagtgtaagtttttttttgtttgtttgtttatttgtttgaacattgagattagctcaaagtgttttgagttgcatatttgtgtattcaatagaaaacgatttagattgtatacgaatgtgatctcattactagttactggaatttagacattgtctcccaatgctctgattactctttagttccaatcattatcttattaaagttaatattcaataatttcttgggattgctatttgttttttttttctaatacattaattgaacttagttactttatttaatttttcaattaatgagttgagtttaatctttggggagcaactgattaaattttaaactgtttggtactgactattttgttcattttgtgcagcttttccttttctttttgtaatcaaattaagattatccatttgcatttggagggtgtagtgtacgtgatatgcgtatttaaaccaatctcctatgatatgtaaatagctttctgggaatgtgccctgtaagtcccttatatatgcttattttttcctttaattgaatatagtagaaataataattagggaaaggtttaattggaatacaagagttgtgctttgactttatatttaattcttgtgttgcattcaactcattttctctaattattcacgttgcagttttctttttggtatgtgaatttcaatttggcacttgttatgtgattgttgtattcaacagtttccgtcgaacttatcatctactttttagatgttattttgattaataagactattaatatggatgagttttaaggtcttaagcttcatatgtacaagtgtttatctgttgaacgtatgctagttgaataatcaggtgaaagtaaagggccgcataaaataatactttttagttaggtgctactagaaggagatttaacactgactaggattgaaaggcaataaagggctcctgctattagctt

SEQ ID NO: 188964 - DNA, 4776 bp, Cannabis indica
ttgtcacgaacaaagtgaatgtctatctcaatgtgtttcgtttgtgcatgataaacggggttggaagccaaggcactggcacttgcattgtcgcaccaggtgactgaaactaagggcagaggaaaatcgagttctttgagcagtgattccacccaagtgatttcagcagtcacatgagctagggccctgtattctgactccgtgcttgacctcgacaccactgcctgtttcttcaaagactacgatattagtgtgtccccgaagtaaacacagtatccaccaacggactttctgtcatcagtgcagcaaccccaatcggcatcagactaacctgtaatgttgagtctgtcactatagccgatgtgtaagccatggttgagagtcccttttagataactcaaaattcgttttgttgctccccaatggacagttgtgggagcttttaagaattggctaagtttgttgacggcaaagcttatgtccggccttgtgtggcataggtattgtagtgccccaataagacttctgtaggtagttggattatgcattgcttcaccatcagataaagaaatggttctccctgtaaccatgggagtgggacaaggtttcaggttactcatgtcatgtctgtttaagagttcttcgacatacttccgttgagtgagatataggcctgtgtcatctcgggtcacttctattcccaaaaaataatgaagtggccctaggtccttgagagagaacagtgtgttgagtttgtagatgaactctttgacctttgcttcattgtttccagtcactatgatatcatctacatagatgagaaccaatatgattaccttgctgtctttgtagaagaatagagaggtgtcagcccttgagttcttgaagttcctgtcgagtagagtgcctttgagtttatcaaaccaagctcttggagcttgtttcaacccgtataatgatttgtgtaattttcacacatggtttggtttggtgggatcttcaaatccctctggctgaaccatgtatacatcttcttctagagtgccattcaagaaggcattatttatgtcaagttgttggattctccaatttcggttgacagcaatggtaagcacaatcctgactgtggatgccttaattgcagggctaaaggtttccccaaaatcaaggccaggtctttggtggaaacctttggaaacaagtcttgctttgcatctttgatgagagccatcaacattcaatttttccttaaaaatccacttacagcccacaagattatactcatctaaataaggtaccaaggtccaggtattgttggctttgagggctaaaatttcagtgtccatggctttattccaccccttaatcttgagggctttggcaacggtggtaggtattttagagaaagaggtgcgactgaggtgatttaggagggcttttggtttaaaaataccggccttggcacgagtgatcgtgggtgagtggcttgtttaggtggctaggaagggacatcaggtgaggctggtggggaaggggcagtggcagtatttggggcagttgtgagaggtgtttgtgactgaaaaacaacatcaaaatggtcagtggtagcagtattcatatgagaggagatgtacctggtgtggctgctgctgtgaggagacaaggtgaagttcggaggtgctgctacaggggatgcagcaggtgatgttgcagatgcatcagctgaaccagtaggtgagggtgaaggatgggttgagtgagattgaaaatggaggttagggagttgagaccagccttcatgatggacaaggagagactgctcaggagcatgtttattgagaaaacctaatttgaaagggaattctttctcattaaaaactacatgtctcgagatatagaccctaccggttgtgttgaggcatttgtagtctttgaaggattcactatagcctaagttcacacactttagtgagtgaaactaaaatttatgagattgataaggtctgatgcaaggaaaacatgtagctccaaatgttcttaagagcttgtaatctgattttttatggtaaataacctcaaaaggttatttgaaattcaggatgggagttggtcctgtttatgagataaacagatgtttggaatgcatcgacccaaatttcaaaggcatactagcttgagctagaagagttaagcccatttctacaatatgtctatgctttctttcagctctcccattttgagctgaagtgtgaggacatgagtgatggaatcgaattctatttgtgacaagaaagttgttaaagcttttctccaccccaatcggttctaagaaactttatcttagtgtcaaattgattttcagccatggatttgaactgagtaaaggcatctaatgcatcagatatttgtttcaaaggatatatccaagtaaagcgactaaagtcatcaatgaagtggatataaaacttgaaattggtgttcgaatttactggggcagatccccacagatctgaatgcactagttctaacatcttagcagccctactatgagaaagtttaaagggaagagcatgagatttaccatactgacaagcatcacagaaattttctttttcattaatagggacagttacattacttgttctcaagacatgtttgagaattctactagatggatgacccaaccgttggtgccatacatcatttttggaaagaaaactagacttatgggcaaaattagcagacaaaactaagctcgagttgatagtggaaaccggttttgtattgttggtgttgaactggtacaagccatccctaagcatcccttgttgtagtaccttccttgtgaccttgtcctttacaaaacaagtattagagtcaaattcaattaatatgttgttgtcagaaacaagccgagagatgcttataaggttcttagcaatgtcaggtacaagtaaaacatatttaaaaaatagagatttagagggttcattggtgggtaacaaaccagatccaatgtgtgtgatggtcaaggaacgaccatcaccaacagtcaaagtgtccttaccaccatattcatgtttttgattcatgttgttcccatcagctgtgacatggttgctggccccactgtcagcataccacacatcactgtcaacaactttaggggtttcaatgtaagcagatggacctgatttactctgagtttggttgctgtgtggatcggttcccatgtaagcttcgtcgtatctgttgtaacatacagcggctgaatgaccaaatttgccacagacttggcatgttgtctggaattgccgctgctgttgaaccttcctcggcctcttcctcgattgtttcctccacgggaattgtttgagtgatttccacggccactggtgttattttgtgagctgttttgtcctcttcctctgcctccatgaggtgttctatcagctaggttgtcttttggtgaagttgtggttttgggaacaccattgagattttgaagacgttcgatcttgctatcgaagctgagcagtagttcttgtagttgctgtcaagtggtgttgatatgagcttcaatttgcagtacaataggcaaatagttagcatctaatccacacaaaacattagcaataagatggttttcagggtaggggtcccctgcaagtgcaaggctctcagcccaggctttcttttggcgaaggtattcaaccatggtggtgttgcctttcctcactgtttcaatggcagtccttgtatcatccattttcgatttcgaatgagccacatataagttttccaaagctctccaaagtgatgcagatgtggtgcaaccccatcactttcgttgctatagtctcagtcattgagctatagagccaacccattaaaagctggtcattgacgatccagtgctcaaagtctggattgatttgaacagcagcttcggttccttcttcccctgcatccacattaacataaataaattcagtaggacaaacacgtgttccattaagaaacccatcgagtctgtgacctctgacgatgatagagaccatcgttttccagagtgtgtaattgttcctgtcgagttttagtggaaatggttggtttagggtgttgaaaggtggagtgaagttgctggtgttactcggttgtgctggtgatctgtttgtagtgattcctgggttgctggagagaggggtttcattgttgtttccaggtgttcctggattaggagtttgagattgattggtggacatggttgaaggccttcgtacccgctctgataccaagatagaaaatgcagagaagataaaaaattggtaacactcagctcaaattacagttgaggaattgtattgaatttatagtgaagaatacatttagggatgattacaaagaggacacatggcagtaaataattgatacaatcataacataaaagatttgtacaatcatgagcaaatgatttcgccaggatccaataaagctgttagagaaaatattccttatgcacggattgctgaggtgtacaagggtcatagtgataccctgtggctgaggtatagcaatgtaacagtggaggctcatgtcttaacaaatttaagcaataccgagcctcacgacttgaagccaaagatctttaaggtcttggctcgtcgtttgaggttccacacttcgtctcgataagactagggtttacaccttaaactcgaattcactcatcaatggaggttttgagaaatttaaaattacattatataataaaaa

SEQ ID NO: 188965 - DNA, 1184 bp, Cannabis indica
aacaataataacaacaacaacaagaagaagtactaaagaaactagttagctcctactccaagaaagtcaatgaaggacaaagtaatgatctttttctcatcaaccttatcttctttgatgttttgggtttgatttggatcaaacatggttaaattaatgctcttattggttgcaactgaatagtactctgcagagttttctgagttagaatctgattgaccaattccaactcttcttttgtagagactaagtaacttgtcaaaactcccattttttaagcctgcaaaaaataaagacaataactttctcaataaaaatcaaatctttaaagagttagaaatacccttttgaaaactcaagaggaaaaaaagtttcacttaccatagtgatgagatgttgaagatggagttaaagaaagctcagtacaagttgagattgattcatgatcattgatggtatttgaaattgttgactctgtagtacttgaaccattattgtaattatgatcattattgttagttgataaagtcatgtcaataactttagggactagaatttgggaatgacaagatgatgaagttgaagaagaagagggtcttcttctcttgtaaacattagattgttctctatgttttctagccataattacatgccaatgattcttaacagcattatctgttctgccaggaaaaagtctagcaatcatggcccatttgttaccatataatctatgagcacccaacaatctttcctcttcttcttcactaaaagcccttctgttaattcttggatctagttgattaaaccacctcaatctacaacttttccctagaaacaaacaaacaaaaaaactaagaaacaaaacaacataacaatacaaaaagtttagctttttatttttacctgatcttccttcaagattttcagcaattaagttccaattttgaggaccatattgggttacaagctccttaagcttagcatcttctattggtctccaatggcctctagcacaaagctttgtgtgaacatttttcacaccagatgttgttctgattctgatttctttctcttttcaggtattttcatcaaacacattaagatcacttattctcttttcttctctgttttccatttggttaggaaaaatccatctttcttggttttcttcagatgaagagctc

SEQ ID NO: 188966 - DNA, 1775 bp, Cannabis indica
gacgccatcaccaccaacgaccccgataccatacgtgagatacttctcaggcaagacgaggttttcgcttctcggccacggactctggccgcggtgcatttggcgtatggctgcaatgacgtggcactggccccactaggcccacaatggaagagaatgaggagaatttgcatggaacatctactgacaaccaagcggctggagtcatttgcggcacaaagagccgatgaagcccaacatcttgtgagagatgtatgggcccgggcccaaactagaaaagccatagatttgagggatgtgttgggtggattctcaatgaacaatgtgacacgaatgttgcttgggaaacagtactttgggtccggatcagctgggccacaagaagcaatggagttcatgcacatcacccatgagctatttggttgttggggttgatttatttgggtgactacttgcccatttggagatgggtcgacccttacgggtgtgagaagaaaatgagagaagtggaaaagagagtggatgattttcacattaagattattgaagaacataggaagagaaaggcaggtttgagttctcaaggagtggaaaatggagaagagataatgattgactttgttgatgttttgctatctttgcctggtgaaaatggaaaagcacatatggatgatgtcgaaattaaagctctaattcaggtgatcacttactcaaatattttgaaacagtaaatgatcaacaaagtttgtatttttatttatttaatattgatttttaggatatgatagctgctgctactgacacttcggctgtgaccaacgagtgggcaatggcggaggtgataaagcacccgcgggtcctccgtaaggtccaagaggaactggactcagtcgtgggtcggactcgaatggtgtccgaatcagacttggcccaccttaactacctgcgctgcgtcgtacgagaaacttttcggatgcacccagcgggaccatttctgattccccacgaatccctttgcgccacgacgatcaatggttacgaaatacccgctaaaacgcgggttttcatcaacactcacgggttgggccgaaacacaaagctatgggacaacgtggaggagtttaggcccgaaaggcattggttaggtgatggtagccgagtggagattagccacggagccgatttcaagatattgccatttagcgcggggaagaggaagtgtcccggggcgccacttggagtgactttggttttgatgggtctggctcggctctttcactgttttgattggggtccgcctgagggaatgagcccccaagatattgacaccactgaggtgtatggaatgaccatgcctaaggctcgacccttgttggccgttgcaacaccgcgtttgcctgatcatttgtaccactgacagttttcaatttccagtcgtaatatataattcataattttaaataaaaatgaaaataatttagtcgatttacagaatgggcaactggacagcatttcatttaataatgaatggattagttgatttctaaacttgtttgcgatgaagtgtaaacttgtgttgtgacccgctcaaaccaaattcatgattactacatacactatcatgttatgtacttttttctccacctgatgttattagtgtaactatgcaaatatacaaaattctataagatttacagtcacattattattttttcccaagatagtatataactattattatttcaaagagtaactatttcattattattattatt

SEQ ID NO: 188967 - DNA, 1159 bp, Cannabis indica
aggtcaatgagtaaagttaaatagtttccaacatctactgattgttagaaaagtactcaattttcttgagttaaacagaagaaaatttaacatctatcatttaatcatcacaaaataaaatattcttgacattttcccagcattcgtacaaatggaaaagaaaaatgtaaagttacacctgcaaagtatcgatcaatttagctcgactctcgtcatcttccggaggcgtctcgaagatcgtcgaggaaggccatccatgctccttaaaatacctaaaaccaatccagaaagccaattataatcttgatttttttatttttttgaaaaagcaaaagcagacacaaagtaagaattatccttagtaaccatcgcattttgggttttccaccgccgatttggttctgaagcacgtcgtaaaagtcagaaccccagttgaggggctccggcgaagtggtacatcgaacattgaaatgggcaaaagcatcgttgtaagcttgacggtgcaagtgctcagactcgagtatgactccatcgcagtcaaatatgagagcgcgaaggccagaagaagccgaagctgaaaccgagagaggtctccaagagttcagagtcttcttctttgtgaaggttcgaaaaggaagtgttgaattggagagaggtctgagagaaggcaaaaccagagcagtgtgaaaagaagaatatgaagaaggaggagagagaatcatcgtccatgccatagccatggctgttacctttgattcctgtggctttcgactgctccctctaattttaacggatttggtgaccgttatggaccttgaaattttgatgcttttgatttcgtgtcgtttcatgagttatatgtcgttgggtttttttcaaactacgtgtcgttgattgttttatttatttatttatttatttttggaaaaacaaaatgaccaataacattgatataaagcagtacgatcagtgaatgcattattccaataagaaaaaaaaaacttattatcaaagtgtaatctactactacataaaaaaaaaataatacatttagaatgaaagattatgattttaagaaataaatcgttgttaattttgaccatgttttgttaaatggtctatttgtttaatgaatattgttagtgttggaagcttttct

SEQ ID NO: 188968 - DNA, 1008 bp, Cannabis indica
tttatgtaattttgtatcaagcaaaaaggagaaagtagttgctgtagagactgttttttggggatgtaaataatatcctacctacaaggataattacttttattatcttttgatacccctctcttctaaaactctttttgtatagaacagaaatatatagtacaaatttttcatatctccttctaatattatgcttctctgtgcgatgaggcaaaaaaacattcaaatgttttcttactaatttatttttttcgcacgtgcaactccctagtatatataatttataaataattttttgggtcaataaagaatatttccccatataataccttgatgagtacaaagtactacataactaaatactcaggggaatactatatactccacagaaactttggttacatataagaacatgtgatatccccaaattattatcaagtcggatactaaagaacaatttgggaaaagggaaaattaaaagaagaagaaacaatttatatagatgagaacatattaattaattaatttgctgtaaccaaagctgggattaatccccaattaactatcctttggccccacatgtaacattatcacattcataaagaaaattattaagccccaccatgtgttggttataacttatatatagtacgtacgtagccgtgtaccaagtgtaaaatttctcctaataattaaccccattgatttagacgtttgatatttgatcaacctgcttgtgctatcatctctccctctctctctctctcttcttgtttgaatgttgatatttgatatttgatccttttgctatgctttaataatcccattaattaataatatgttgctcaagatgacgattgcatcaccgaacaagcaacagcttgagcccaatgccttaacttcgtcttaacttgttgaggattatcacctgcatacatacattataatcataataagcataatatataggagcattgctataagccaccggtgcctagcaccttctcg

SEQ ID NO: 188969 - DNA, 2041 bp, Cannabis indica
aacactaattctgcttatggttttgctgttccaaataccacaacaattgaaaataatgctaccacattacttcctcatcctgcggtccatgtgccaaccatacaaggtcgaccaatctcaacctgtggcgtcattaaatgcttctccatagcaacctgcaactttatctggcttacaacctccacttgcacctgcatcaccaactctttctattccaaacaacactcaaccacaaccccacttaaatattgccacaagtatatcctcaacatccattagtcttcccacaccaccaaaactgagtaatgcctccccaaacacatcaaacaccatatcacccactccaaacatacaaacaaggactcatgccacaacaaggtcaaaaagtggcaaaaggaaaccaaaagcctaccttgctaccaaacatcatatgcttgaatcactattaccatctgaaccaaagtcaatcaaagaagctcttaaagatcccaagttgcatgcttcaatggatacaaaaaacaaggctctcaagaaggcaaaaacttggactttagttccaagaactaatgacatgaaagtaatcagcaataaatggatcaatggctttgtgagctacaactactagttcatttaattaaaacggattctcttttggtggctcaaggattgcaatctgcccaaatgtcagtttttgtatttttattgtatcttaataatatttcccttttagtatctaatcactggtgctcagattttaagtctgctaataatgccactcacttgttggtaaaatttgtactttctgtgatactaattgtcatggtttgaggaaatgtctctatcactgatgtctattgtattataattttcttgttttaatataataacattttatctcaaaaaaaaaatgctgatataaaatatatgttaaatttgacaaatactataaaagttgtgtcaaatttcacactaaaatatagcattaaggaaatttgtcattaatattgatctaatttacaaatttaaatttttaattatttttatatatgctcttaatcaaaattaatttcttttctgatgtaaaaataaaacttaattttttcttacattttaaaaattaatttgcaccgtacgtatctatccgaacacagttacgaaagtttggtaaaatgtaatattagctcatttttttagtcaaattagattgagatggtcttatactatttgcaggctctgccagcatttaattgccactattgttattgctttaattaacttgttctaaaatattaatggtgtatataactatacttatataattagcaaatatttgcttctcataagttgaataatttctgtcaatgtattaagttcacgccatccattctaaaacggcttccgtcaaaatatattatataaatttggactcttagtttagcagaataatagtctaaaccagtccctgatatcgatccttaattcgatcgatcgaactcaaaggttacggtttccggggattttgattaattagatgggaataaggaatgtgatggtgatggtgatggtgatggggttggtggtttttggtggcattgatgttggagaaggggtgcgatatcgtcttcctgagccatgctttgggaattgcatgaagtcttgtgtgggagatctaaattccaaggaatccttagtcgaccattgcaagacccatgtctgcaccaatcagtgctaccaaattgagtgcatcttttgttagccggcttatatatatatttaatcataatgtttatatgatgatgatgatgatacaatgatcatattccatactatcaatgattagacaaattatcattacctaaatgctagttgtctgcgttctcttaatatatatcaacatccttttgtttaagacttatattgtttccttatatattctatataaaattgtagttatgtgaaagaatttttagtttaattgtgttttcataattttttagttaactataacagaatatcataattacttaacataatatttttt

SEQ ID NO: 188970 - DNA, 3192 bp, Cannabis indica
tatttattttggtgtgttgtatgctcattatatatggtataagttactagtttagtgctttgttttttttcatacacgtataatgttatcaaacggcaccctaatagctagattgaatcatatataataataaattttaggatttgggtattcactaacatatttgtaattactttttttcttaataagtataaatatgtaaattccctataataaatagttattgttttattttaatttattttatttttgtaaaataatatataaaattttgtgcttaaccaaataatgtaatttaattaacactaatttaactaaatattctcatgcataactaaacatgattataagtttacaaacaattatattcttcttcataatatttcatgtaatatgttaaaaattaattgacgtgtcaaattttaattagtttgacacaatatgaaacactactttttaaccggagatcttgatttactaatcggacatttagtataagaaatcaattgtactcttgattgtattggaaactaacacaacatcatacacatatacaaaatatagaacaggcatcaataacattgcagcagaaagcttccctttacaaacaaaaaaaatatatattatgtatagatatatattcagttatctacacactttataaacactcaaatcttatatagtttccttctacgcaacaacttccccctacccctcattctagaactaaccaagtcaacacttctctaaactaaaattcagatgactgcaacaccaacataacctacaaaccataactcatcagagaagaaaaagttgaagatatctcacatgtatccgcagtccaatttggatgctctactgcattttgaggagttatccctttgtgtgatccacctctacacacattcagtttcgtacagagattcaaattgctgcagcgtagaatcgcatctcattaccgttatctgagtaatattcattaaagttaaggtgtccccagaaccgggaaagcccatattctccatgttttggtgactttagataatacagatgcaattcttggatatttttatcaaatacttttttcatggcaagtacctgcaaaagctcaaacatttgttagttaataacagcttgttttggtatctttctctcaccgtattttacatttaaaggttgggcaatagatgacactatcttcttagatataatttcaaagacatcacttgtttttcatttgttgaaaattggggttttaaaacaaggaggtgggaacttgcaacttgcaaccacagggtagtggtagggcaaataataatttttggaagcagtgtgctaaatgtgataccatccttggatcaaacaatgattaaatgaaagttaaatccagacttcgatattatataggaacctagttctgagatcttcacttgttctagaaaaggcaaagtaaataattaagaaacaacaaagcttgctacgtatttttggtcatggctaccattttatattcagtttcaacaaggaagttccagaattcataaagacattgcatcattttgttctgctatgtgattgtcagcgagaaatcattgtggcaatttgactagcgtaataatctttagaatttataccacttgttaactaaacattagcctacatgattattataaggtgatttttcttttcatttctctgttatggacaaaagaagagacttgtattaattagggatttgaagatgacctctaacacaactacataagaagtactagtacttgtttgatacaattgtaaaggtgtaagaatcacctgtgatatatttactctggaaagttttcccaccagctctccttgatttaatccaacatcccacatgcctcctctaagacaagaccgaaaatctaatgcacattgcaaaatgctgtcgatgatcctggctatatgtcgtgtttcatcagatagaaaacatctgcagagatgtgatcaagtaagaattaaagagaaaaaagaaagagcaaaacgccaatatctcccccacatacttgtacgaggaatcccctgtaactaaatataaatgtcgaatcctatgttcctagaaaccagtgaaatacttgaaatgttttctgataggcagtgcaacatagaatataggctgattaattttgtgcttttctcaaaaacaatttgcaatatatacgggaattggtatatttcaaaataacatcttcagctctcaaactgacagcagtggaacctgaacttacacatgcaacgagtcaattagatatgccatgtgcactgactcaagatccatcatatctttgacctgtaagagtcaaaatcatatttaagagcaacacacagtccgagagaaaaagaaaaaaaacagtgaaaagtcactactacaatgggaattataaattcaataaccacaataattagcatggcaagaaaagacattacacagttaatgtgcactaacacatgatagctactggcaaccatgcacattaaataaacaatcacagaaacacgcattggcacccatcaaacccaaaactaggaaatggaaaaacaactcttaactggaaatcataattttttgttttattcaatataatgaaaagaaacagaaaattcctaacttgaagccagcccttcactttcctatcccttggtaacttgatttcaatatattcacgtgaatatcactaggtactaacaggtacaccctgatacatttaaacacgacacttcaaaatactaaatgctagagtaaacataaatcaaccatgtaagaagtgtaatatataaataaaatgtaaaaggaaatggaacctcaaatcttcgcctaaaattttacatctcataaaatcatgtaaacccaactttcacataccttatgctgaagggagtgcataaatctacaccatgatacatgtgatagttgtgactctacatactgctgcagggtagacacaaaatgactgacctgatgcctgtatatatgcaagaggaaaaagaaaaaaagtcctaaggaaatagtagtgtgattttatatatgaacatagcttatgcagaaacagttggaaggaacaaaatccgagaatatatacagaaaataaaaaaaaaaaaaaaaaaaaaaaaaaaaaaaaaaaaaaacaaccaagtaaaagacaacagagt

SEQ ID NO: 188971 - DNA, 1826 bp, Cannabis indica
gggtatagaatgtaattttctctatatattcttctattatttttgttaaggggccctaagctcgggcttagtccgtcttagtcgagcaccgactctaaatttcaatagcttcttataattatttatagatatataaactagttgagatattcatacacaaataccaattttagcttaatagtgaaaatctataaaaagagggtacaaacaaaatgttatctgaaattataattctggttttcatttaaaactaactaaagaattcacttccattattcttggaaaaataaagtcaaaaaaataacagatatcaataataaaatttatttttattcatttatttgaaataatttaagagccctccctcccattcttctggttttctctttactattttccacatcaatcttgagttttgattttccttccaatttgaagtagtcagaatagtcctgtctcaaatttcagatcattaattaaacaaaaaaaaaaaaaaaaatattaatttcatgacaaaattatggtattaagaaatttattaccttcctaaactcactaaattcatgataattctttgtttcgagtcgaatctccaacgacattccatcctgttgctcgaattttcgagcaatattctcatatgtagacatgccatctctcaaaaatagagaattacatttactcccacaagaacaatcattccaattagttgcatcatcccaaacttcaaatctcaaaaatagaaaattagatttaattaaaaaatcaaaatatgtacccgaaaaaataatcttaataggtttttctttttaccgtggctaaggcaaatgcaataagaaaggcatgaattgcaaatcaagtaagccaagtaacaatcttgattgcaaatgctacataatacagtgccttgttgatcactgaatcgaatactgctcaaagatcttcgcaaaaccctactcaaacgccacaaattttgctcgagggttctaaaaaggcgaacgaaagagagcttagtagagaagtaagaacccgagttttgatcatttttcgaagaaaaattgtgtaaaagcattgcttctttacacaagagttcctcataaggaataataggcaaaactcttagtaatgcataactttgcctagcttcttccccgaaaggaaaccaatcgccaatcgcgaaattcaccgcctcgccacaattaaaacctatttttttttcaccataagaaatagtcaaaagacatgtgaataaaatttagggtaaaaaaaaggtgttatgaaaagaattttgttaccatggctaaaaccagagtggtatgctttgggaaatgttattacaaattcccctggcttttgtatagctttgtaaataggtacattgttttgaagcaaaatatttgggggaaacattgttgttttctctgcaagaagtttcgaaacaccatttttttctttttcttcgccattgtagatgtgattgaggacgattttttcgaatcgagaggcgaaatcacaaggcactccgtaccaagtttttggtgcaccagagtgatgataattaatgctacaatgaaaagaaaaatgttatcacaagggtattatagttatttcataataatattatgaattttgagggaaatattggaaaatgaaaaatatttttgtacctgtataaataatgatcttcaacatgccatgcaaacatactatataacatgccaatgtatagcataggatctgttattccctatttaaaaaaaagaaaaaaaataaaagtagtataagaatgtgaaaatagtaatgataattataattataataataaa

SEQ ID NO: 188972 - DNA, 3324 bp, Cannabis indica
agcagtgtgtgaacagatgaaggtaacttttgtggtgtttcttcgttaatgtgttagaaagggtattttgcagaatgatttattaggtctgaaagtacattgcttttagtttttttttttttttttgggaaacgatgggcttatacttttatgctttaattcacaacagtcagaccgggattctttggatggtgatgcttctactgttggtatatatgaaactgtacgatctgaagtgaggcgtgctatatctgaaatccaaaatgaccttgaaaaagtacgttttctccttcccttatctttaagtaacaaatgattcggtgcatagtttattgaaaatgcgtgaagttcaacatataaatttggcaattgatcaccttcgatactccacctccactcattgttcaagtatttagcatttcaaatatttacatattagttaatcttctaatttttttatatatagttgccaagattccaatttagtaaaaaaggattgttcttattataacttttgagatattaataaaatgaggttcatgtatggttttgaagaagtattatctcactcaagattcataaatggcaattgatcactttccaataatccatagttgttctagtttctattttttttaaacataaaatgaatttcattaaaaggcccaagaagccacaatgcaagtttacaactctaggtttaaggctaaacatagatctgtaggccaggctgccacacttttgcgctctcttgagaaagaactaacttaggaagggagtcgtgtagagaattaaccattatactgcaatgcacatgaacagggaataccattttctggcaatgcaattttcttttgtaaaaggttattcaacaagaaaaggaaaaatgacagaagaactaattgttaacctcatgagaataattgttgaaaacatcttatgttgatttagtttcttagcttgaataaattaattattgcttataaggacatccattgtggctgttgcttactagttatggcagtgtaatgctgaggtagccagccagttttgaggtctgttagcttctcaattaatataaagtgtggacacacttgatattattcctttttaatattttcaatcttttcaggccatcagaaggagtaatacatcttcaatcgttaattccaacataactgatattcctcctgatctggtaaatccaagtgcagttgaattagtttcagatataagaagagaatatgctgaaaaacttgaacaggtattttctcttgctgttttttcttcaaacggggagttgttaacctggattacgtgttatactgagtggttcaagtctaaaattttgaattataccttctcaacttaaacaactaaatttcacaacagaagtagataaatgattgaatacttattagttatgagtgagtgcgtgtgattaagcttcatttgggaaaaaatggcttgtttttgctcacattaggcttcttgttcctcttgctatctctcttgctagactgctatagtataccaccatttaaactttcctgaacttgcagtccaaggaacgggctagacaacttcgaggagacctggctgtagaggaacaccgtggacaagagttgagcagaatcctaaaggaagtacttccagatcccaagatctccaatgtgccaaagtctcgtccaggaagaaaagtaggtcccatttatttatttgataaatattttggggggtatgttggaatgtatattaaatgtttcacattagctaagtaaataattgggtttatatgttgacaactttgtatagaaacattttcactataagtcatctattttcatctttattgcatcatctagttaattgttatgacttcatgctttacttgtatcaaaaaattcaattttctttattaactaccgattattggttagaggtttccttatttgcttgttcaagaagatagtgggttaatgtatcttgctaggagtttttagttgtgtttttttgcctactttaaccccaaacaaactattactgactataattattacagaccagcattgaaagaagaaagatgtccaaacgtctaactgaagaggccatgtcttacttcgatgagtgtgtatctctatccacatttgatagttccgacttttcatcacccgaagacccacctgtcaacatagttggttgtactcctatggacaatagtgtatccccactccaagcaagctcaagtgcctcggccaccaatttctccagcagttttttcaaggataaacaggttggtctcaaagctagtgttatgctttctttttgaaaattaaatttctgaattgttgccacagatatatttatcaatacagtatcacaaaatgcattctctcatgctatgactaatcatttatggcatcccctcttctttgaaagaacaatggcagaacgattttaaggcatccctttttgcatgatgatattttaataaaattaaagcaaaagctgcaaaaccatttgtgttgtggatttgtgaaacacgttcattggaattaatgattgttcttacaggaatcaagcattcaatatcagactataaataggcatgaggctgcagaccaaatggccagcagtagccatatggattccaccttagatcagtctagtcctacaggcatcaatgagggaaggggttggaaatcccaatcccatttttcttttgcgcgaaaggcaacagaaactcctgaacttcaacaggacattcagaagtacattagaaattccgaaaaaggcgtcaagaagggtgacataaattcacaatttgtgagatcgaatggttgcgacttgggcgagtatgaattgcaggctgcctctcaaagctttgtgtttgacagaatggtcatgagaaacagaatagagtctggcagcttgctactctgtaatggtggtatcccccttccattttctccttttgcctcttttgtttaattaatttagggctgcctctgaatgtttatacttgtataatacggaagggatgctgagaatgaaattaaaaaaaagataattttataaataccgaaaaacaacaaaaaaaaatttatatttttttataggtaattatgattttttttatatttttatggatttttttttcttatagactattgtttttaggttgttttaaaaaggaccttgtttacatgtttttacgttgtggaaatacggtaccatgaaaataacgtgtttttttttttttctaaaaaatacaaattcgtaaaaatgtaaagataaaaaaaagtacttaaaaatgtaaaaaaa

SEQ ID NO: 188973 - DNA, 1574 bp, Cannabis indica
aaaaaaaaaaaaaataaacataatgatgatgaagaccaggatcttgttgggcatgttgttcacactcgtcctattttgtttaacgatttcaaccacggcatctccatcaataccggcggttttcgctttcggggactcgacggtagacccgggcaacaacaatggcctaaccacaatcttccgaggcaatcacgctccatacggccgagatttcccgggtagcattccctcgggaagattttccaatggcaaactcagtacggactacttggtctcaatccttggcatcaaggattacttgccagcctacctagacgccagtgtgagtgacgcaggcttagccaccggggtcagctttggctcggggggttcggggcttgatgaagcgacggctacagttaatggtgttttgagcatggagtcgcagttgaattatttcgatgaagctataaggagaatagagatgagttttgggaagaataggagtgaggagttggttaagaatgctttgtttgttattagtgttggtactaatgatgttgttttcaatctctatggtttcactccttttgcctttcagcgttccgcttctgcttaccatgatatgcttattcaaagacttgcttctttcattcaggtatttataaatatatacactcttatttttatttaattactaattatataatttagcttcccttttagtgttttgttacactaaatactatccacatcgaaccctataccttattttcggcacattatattgacatgaagcgtctgtggtacttgtggtaatagggttccaaaaaaatatctgaaattagttatcagatttgaaagaagggaaaaaaaaagtcaatactcgttataaatgttttttactttacccctaaactttaacatgatttactacctgaatttttttggccgttaaaaattcctctgaactatggaaattgttagatttaaggacttttgtctaatttcattcaattttattatttcagagactttgatgtctaccaaatcatgtctctcgaactttgacatgtactaaatcatatcccctcaactttcgtcatgttagactttttttactaaaattggacagaaatccttaaatccaacaatttcaatagttcaagggtatttttaacgacattaaaagttcaagggcataatttgatacatgttaaagtttaggggcaaaaatcttaattaatctttttattttttaaagttattatcaaaccattcgcagattgctttgtacaagctgccgatcttttcagtaagatagggaagtgagaaagaaaaaaaaaacctaacaactagattataattatcaccttatttggcgtgacaataatttatagtttagtctctccatatgcaatatttgaagaaatttataatttatatttagcaaataattaattaattttttattcagcctaatatactattttatactaaaccagtacaatacatcatattaatcgcaagttcatggtcttgaaactatttgaacactagttttgactctttaagtgatgtaactatatgtttaa

SEQ ID NO: 188974 - DNA, 1970 bp, Cannabis indica
gtgctagatcgccaccaaaatctagccataatagactcaagatcatcacaaaaattgattggaacttgaaaaatagttatagcacaagttagcagcttagaatagcttgaatagcagctttaagcatggtttctttccttgctttggggcagctactgagattctgccgctcatcctattaagtaaatagtttacacgccaaaaggaaaagcacagtaaacactaaaaatgacatattatataaataacgatctcctaaattatataaatctaacagatacatataagacgatagtcatactgtcaagttgcattttccaaagatatacttcataatggaaaaatgataatataaaattttcatttagacgaaaaataaaaactcaagttcattctaccttacatataatattccaacagcaaacgcattcggaaggaccaaaattctggctcaatgaaggctccacaaacaaaacccatgtaaagctaattaaaccaacacgcttttttttttgtctttcattctaggattagaaacacaaaacaacagcaggatatgtcaattcgactctcaacatcttcagtcaggaagaatttgttcaccatcagcatctccttctgtttcaatctgaggcttgggagctccgcctgctccggtggcttgcttctttttaatcccactcacaatatcgtctattctcagaagcatgcaggctgcttctattgcagtcttaaaggtctgtgccttcacattgtacgcatcccagatctgatgacacaaaaaaactatattatactcttggacaagggataccagactatttatcatctttatcacaataagttaagaaatatggatcaatatagttggtaatagattattgaagacaaaaccaaaaacttgtaccagcttggtgaagacagttgatatacttgaaagttcaaaaatgcacatcatagatgacaaatagaaccctatacatttgcttggcccaacgattttattgattcaaaatggaacccattgttttcattgacccaattgtattgattcaaattatctcaagggtcctgttatattggtattatctgaactaaatatatccaatataacattttactttattttattttattttattagtaaataagaatagatttggcaaggtagatgaaagttgcggctattgcataccttctgctctttcacgtcagtgatggcaccagtgtttccatcaatgccaatccatgcattttcaccatttgcatgctaaaataataatttagacaagttgaagaaattcagcattatatccttagaatgcaagaatagcataacaaaagcttatgaattgcttcctacctttccttgcagtgtagtcatggttctaatcacattgacaccacaattttgtgccaaagttcgtggtatagcctcaaaagctaaggcagcagcttcatatggccactgttgcacaaccatatggtatgttagtcaatattaaaagcatcatagataagttagaaatatatatatagcattgagaaaacaagtcgcttcactaaatcctatgagaacataaaatgtgtatcacaaaagaacttagattaaatcattgaaaagaatgccacctttctcctctaaaaaataagctctttttttttctctttttctgtgtaggcgtgtgggtgcacctcgaaagttcaaagattccactacaaagtgtattagtagggaaccaccataccttttcgatgccttcaatggatgaactcttttgctttaaggttgcagatacagttaactctgtagcaccacctcccggcacaagctttgggttttttattatattccttgctacagacatggcatcctgcaatcggaataaccatcagaacatagtattgcccacaaccagaaaacataaagtgataccgcaaattcataacatatacctgtaggtttcttt

SEQ ID NO: 188975 - DNA, 3254 bp, Cannabis indica
taatattagggattttgtaggaaatgattgggtccttatcttagaataaggcgaaaaaggagacatacgttaataagggaaaatgcaagacctattttggtaattacgaaaaacctttcccctttgtctcttaacaccattcaacttctccacctacacaccccaaacactgacacacacactcgaaactttcagactcacactctctctctctcttcatctctttctttctctctctgagaaatggggtcacgaatcccttctcaccagctcagcagtgggctgtacgtctcgggtcgacccgaacagctcaaggaacggttaccaacaatgggttcacgggcagtaccttataccggcggcgacattaagaaatccggtgaactcggcaaaatgttcgatatcccagtccttgatccttcatccaatggtcctccttccaccaagacatcacgaccttcctcgtcttctcagcacaacagtggatccgtccgatccgggccgaactccggtccagtaagtaagcacactagctccggtccgattccgaagaaattctctggtcccatggtgccgctccaacccacgggccttattacgtcgggtccggtggtctctggtccacagggatcgttgggtggcggtgggaggaggtcgggtcacatggagcatgccgcgtccactggaaaagcagtgtacgggacggccgtgacgagcttgagtgaaggggtgaaggtagggtttagggtttcaaaggcggtggtgtgggttttcctggtggtagtggcgatgggtttgcttgtaggggcttttttgatggtagcagttaagaaggcggttattctgattgcggtggccggagttctagcaccggtaatggtgctgataatgtggaattatttttggggtaagagaggtttgatagaatttgtgaagaactatcctgatgctgagattagaggtgccattgatggaaagtacgtgaaggttactggggtaagtatttttttttttaaatcgataattatttctatatttatcattttaaatttattttatatagctaggagtttgaaattagaattggctgtcttaattttctaattacagaagaaaacaaaaagaaaaagaggaattgagaaagagagagaaagggaatattgacttatatttttgtggcaattttaatcatacaatcatttattattgaaatacttgatgatgaagttagcctattgctctttccagcttgatattaaaataattcattaatttagattagattagattaaattatttttatttatttactcttataatttgatgaatgtgccaaaccccaaattcagaaaagaagggttggtttgaattttggtggagtaaccatttttagaatgcattagattttataactaccatatgacaacttataattggacttttaatcacaacaatgtttcataaagaataaagaacaacaacgatgttacttttgcatttttcattatgtgtgttactgttttagtcagaatctttataaaatagtaatctgggatttcacctacctaatttccttctacgcttgcaaccaatgaaattttgatgtacatgttattgtggatagtaattaaatactaattgaggccgtttgtgaactaaattaatgtatactgtccatcacttctatgcaggttgtcacttgtggcagcattcctctggaatcatcttaccacaaagaaactaggtgtgtgtatgtttccacagagttgtatgaatataaaggatggggaggaaagcctgctaatcctaggcaccgctgtttctcatggggttgtaggtactcagaggttagttaaactatttgctaaatttactaatttattaaatgattggagagtatcagatcaaactgtaaaggtagcactagattataatttaagatggggttattggatggaaccatatgtataaaataaattgatataaaaaggcagcaagcattttcttcaatgtttgaaatgatcgttttctcttttgaacagaaatatgttgctgatttttacatatcagactttcaatctggattaagagccttggtgaaagttggttatggagctaaggttgcaccctttgttaaaccagctactgttgtggatataacaaaagaaaacagagatttgtctccaggctttttaagctggctagctgatcgcagtctctctagtgatgatcgtgtaatgcgtctcaaagaagggtattgcaacattttttgaattcaagttccttctttctttcttccaactaacgagtttagaattgaaaactctatctactaaagggacaattgattcatcacaccataccatgttttttttgctcgtttgtcagatatattaaagaaggaagcacggtaagcgtgatgggggttgtccagcgccatgacaatgttctaatgatagttccatcagcagagcctgtctcaacagggtgccagtggtcccgttgcctcctcccgacctacgtcgacggtcttatattgatgtgcgatgataatcagaatgccgatgtaattcctgtatagatgtttggtagttgaatgccacgatgagtaaatatttgaagggtgagactgatgtaacaaagtgcttaccagtagaccacagctacttttctttttcctcaatttaggtgtgtaaattggcctagaagatgctaagaaagaagaggcttatattaaaggtcacatagtttccagtgaatatgcgttgtaagaattgtagagatccatatggatatggagaaacgagttggtctgtgaagaagaaagctgtataatgagaatgctaagcattgtgatttttttgctattttatgtacataaactcatagagatatgccctaaagtaaagggttcggagttaagggttgcttggttgtttgcccaaatagagttgagtattcttttcgtctatctctcatccctatttgatattttgattattatgtaaatgcttatactaagaacacgcaagtaatgtactactaagtttctcatcctctttttttttttttttttctttttaatattattcaaattacagaattattcatcttttttatcctagaatatatctccgactgttattggcgcattgagatcatttgaagtaaaaaagaaaacacttaaaatgtcgaaattagaaaagaaaaataaagtaattcaagtgtagaagtaacacatatatagtctattt

SEQ ID NO: 188976 - DNA, 2276 bp, Cannabis indica
aaaattaattaatcccctaattaattgaaattccaacagaacattaataatacaaaaaaccaaaaacccaaaataaaaaaaaataataatgaaaactcttcatcttcatcttcaacatcatcatcatcatgaacacaacacttatacacttacacttacacacatatataatatttatatatataggtttaattaatattattacatatgaaaatgatgaagatcatagaccattggatgaagaaggagaagaagaagaatcacaaactacctcatggtgatgatgagaagtagtagtagaaggggtttgatcaggttcccttctatgaaaattcctgtgacaaccacatgcggcgcacgttagtgcagctgtggtaccttcaacaccactggccatgaattctctgcagccgtccacagcgtaacctcctacacccgccgcatgattcttctgacactctccatatctcacgctcatcaccactcccatgcttctagaaacttcttctcttctcaccacaacttgcctcttcctcatcaccaccaccacgattataatcaatttaatttctctaatatatatatatatagatatatatagttctattatatctatgtatctaagagagaaagagaaatgagaagagattaattggttttggtggtttatggtactcaagctagctagtacttagccctaaccctagatctatatttatagcatgtaatgaattaattaattaattttaattttttaaaaaaagagagactaattaattaatagttatataattggaccaaagaaggggaaaagggcacagtctacgaatgaccaaccttttactgtattattattgatattattattagtaaaagggtaaaaatttgattaattactttagaatttactaccatttaactcggaaatattctttatgaattgaccgtccaactaccccacaaactcattatttttatttatatatatattgttttagtagataaaagacgattcttctttcaaataaggcaaaatctctaaataagggagttgagttcagattaaatttagcaaacaatattaatgatattctattaggcaaaaacattagcctccaatgttacaactgtaatataaaattaaatattaaatctaaaacaatttatttaataaccaactataggattaagacatcatctttaaatagtgttagacactactgttagtaccttatagcaatactcgcacaacactaatcgatatggtttgttacatagcaatttcttataatatttattaaattaaaatatcaagaacacgatattaaaatacacccaataataatataaagcaccccttaattagcatttcttgtaaagaaaatattgatgaatactttaattaaggtgtcaaacatcacaaaaaatagcgtattattatcggtaacaagttaataataattaattatatgtacaacatatcaatatgatgttagacaacttaaagtattcatttgcatttcttataaagaaaaaagatgtttctactttcaaagtgattgatttaatatagaatattgtaaaaccagctaagctagctatagatatatgtatatatttatttaattaattaataataataagttgatagtaaaggtaggttttgtggggtgcagtgatacgatgtcaacaacaattgtctagtttattgacctaaatacagaaaattcgatagctaagcttgccaacccccatgatcaccataagatttaccacttactcacttctcttcttcttcttctttaatattattataaatattacataataagagaacatacttaatctgattgcatgcactcaaaacctttccatttttatctaatatatttattaactgattgctacttctactttggactttccaaccccgtgatcatcatatatatatatgttacactactatcaattcatatatatatatatacttttatataaattaaatcaatctacttttaattatttgtgcagtatatatgatcatgatcgtgtatatatattatttattaataatattaagattatatattagtgcgtacttatttttgagaaattaatatgagctgataatgttgtattttacttgattagatgaagagaaacaaaaagggatataagtgtgtgatatgagtagaataattaaatggtccctattagctttttcttcttcctaattggtcattaatagtacttcaacattttgtatgcgatttata

SEQ ID NO: 188977 - DNA, 2099 bp, Cannabis indica
attattagtggtggtataaagttcaagagactccaccagctcaggcccacacggcacacatttattagaaaataaaggaggcccacaaacaacattagtcatgttggaattttggtccattgggcttttccccttacacttttgatgagcagccagcccatctttcactaaagtcggcccactagcaagaagcccatcatcccttttatccataccaacggtcaaacaattcaaattctcttggtccattctgttcatctccaaaacaggtagttcttcagtcctctttccttctcgcagaaactcaacctcatcatcaaagccagaaatggcaagagatctctcgactccaggtagtcgattttttgggaaccacaccgcacgcttggacttcccgaggccagcagcaccgtgagaagtccccatcgctgggcgtctcgatcgaaaagagtgagaggcaggagagcccctctattcaacacctccatcgtccttggatgccggcaccgacaacagagctcctccattctttctcaaggtcgaggatgaaggtaatccacgggaagcaactgcgatcggaccagaaaacacactttggtaggaagacaatgtggagagccaaggaccgaacatgggaaacagaattccatcactgttcgaaaccgtcaccggcgaagtcaagttacagcctctacgttggtgcccaagacacccacaaaagtaacaaaaaattcctattttttcatatttaacttggatccacttcttgaccccagatgctacatcaaagaaacaagcagagaataagggtttatcaacttcgatatcaactagaaccttgagaaatttgcaccaagtagcaggattatcttcattcagatcaactttcaccacttttccaaccaacccccctaaaagacagccattcgcctttgaaaaatactcatgggggaggttatgaatttgaatccaagcacgcaaaatgttgaaaacaatcggcccttcaatactccaagcttggagaaccaacgtataaccacgcacgcaccaagggccattctcaatagcccagttcctatgctcagcactttcaaaaccaaatttgaaaacattagaacacttcacatcatccacaacagctgccaccgaaactggaatcttccatgttttggccacaaagtcagtcacgttgaactcttccaccaccatgggagcaataactttcccaaacaagcaacatgaagacaaagccttgagagaagtatcactagggacaaggttgacagaggtttcaaggcaagaaaaacatttgcctttaagtgaggagatggtagcaatgattgactccattaatacccgacaaagaagattaaaggaactcccaggaagttaagaacctcaccaaccgaatcttaccaaccttaccaactcagagaaggacaaacacacacgacacagggaaacaaaaacaactccactcaggacacacacaacactcacacagaaaaacaaaaacaactaagagaatcacactaaaaaaccccacacagaccactcccagacaaagagaacaaactcgctgagataacaataagacaccacacacaagggtcaaaggcacgtacacacacaagagtgagtaaaaggaaagacaagggagaaggggaatgacacacacggtagagagacacgaaatgaaaggcagacaccacaacgagaggaatagtagaagaccatttctcaacgctaactaagcttgacacttagagactcattaattacttttctaaaaaaacacgctggatgctatctagaatgacttaacttcaataatggatttgttctattatcttgatatgacctacatttgaggttgtattatttgaagtaaagttttagaattacacgtgtcatatggataacactaatgtattttgtttgcaaacaaccatattaatgacattggttagaacaaagatactgtataaacgactatgaatcatattcatatgaatatgagagaaaaaaaagaaaaagatgtagtgaaagagaatttaaagaaaatgtaagaaaatgttttcttattttttttctctttt

SEQ ID NO: 188978 - DNA, 1455 bp, Cannabis indica
taattatcctcgctcaattaatatccaaaaaaaaaaaattaaatactattttaatctggatattacattcttttgttctaatttttagatcggtatttttagctatttttttaaaaaagttttttcatgaattacaagtgactttttgactttggctctaagattattttttttgtggctctacttactatataactaaaactaaattagtgataatttacatctaaataatattttttagtgataagttatttttttttttttagggaaaaagtaaaaattttattaacaactaataagtgcaataatgacaagtaaattttactgaaattaaaaaaaatattgtgactaaaaaattgtcagtaaatatatttattggtaactatacaaaatagagtattaagagagtataaaaattgccctaaaatccttataattgcattaggggctacaaatcgtccatccaaacgtgtggctcctaaaactttgtccaaaataagtccaccaaatttgaacacgtatataatctagttgtcctttaaccctaaattacaaaactaatatagtcttgtttgtagtttataattattataagaagttggtattataattaataaatttagatgtgttggtttcaaattttttaatgatcgcctacaattccttttagcagcttttgctaatttctatgatctgtttttgtgagctcaaagtactctatatataccttatatatatacacttggaaataaatgatgaagaaccatattaaaagcaatgaagaacaataattaatataaatttgtgcttagcttgttatgtccaatcaaaattcagtcatatatatatatatatatagataatattattgttgagttaagtattagacgacaatggcagatcgattggaaaagaggatttgttctttttcttttctttctttctttctttctagtctctttttgtctttgttaatttgtacatgtcaagtgtgagttgactgatcttgtttttcttttttgtctcaaaagcatatatgtttgtctaaaattaggcctacttcaatattgtttttgctaagtatggctaattaattatcatattataaaaattatggtataattaattaattaattaattaggatgtagttagatatgtactatagctattagctagctatatagacgactcatcataacataatgcatgtgaaaagtagggtcaatgcactataaaaaatgtcacttttgccagcatatttttatgctggcaaaagttgatattgcgctggtaaaatagaatttacttgtgatgtgttggcaaaagagggttggcaaatcaaaattggtattagaatttttgccaacataaaatgaaaaacgctggcaaaaatgacttttcccagcgcgtaaatgcgctagtgaaagttatgtaaaaattacttttaccagcac

SEQ ID NO: 188979 - DNA, 1200 bp, Cannabis indica
ataattatatatatatatattgaaagggattaaaatttatagttctatagaggaaaaagtccctttaaaatcatcagattagccactcttatgtcttattgtcatacaattaagaattcatatattatatagagaaattcatgaggaccactctattgatcactacaactaacatcacaatcaaccataatcatacaaaacaatataattttatattttcttattatatataacatctttttatacgtaatacactgtaccttattaaataaatgtttaaatttcaaccaaccactctatgttcaacaattgttgctttccacattaaaataacaagttttgcttttgaaataaccctacttaatttttcttcctttctttctacagagatattaaaatagaattgcctttcgtctatgtaatgaaataattgactttttctttattaatttattttatttatttttattcattgatttaaaaattaacaatatatagaaagacatgatgaataagtagctcttaatattttatctaatattatattaaatgcaatattgttgaaaaactcaaatcaaatccatatttttatactaatgtatatgtctacttctatacatagtaaatttattattttgttgagattgattgatatagacaaatattataaatttattggaaaattatgagttgagttggtgtgggatagctaactaaacttaataaaacacttgagaccatcttcgaattcattgagatggtaggccaagcgcacaatattgacaaagaaaagtatttttaagtaagttgtaacttatatagggtgtgttgtgtacaaaattatttttgaatattttttaaaggctaattagtaatttttctcccaaactttgacatgtactaaatcgtgccccttgaatctttttggccgttagaaattccccctgaactattgagattgttaaatttaaagacttttgtctaatttcatttaattttactgtttcaatgattgtttatgtactaaactgtgctccccagactttgatatctaccaaatcatgcccttcaaactttgatatgtattaaatcatgccccttaaattttattaatgttagaaattttttactaaaattagacaaaattcattaaatttaacaatctcaatagttcggggggaatttttaacggcccaaaaa

SEQ ID NO: 188980 - DNA, 3275 bp, Cannabis indica
aaaccgaagatgaacaagggaagcgaaggacttacaaagtcgagtgagttttcttttgaggtcaagatcatcacaattggtatctctgaaatacccatccaccaaatattcttgcatcacaagttggtgagggaaggccttgcctagtgccaaaatggtggctttgcctgggttggccttctttgacaaaatcacttccccattatcttcgctgcccattattagctttttagtgaaagatcggcttaattggaaaatgtgtttgtttccttgccttgaaacaatgaaagattgggttgttcttatatatatatagttttggttcaatgcttctttctgggcatatcaatcaagttcaagaagatgagttatattgtattaaagagataatatgaagtgggcagtacttaaaacaaaaaacaaattttcagttgagaacaagcttttcatgaaggtatgtaatgtttaaggtgcagtgctggtagagatttgttgtggggtttgggtgagattatcttctgcattgatagcatgaacctataccatttttattcactagtcaaatatattttggctagcaatatctgaataatattgtattttatagctaaatatgtaaatcaatttctagtgttgtatacaatattatgtgtcattaaagataatagtcattttaaatatgagggctggttcatgtgttacgttcatactcattacttgtcatcaatctctcttcaacccttcaccagtccaaaatttcagccaaaaacagaatgaagagtttattgaaagaaaaacacctgtttgcaagggaaattatcgagcaccccaaaattattgctatcatggcaaacagcctcaagcacaagggggcaaaaaagattacagagtttagaatcggctaaaaatatgtcaatatacagattttgaagactaaaaccacatagttgtgagttgtttaagagatgtgccactgaaccatgttattattttggcctgttggacaatatcaaaggacatataaccgatcaattctaatatttttggaactgaatgtgtatgaaacgattgcaagtaagacacccatcaaagttcacagaggctctttccattgataaattcaattacttgggtgactgactgctcaagggctgctgtaactgcggccaaattctgcaagaattcttctgcagttggcttctctccatccactatatcagtcacagccttaacaaatattgtaggaaccttgaaaatatcggctacgtatgcaacagctgcaccctgaaaccccattgtagagaatgagaggacatactaaggggggaagctgatatgccaattgaaaaagctacaagaaaaacttacttccatatctttaattgtagcatcatttgcagtgattgatgcttcatcgtgtgggcacatgtctaaggagtcaccagtagacaactttccaacctgaagtgagcaaatgtaatcaatattatcaatagtgttcatcaaatgaaatttacatcaatatcatgagtcatgactcaatagagggaggcttgaggaggtatcaaagaaagtagttcaaacttcaaacttccaagtttaggggtcagaaatagtcacctttagattaagctccttcaaaagtttgggtgttgagcaggcctgccgtaaaccaactccataaagatcaaaaacctgcaggaacgtaggagatagaaaatttcagtgttgcacacgtctaaagcagcaaatagatacatcaataacggtgatatatccgtgtagttataaaatataagattccgttaaacagaaaccttgttgagatttgtgggatcaactctcaaagccacatgctctcatcctatagaatctttaaacatataatgtcgtgtgaagattatgcaaatactcacaccgggtaattttgttgtctcagctacttaaagcttttgtctgaaaaaataacccacaataggaagatctactgaaatacttggagtcgtggaacttattcaacattctaagcacatagtcgcagaaaatgtccattttcctaatacaattcattgcagtttttggctttttaattggtaaaggaaacaggtattactttaatcttctgaataactctctgcagcatcatgcctagaaagagtttaggcttctatataacataaaatcactcttctgagtcccgccagttaagcacatatttacagagactttaaaatatagatgaatcatctcttgcttaatgtaagtatgtactttctcaataaaacaagataagtagaagcatgaaaagctaacaaaaactcacaggaatagggatccttctgtcatggaaagctacatcagatgcaagaaaaacatcaccgatgcctgctcctttggcctgaagcaatccataatatatcattattataagttggagtcaacactataaagtaatcatagcaattaaactttgatttttatgaaactcatacgtcctagtatacatcaatgattatagtaatgaatcaaattaacacaactagttttagtcaatagtcgataaatgaactttcaaaacatatacagaaaaactacagagaaaaaataggaagaaatatggtgactaggagattggatcacagtaattacaatgttgaaactaaactgagtatgagaggcatactttaaagccaccagctgttccagcatttatgataaggtctggctttaatgcttggacagaagcatacgtcacaagagatgctgaaatagtgccaacactgtcaacccctggatataaattgcaggagtcagtaacagaagtttggaaatgaacgtaaatacttatttcatctggaaaacaggccagtcatttttttgcgataataatatatcaaacactctagcagggatgatcagatctaagagtaaatctttattacactagagtctagaaacaggcacattggaactatccacatccacgtaagttgatgtgaatatgaatatacagttgcaacaagaaagaaaattcctagattatttttgggatgagatcaggagagaattgcacgggaaaaatcataactcggtgcgctcttttgattttaaaaatgacttatgtataagatggaccaatatcaattatcagaatgtgggttgctacatggctagatagactttacttatattaaaataatctaacaaagaattcagccacgaatattgaaatcccaccagaaagattttattattatccaagatttacacaaaat

SEQ ID NO: 188981 - DNA, 2620 bp, Cannabis indica
tgcaaacatgaatcattaggttcagtaatggaacgattaagaaaaataaaacatttaaatcatacccaaataaaagtaaaaaaactaaatccacactagccttttttgtcctcttccaattattgatatgggggtggaatttaataatacatttacttagattatgtctaaatgcaaacataatttaattggaaaaatagtttcttgctcttttcaatttcctaacaatatattttctaatagttggtagtaggtgccttggaggttgacttgtatgaagttataggaattaatgcttcaactaatcccttgtggctttgaaaagttgcaatgttcttccttgtaaatgtaaatgtagctgtagtatcttcggttgtagcaagacataatggcttaaaagggtaccctgatcatggtctactgtgtcaaaagatcgtctagttttcatctgattgttactctaacaataatgtgatgttgagtaggagtttgttatcttatcaaggattcatactctttgactactattaattttgagtctcttgcagctgatatttatcgtaacctgaaggtcctgcactattatatcttttgtaatcactttccactataattacttgattggaaattatttataaccattgaattatactaactgatgaaaacgacgctttctaggccatttaactatgccagcctcgctgcttgaagaatttttgtctgcagtttcttgtgattttgttattgtcttaaattttgaccttagttgaactgtttggacatttcttcaacttcaactgatattacttttctgatcaatttatcttggttcctattctatgcatgtctcatctttcaaattgcagtttgagaactgattgtatgtatgtatgtattttttcagcaagtgggtgatgatgaatgaagacaccagacgacttcagaaagtgagcgatgacgttcgagatgaatacttagtattttgtcctcgagaacttaggttggttctgtttcttattcactagtactggatgtctgctgagttcatgtttgttaagttttatatgattatatcttgttgtgtagatagaatcagttgcttgtatttgcatcagcttaacaggaatagagcggtattaattggtatgtctttctatttatagattagcgttcccggaggagaacaatagcagcttacgaaaaataccgaaactggaagatccggctgagtatcacacgaaggggcttgtggtaagatacctaaacttatctaaaacagtactctaatctctttatgtgttcttagcatgcttttgaatttgttggcagccccgcagagctgattttgacatgaatcagcatgttaataatgtaacatacattggttgggtccttgaggttagtatctattttcggtgcatttcagctttcaccttttccttctttttgttagagaacacctagctgacatcaatatgttgtgtctccatggcagagcatacctcaagaaaccattgatagccatgaattgcagtctatcactttagattatagacgggaatgtcaacacgacgacatagttgaatcccttacaagcgtggaagcgattgaggaaagggattcaatccattctcttaacggaatcacaaatggtttcgctgcagcagctggaaataaaccacaagactgcaagcagtttctgcatttactgagattgtcaggcgacggtcttgaaataaaccgagggcgaaccgagtggagaaagaagtgtccaagataatgaaataatcctactactcagtcagctccctccttccctagtcttattatctttggtttcatcagcctcccatatgaacaataaaaatataggctttttttttcttatcttatttttgggattttgctttcaagttgtggtttgtttgtttccattaggagttaggtttatcaagtttttgtcctcttactgatatagagatcatcagttgtgaaggcagaagatagagtgagaaagagaaataatttgatataccactcaaaaactcaaactggatgaaaataataataataataataattattattggttttgttataatgtttaattaataggtgaaaggtctgaactttgtttctgtagctgttccaaatctttgtgtggaatttatacatgaagcttgtgaatcttatcgtatcaaatgcattaaattatgctctaaagcacttttcttcacttgttttcttatactacatgtccatgaaaacagggcttatctttcgagctaatgaaataattttttttttgtttggttgcattttaagtattgaatatcattctaatggaatggtttttccaccatttagtggaatgattatacattttaaattttattttattcttattctcatgttgacttttatttttatttttctcaactaaaccgtcaccttacttttaatttttatttgaagaggtttttggctagggatattttagtcattttttttatataagcgtttatatattatattatataatttggtactcgaatttaggacctctaacacacacacattctcctatagccacttaaattagctttaagggattgctttg

SEQ ID NO: 188982 - DNA, 1617 bp, Cannabis indica
caatttgggttaaagttttgctcctttctttggtgcgaattgcaaaggaaaatggctaaaactttgttcgaattcatgtccaaggtccagggagttaataattcggaagatgcttatatgctagcttttagagtttctccaacaccaactccacccgtccgtttactccgtaattctcaacttcggtaggacaaatagctggaagccattacacaactcctacattctatggacccactggcttagggcacgtgcctacgcaaactaatttttttggctatgggtcagtacaaactggatgtagtgttactcgcgaagaagcaaaaatggatggcccataatcgaatgtcaattattcgaggagcaagagaaataatttgagtcaaaaagagcgagactccaaagaaaggaagaagttaatatgaacaaaaatatattgaatacagcagcctcatcgatattcgtaaaaatgtttataagattacttgcaatatggtccactacaaaaagtcaccttcaatgttcaaaggagggaagaaaaagatagatcaaaataagaggtgtgagtaccacggcaatgttggccacactaccaacgaatgcaattatttaaaagatgagatagaacttttggcctgagtggggcacctgggtcattgggtctagaatccaataatctatcctgaataagatataactcacgaacaactcttgattcccgaacaggagggagctgtaaatcctctacagggggtgggcctccgtcaatctccgaaaatacaacctctggctccataagcttcggtgatacaagccccagcaattcaggcccctcagggggtacccaatgcgcagcctaccgtggttgtcctagctctcaaacttgggaagattaaggaattacaaggcatgaatttactgtcacgagtaaaaggcgtgccaacccttactagacagttcgctgcactaggctgatttgtctcaaattccactgacaagtgtgttcccttattcaatctactaagatgaaggaacaaacgatttcaatggactgatgattgcgcgaaaaccttctaagctataaaacatcaactatgcaagtcattgatcttttcaaaaccagtagatgttgaagagttattcatctacttggctatcactgagcatgcagccagtgctgctctagtggatgagaatgaagggacacatcgcccggtgtactatgttagtaagtgactcattggagccgagtctaggtatccccccccccattaagaagctagcttattgtttagtattggactccaaaaaggtaaggctatacttttaagcccatccaatcaaagtgttgattaaccaaccactcatgcaagttctgatgaagccagaagcatcaggatgtctactcaaatgggttgtagaacttggtcagtttgaaattgcctatcaacctcgaacaacaatcaaaggccaagcattaactgacttcatcgctaaatgcactagcctctaagaagacaaccccatcatctgtcaaatccagaaccacatgcttgagactgtagctcaagtagagttttggaccttcttagaagctctacatagatggggtcctcc

SEQ ID NO: 188983 - DNA, 1633 bp, Cannabis indica
acattacattgatcagcgcacaatgaataaaatcattttatgattgcatcaatttatataagctttacattttgaagattaggtagaaccaaaatacctaatagaaatatgtgtaaggtttgtactgtttgaaatatatttctgtttaaaaaaatatatatattttattcatattttgtgacatatattttataatctttaatatctgatgattctgattaagaaaagatacttatataaattagttacttattgagttaaaaatgtgtctgtactcagttttgtttcatttggtacaggagtgctataataattaaataaacatatatttatattatataggacatctacatgattggtattaattagtataatgaagtaataaaaagtctaattgcatttggtggagaaactaggaagcattcggcacatgcttatatgtttttctctttaatcagatgaataatacattaattaaaatatttcattattacactcatcactaagtctagattagtatatataattttcactgaggccattttttgatgattaatcaaacaattaagtttgtacaatttgaagggtgatcagattaattagcagaggttggattcaaaaagctttcttttcttctaaatatatatttatatatatgtacagaatccttcattaatttgtatattattatatttatatatatatatatatatatcacagtctctgtctttgtctgatattagagaactaattgaaacaacctaaccatgattttagtgtccctttcgaagcacaaacccccgtgatataatatatatatatatatatatatatatccaatatataaataaagcagcagggctttgattgatgaaatgaaaaattattagttgatttttaaataactaaaactaattattagcattgctaatttatttatttatttatttatttatataatgaaccaaattaattatcgggtgtcttgcttggatttagttagaggcctcatcgagccaaagtaaagaaaataaaaaagtaaagaaaataaaaaaattaaaatacaatttgtacggattacagggacgattaagaattagaacctaactggggccatggtggaccaatcttttaaggataaaatatcgttgccgttaggttaatcaacaatatataataattaatttatatatatatatggatggataatccgcaaagaaaaattcatcaatttctgctattacgtacgttctgatgattattattattattcttataatataataagttagatgagctgtattctaactaatgttggtaagtaatcaccacctgcatattaatatatttatcagataatgatggattagttctctattattttattattggtgatcaatttcacattaattatttgactcttttaatatagtctttaaaatatatatgtataaataaatatgaataatagttatattttgaaaacagatcttacgaagaatgtcaaagttgcaagaaatacataaagcttgggatataggtcatcaaaaataccaaacctaacaaaccacttttttttttcacctcaatttaattagttaattaattaaaagttaatttggtattgttttct

SEQ ID NO: 188984 - DNA, 1077 bp, Cannabis indica
ctcgaataagactaactatcaacaaagccttttgatatggccttccattttgcagtgatagcatctgatattctttttgttaccaaattgatttagatctttatttccattttgatcccttgttatattgtccctcttcttacttctacctcttatgtacaatcttctttgatttaactctcttttgaattcaaggttgattgaacatcatcaagtgtaatagattctcttccatattgtttggtaggatgataattatgagttgggagttttcttttaaaatattaaaactttattttgtttagtttttcaggacatctatttctcatgtttacatatggattggcttgatcttaagttagacgatgaattttaatataatgaagaaatttctcccccttttcatgaaacaaatatttattgatctttaccttatacagttattcttacaaaaataaaaataactagaaataaaggtcctcttaataccttattaattttaattaattaaatcacccaaagactacttttatatgtatagagtatagtagttttgatcaaacaaagggttgtacaatgagagagttgagagttaaaagaacttgtgttattaataatttactcataaaatatttgcatggatgaaattattagttattaagtaagatatgatgtagcaatatgaccattagctcccttaggatagaaaccaccaacaacatgttcatcaccatttccaccatatacaattctaagtatctcttcaggtgtcctaccataagagagtgagtatcggtctccggcgagcacatttccggccactcttccctcggctccttgaaaggggggaaccactaggccttcatctttgagaccaccatgtccaagttggttccttaggtcagaaattcggtttgtgaagtctgccacagttattccatatggtttcacttttgtcattgctctttcgtatagtaatgctctaatcacagcatcttgccctgattctacacctaaaagaccccccacaagctgacaacataataaaaatcatttaaaataactaacataactata

SEQ ID NO: 188985 - DNA, 2642 bp, Cannabis indica
ttctcctcacaaagaagaggtcctaaattcaaatttctcctctcccaatgttaaaaaaaagagatatttcacctcgtttagaaagatttacacaaggaaggaaagaaccattataatgtggagaaatgacaaaataaaatagacacaataataatagaaaatcattaccgtaattaaggaaatcattggcacaaattcacataaaactgtttgaggaatattctagagttgtgaggattgatgagctgtcattgatctgatttttctactttgcattaacagaccacttgggcaggttgagaactcatgtcttaacaccacccctcaaacgcaggggtgattgtgtcactctaagtttggaaacaagctactagaatcttgatggtgataaggaatttgtaggacaacccacaatttgatcagagaacggaatgtaccttacctcaagttccttctttaagattttataacaacaaatatggatatctatttcaatgtttttagtgtgtacatgatagaggtgatttacggctaaagctctagcactaacattatcaaacaacatgacaaacgtcgatggcaatagaaactctagttttgtgagaagaaattcaacccaagtgattttagcagctatatgagcaagaggctagtattcagacactatattggacctagagattactgcctatttcttagaggaccatgaacttaaggtgtctccaagatacacacaataaccaccaacacatctcctatcattaatgcaacaccccaatatgcatgagaggtaacctgcgatggttaacttgttattgtaacatatgtgtaatccatggttcaatgtgccttttaaatatctcaaaatttgcttagttgttccctagttgactgttgtgggagcctttaaaaattggctaagcttatttacaataaagctaatatctggtcttgtgtggcattgatattaaagtgccctaatgagactcctataggaagtgggattgtgtatagcttctccatctatcaaggagatagatttacctgttactataggagttggttagggctttaggtttactatagccatgtgtcatctcagattacttcaattcatagtaagaaatccagagctcccaagtccttgagtgaaaacaacttgttgagctgattaaataaactcgtttagcgtagcttcattgctcccagttactataattccatctacataggaactaatatgattagtttgtcatttttgtagaagaactaatatgattccatatacataggaactaatatgattagtttgtcatttttgtagaagaaaagtgaggtgtcaactttggaattttttaaatgctagccaagtaaagtgcccttcaacctatcaaactagtcccgtgcatattgtgacttgtgcaatttgcacacatgatttggtttggaaggtcttcaagcacctctggtgtaaccatatagacatcttcctctaggtggccattgaagaaagcattgtctatatctagttgttgaatgctccaacacttactcacaacaatggttagaacaattctaacagttgaggccttgataacagggctaaaagtttctccaaaatcaaatccagccctttagtgaaatctcttggcaacaagtctttccttatagctctgaaatgaaccatcaacattcaatttctctttgaaaacccacttgcaccccacaagattatactcttctgaataagggaccaaggttcaactcttgttggctttaagagctaggatttcatcatctgtgactttattccaccccttattcttgagggcttcagcaataggtaccggtactctgatgtgaagggtgtatgaagtatgattcacaaaggcttttagcttaaaagtactagccttcgcccgagttatcattggaagagatactagttgctatgcctaggacacatcatgaactgaagctataggagagcaaacaactgctagagatgatgatgaggttgaagcatctgatgatgttgatgtagagacaatatgaacatggtcagtagtattatcactaagattgagagaaggagaagagtacctgtcttggcagctggtatgtggagacaagcttgttgtgggaggtactgctctaagagatgttagagagaaagattgagcaggtgtggtaggactaggttgaaaatatgtgaggagtcaaataaagattgggaagctgagaccaagtttcatgttggacagtgagatactcttcaggggtatgtgtgttaagaaaacaagatttaaagggaaattctttttcattaaagacaagatgcctagaaatatatactctgtctgtggtactgaggaatttgtaacctttttaagattcactatatcctaagtttacccacttcattgagtgaaattgaaacttatgtgtttgatatggtcttaagcaagaaaaacaggctacacctaaagttctcaataagtgataatcttgtttcttatgatacactttaaatggtaatttatcatgcaaaatgggagttgctaatctgtttatgaggtaaaagatatttagaaagaactaaacccaaaattttaagagacttaaatttttttttttttttt

SEQ ID NO: 188986 - DNA, 2340 bp, Cannabis indica
agagagagagagagaaagatgcgtttgagagagaaagagagagcgctaattttggtttttttttaattaaataaggataaaatgggtagaatatgtaaagaaaagaattattttgtataaattaatggaaagtctaattttttatattgggtgtattttaaagaatgaaaaatgaaatttttattccaatagatgtaaatgcatccaagtttgcatttattggagagtgaatagttgatattttaactccaatatatatagctcattaaggtattttttcttccacgagatgaccttaagaagtacacatcatatgtaagtataaaattttaatttatgtatcaatacgagtcatttttaataggggaaatttataggaaaaatctttatgtagttcattttgttgcacttaaatattttttggtggtaaaattcttacgtagtttattttcttgcatttaaatccctacgctacgtaaatttgttagcagcaaaactccttatgtagtcattctgttacaaaattagtccctgtattgttactaactcagggaataatgttgcatcaaatgtgttatggttgtaatttttgctgccaaatgtgaattatataagaattattgccactaaaaaatttatttagggatttaagtacaacaagatgaactatataaggatttttgtcaccaaaaatttatataggtacttaagtgcaagaaagtaaattgtatataattttttgtcgcaaatattcctttttaataataaaaaagaaatttcaattttgttccaacatacaaacaataaatcttgtgttttaactggcttgattgttcaaatagtccatcctcgtggtggaactgtatttggagtctctttataccgcccaaagttaaggttttcatttggaaggtgtgtcttgattggtatcctacgaaggtgaatttagctaagcatggtgtccttactgttttgttatgtccaatgtatactgagaatgaagaaacctctttttatggtttatgggaatattctaggctttggcatattactgctaagacttcgtttaagttgtcattgtctttcatgcctatagctaatttataatcttttctgagtgaacgtgaggtgttgttatctaagcctgagatgggctctttagttcgcttctttggtagattttggtactaaagaaaccattgggttcttgagaacaaggtgctggatatggagggagtttttgtatgggccatggattttatttaggggtttgttgaggtcaatggtcatccccttcgatctactactttgaaggacgtcgtctcagttccttatgtgatttctagttgggttccttcaccagtagggaggctgaaatcgaatgttgatgccgatgtgagagctaccatggaatgtcttggctatggggttgttgtccttaatcataaagggcaatgtcttgctattgcttcctctctggtctcgtacttcccttctccatacgaaagctatggctatttttcatgagatgaaaattagtgctagattgaggttctttgatgtcctaggggaatctgattgttaacgagtcatacgggtgttagagaaaattaaagcgtttcttgctgagtttattatgattctacaagagatcttggctcttaaagataaaatgagagtggtcaaattttaattttataattgttctaataattatgttgctcatagttttgctaattttttttaacttttggctagtgatgtaaatttgacctgcggggtcgggtacccacctcaaatggaataggcattatccaccttaatgggtaataggacgaggtggggtgcagttttatacatctgaaggggtttaaggcagggttgggttcaatattacccactccatattcagcaatgatatataatttctaaactttccatatagttttctaactattacgcattaaaattattcgttatacttacaaagttgactattaattttccctaatttactatgtaataaagcctttttaacgtcaatatcttattttttatttttattttaaattacattatattattattattattattttaattttaatgggtaccaaatggggattctcttatcccgaacccatcggggattaagtggggaggggcggagatgggcgacataaatgggaaataggaacgacgattggaaggtgcattagccacttaatatccacccgatttccatccctactcttgacattgctatggtttagtgactggaattatcagttttctttgagtgcatgtgactcatattttggctattgccatttagtgaga

SEQ ID NO: 188987 - DNA, 3938 bp, Cannabis indica
acacccctaatttttagtttcatgcatataggagttgaagtagtgtttaagctatttacttggcttgtttttgaggttgtaaggatgagaattatgagattagtgaggttgattatgtgtgtattgaccatgtagcattttgttgtgaattttgcatacatgcactctataaaaaaatacttctttatagatatattttttaaagatatgaattggaacgaaaaaaaaactaatataattaaatatgtacattttatataaaataaaatgcatgtataaatttgtaggtagcaaataaaactccctttaatcagtttatactactactaaatggttattgtaccatatcactatacctctaattattttaccccattgtattttttgttataccacataacaccatacattacacagcaataacatcctaaaatagttcaatattattcttaaaaaaaattatgcatataaataatatttttggtaaaaaattaataatttataacacatatgatattaatatattcaaaaatttaataggtgtatattttattcttttatatatatttacatataatttaaacaaaattaaatatttatttctatatacaattatttttttctttaaatttattatttattattttatttattttaatttgttattaaaaacataagacaacaatcgtttgttttattttgttattaattatgtgaaaaaatattcttgataaatattaaaaagtaattaataaaaaataaccgatcaaattcacatttttgaattagatttaagttattatgcaaattacattgaatccaaaatataaaatctacacttaatataaattgaatgcactatatacaaaataatacaaattagaataaataaacaaccctacatcttaggatataattcacgtaaattcatatattggagctttggttagtttatgttggttaattttctgtgtgaatattatctttatgtaatgaattatattctatttacccattaataaatatttcctttacattttaaaaaataaaaaacaaacactttccaacttttgtttaaataaagaatagagaaatcacacggaaaatcaaggagaaaaaaagatgtaaatgaatacactttcaaacaaaagactatcaaatgaatacatacaattacaaacactatcctgctacttcaaaactaccaaaaaagaaatccttagccatacccaaaatggcaggaaatatttacctcccataatgatatttacccttaatattctccctctcaaaagtttaaactaatcctgtgccaaaggtatggacctctttccaagcaatgcacagaagaaaatccatggcagcgggtaagtaaagtagatcaattatatgttgcagatcgaggtttaggaggtaaataaagagaatttccacagtcaataggtgtgtgcattaatgggttccatctatcgaagattattcggcccccacggccaactcttcctctaaatttacaaggtggtgatgtagaagcttcgtcttttgttgaaggatctgatggtacagaaatgcctgcagctgccaacttttctggaactaaaggtctcgtaaacaacaaaactggttcaaggggatcctgcattaaccgataacaaattaaatccacaactggagctgtacttatactcaggtaatgggattagaaagaagaagcaacgggaaaattaccattttatgaagccatccttgtggtacttgacgccgcctaaactcttgcttaatgtgtccagtgggtattaataccaagttggaatctgccaaaggctgattgttcattgcagaaggccgtataccagtacggctgtttacaatgtcatccgaatcaagaaattcctcttcacctaaactgaacttactagcagaagtcgggaatccaggaagagtcaagctatcatccataagctccgtttcatgctagaaatcaaagataaaaagagttccacatagtaagtaataataatagtctgatcaacttagcaaacatgacgggagtattgccacgtaaacaataataaattggaatcttaccacttattaaatgtacatgttcaaaaaaaataaatgaaccagtactaccttaaatgtcaaggtacacataaatagagtttcctattctaagtaagtcttatacaataacaagaataccttaatatatatactatttaggagcactgtgtttgtctttggaaaggaaaaaagaaaaagagaattatatttgtactttacggtcctagcacaagggccagaatggtatatttgttttcacttgaattacaagtataccttagaagaaaatagtaccacttgaataacaagtattaactattaagtgaaagtctgatagtctgatacgtattaagtgtcaagtgaaagattaggaccacttgcttgtttcaatcaaagcaaacaattataagcataccttatatttcatttggatcctttgaagactaacttcagcttccatgaattctctcttcttctcttctctctgcatgtgtacagtcataattagtaacctttaatacacaattttctcaaggggcaaaaaaacagccaggaggaacacaaattctaaccttttgaacaggaaaaaaaaaccaaaacacaaatacaaaattatgaaaaggtatttccaactcgtcaacaacaaaagcagtcatcctataaacgaagacctgaaaaataaattgtaaaccctctccaaataattcttcaacctttaaccaaatcaccgatttttttttttgtcattttccaaccaaattatctaacaaactctccatagatcatataaactctattattagtacttaggaaaaatatacttaaaattttttatatgactttgtacattatagttatagctgacactgcaactgttttcaaaaatttagagtaatttatagggtcaaagacaagattcaaacattcagctgcacgagtgcgaaaaaaaataagcacattcatgaatgttgaaactttgtttccgagattgtaaattaatcagaacttttcaaaaacggataatggataatatggctataatatagactatcatataaaaaaattaggttatgatttcttcaaataacgaaaacatagatgttcctactggtacggacaaaagtggtgtccctactataatcatgtccgatatattataaataaaaataaatgaatacaagtaattatgcattctctctagtctctagagaccattgccacattctgccaaacaccattaagggcttccctctcacagtatgaagactgaaatttggaaagctcacagtaaagacacttttacttaaatctagatgactatgttgaatttaccaggttcaattcctatccatttcataaaaacaattatataaccaaaaaaatgcagcagtatatgacaacagagttgaagtaaaaataccttaattaaggcctccagtaaagtcttcgcttggtccaagttgcgcctaaccttttaaaacaaaatttagataaaagttattactatgctaaccatgctttataaagtcagataaacacaacaatgaatcaattttgatagataaggagagttctcacttctcatataataattgcatttgtaggaaaatcagtatatatatatatatattaggaataaatcttttctattcaagttttattctttgtagagttgtcacgctattatttagaaaagttataatagggtttaattctctatttttattctctgattttttccttaataggaattcttgtaaagcttatacatacacgatttcttgtaaagcttatacatacatgaattcctatcatatgacctattcttctaactcgtttaactcttatataccctgcccatgtagtaaaaa

SEQ ID NO: 188988 - DNA, 984 bp, Cannabis indica
ttcttgaatttattcttgaattataatcttctttgatgaaaaattgcatcaacaatatttgtttgtatttttaattaattaaatttattttttttttaaaaaataattattatttatttaaaaaaattattttaaaaaaggtagaaatttaatttttgttaaaaaaaataaaattttattataaatactataattaactaatttgactgttaaaaaaatattatagaaacttaaatacaaaaataaaattatttacaaatatttattattttattttttttgaacatcaaatatttattattaaaaggtttgttaaatattttaattaattattttaagtgtataattaatttaattctcaatcaattacctattaattttctattattacaagtaaaaaaatataatcattataataacattaaaattatgactattgaataattactcactcgtgtacatatatattatatacaagaattatatacaagaattatttaatacattggattaagtggaattatgttaaaagaccacatgattgattggctcttatgcaacatgcaaatgtacctctaaattctaatacaattaaaatttgaaactagattgtattatattgtattatattaaattgaattgaataatatatcatattttatatgtaatattatgttaaattttaatttatactaaaatattatatatttaggtgttcataaaaattatactacatatagttttatataaaaatattacataaaatataatttaatataatattatacaaggcgtaacaaacgaactaaaagatcaatatctatatctataattgtttttattttaaactatgcttgcctcgttttaaataacatataaaacacgtaatgtaaagctaattggaagagggatatcctctctgtgttacccctcctctgtaaagtgtcgtttgttatcataattgaagctttttttttttttttt

SEQ ID NO: 188989 - DNA, 1188 bp, Cannabis indica
taataagcttaccgtaccgttcattgtctttagctaacgacgccaatgaagcagcagcatccgatcgttcttccaatgaccccgtgtaaagaattgctatctgttcccatatcaggcataggattggctcattggcagcaattgggggtaagccgaggtactcgtcgtctcgatcgcaggcagaggcagaaacccgaaggagccaagagacatccccgattgaattctcgagctgggtggacgtttttctgaaggccgcagttgggattatggtgaagacacgcttcattatgccattggctcgacactttatgacaagggtgagtgccttgtcgagtacttgctctgtatcatcaataatgcgccgagtggggcgctcgtagaggtcgttgctggctctcgctgcctggcgtaggagagcagccaacttctctgttttggacttaagctcgaagcagtcctgtttgaatgattgggcatcttctgcagccttggtcacttggtccgctaattgtattggcctagccaaaatctccttaacgatggccgccatggcctaccttcataactatataataacagagtgtttccctgagaagaactcatctcatttcattgcaattataaaggacgtgcagtgcatgcatgttcaatgtaaaacaaattataaaatataattaccttttagcgttagccgtttctttatggctagacgtagacgattatatttgtcaataatggagatgttctttccattaaaggcacacaccagtctttggaaagtggagatgaaggtgaaggtggccgtagcgttgatgggtggcgccgccagttgatggagacggatcagtattttgggaatggtaaaatgacttttctccaattttctgtgaatgaaatcaccatttattaatagcaagtaaattggatggttcaaattttctttggttttcttttttcttattattatattatattccgaatggaaatattaaatttacttcatcaaggcttgttgtcttgccatttgcaatgaagatttgctttggcctttcttaattagagaatacagaacgtgaatcacctcataaatcgggtacataaataaaactgattgcatctattattactatatataaaagagacgtttgatgccctctaaacattttcatcttcttctttattttt

SEQ ID NO: 188990 - DNA, 3723 bp, Cannabis indica
acacgttgaaaataagattcaaaacgcatgtgaaataaactgttgaacactaatttctatattataaattattgtgaatatctcaaaattttataggatatcttaaataaatataacgaacacgactaaaaaattcttttaaatgctgaaacagataagaagtctatcaatatatctcttttaaaagaatacattgtagaagcgcccgatacattttataaaaatatttgggtgtcctgctaataacaaaaaggactaaaattgagaagaataaaagtgtaaatatgaagaaaaaaatgtatttttcgaattcatttcttgtttggttttgctttcaacaggttgaaggtctgttctcaggcccaaactcgagaagagattttacttgaattcaagccttatgtttttcactcccccaaaaacccctgacgacacgtgtcacaaccataccaccttactccaatatcctagaaatacatttgacgtgtacacttaaataccatgttcttgtctaactaattaaagatcaattctttttctgtttttgttttttaaaaatggcaataaagctttgatctttgcgttcagagttcatttaaaggaaagatttgtagaaacccagttgagaactcagccatggctatgcacgtgagcaacgcgtgcttctcagtattcagccatgggagagtacagagaatcagagctattgcttctgaggattttgctacattgaaaacagaggaaaataataaagtcaagttgggaaattcggatttgaaggttacaaagcttgggattggagcttggtcatggggtgacactagctactggaataactttgactgggatggtaattaataattatttatttacaaacccttttcgaatttaaacaattttgccaacagctttactaatttcttcctgtagctaatagttaaattctttagctaataatttgcaatggtttgtagagttgctatataattgttgaagctttaagcattttgatagagtcattattttcttttttttatatggaaaatgatttaatgtcattatagctaatgaacaacttacttgaaccacatttatattcattttgattttagcatattaataaccattaaccacctctcacttgaattggcacactaattttatgaagttactgtatatatcactgtaggagcagggctgtcttttgtgtgtctgcattactaaatagcttactagcattttggttgcagataggaaaatgaaggcagccaaggctgctttcgacaccagcattgaccgcggcataaccttattcgatactgctgaagtttatggctcaagggtgagtgaagggtcttttttatttcctttatgcctatgcaataagtgccattaaagctatatttattgttgcagcttgctttgggtgccattagttctgaaactctactaggaaggtacaatctgcccaagttgataatggttcattttctgtattttgttcatttttcaattgttctgatacaattccaccatctttgatatagatttatcaaggaaagaaagcaaaaggatccagaaaccgaggtggcggttgcaaccaaatttgcagctctgccatggaggttaggtcgtcaaagtgtgctcaatgctcttaaggattccctcaatcgccttcaactttcttcagttgagctttatcaacttcattggtatgtattattagcttattgccaagaatgtgagctttctgtgtgtgtgaatttcgtccccgtttctcttattataagctgagcaattgttttgattgttttcaggcctggagtatggggaaatgaaggtttttcataccaacaatctcttctttattcattgaaactctacattaaggatgattctaagaaatcaaactaagtttcttatttttcagggtatattgatggtctgggagatgctgttgagcaagggttggtgaaggcggttggtgtttcaaactacagcggtaagatttctctgttgggatattgcaggaaacctgtcacattttctatatgttgttcatatgtaacacttagttgcagtagttttagagaagaaaataaaacaatgttttgctaaccatgttgctataaatgagccaatattctaaagaaggaattatacaatttcttattccagaaaaaagactgcgtaatgcgtatgagaagcttaaaaagagaggcatcccactggcttcaaaccaagtgaattacagcctcatttacagattaccagagcaaaatggtgtgaaggctacctgtgatgaacttggagttagtttgattgcctattcaccgatcgcccaaggtgaagtcctattcaaactcatttgcaacatatgcttcatttcttcactgtctttgtgttctcttgtggttcatcttgttatgttaatatgtgatgtgatcgtcttttggaatttactcgtgtttttgactactctacgacgtgtctgttatttttctcctcgtaagagccctcgtttaggacgaatctaccaagcagttagtacctgaacctgatactaatagaaggattgtattacaatgtcatgggagaagaatgtgaggtgattttgatattcatgagaggtagggcaagtggtttaggtctcatagtttgctctcacaagaaatggggttcgatttgtcttggaacctaccatcaaatattttgaaagctcatagttccgattcattaagaaatcataaatttctgatgtgaagaatggtttagtctggttcaaacaaacacaaaagttatgaatggtttctcttaatattttctacatatgcaggtgctcttactggcaagtatacaccagaaaatccaccagatggtcctcggggtcgaatttacacacctgaatttttaacaaaggtaaagacgttttggtttatgtaaatggctgcttcattttggttccaacctcactgctgaaatgcaaatcttctgtgcagcttcaacctttaattaacagaattcgcgaagttggagacaactacagtaaaacacccactcaggtttgttaaatttagtgaaacttaacatgtcatgcaaaaagcttcttgtgttaagatttctagttcaactacacaactggccattctgctgggatataaagagaacattttactcttatctaggtggtccttaactggctgctagcccaagacaacgtagtgccaatcccgggagccaaaaatgcagaacaggctgcagaatttgccggtgcacttggatggaagttgaccgatgacgaagtaagcgagctgaggtctttagcttcagaaatccaacctgttattggtttcccagttgagaaattatagagatcgatctccataaaataatttatcactgcacacattcttctccatacatgatttaaaacatcagtacagaatgaaggagctattcttacaataaaaaaagaaaatgcacatttgtaattatttttttcattcttttgtttccaaactgaccataaaaaaatatatactcttgtattatgaaaatggaagtagaagttttggtgaaaatatgttagtgagaaaatcaaaataaatcattaacaagataaaatgaacaagggacaggctttttgaggatgcatgaatagaagtggtggggtttctgctatgggacagcccaaccaactctgctctcttttttttttttttt

SEQ ID NO: 188991 - DNA, 635 bp, Cannabis indica
gcactggcactggcactggcacaggtgtaaaagacctctttacgttttgcttctctaatttaagcccgcggttatgaatgggccttcaattgaaagcccatcagtgttgggctgtggggaatagcattaatgggccgattaggaggggaagcgggtccaataagaagcgtacacgtgatgaaggcgaggttggtcgcagtctttcttaacagaacaaaatcccaaatcgaatcgaaacgaaacgaagagcggagggagggataatagagataagagaagaagagaaacttcaagcttccaattggatcgcgattccaatttttaattattaattattttccttttggttttcttcttcttcgtcttcttccggtgtatctgaatcgctgattgctgcggtaatggggaaaaatcaagcctacaaagctatgcagagagccaggttaggttccacatctgccggacccgacgaggtggaggatggcatggtttgtacccttccattccattccaatccaatttcatcatgtgaataatttgttctttcgattcttgatttatgcatggaattagtttgacctttattcttcattcattgttgagtgtttttttgaatcgaattgaattgataatat

SEQ ID NO: 188992 - DNA, 1276 bp, Cannabis indica
ctttttgtcacaatttttttaaagaatcaacttttagctttttcaaaaacttgacctaactggccctagatgtgaatgtataatattgtaaaaagcaacaaacttgtcacgatgaaaaggaggggagggagggagggagggcagttacttaaaatgctctgcggtagttatatgattttcttcattacaaccaacttcatcaattctccatccattccttcctactgcataaatctacttctgatcagattgggtggatgtattaaggagcatctcacttccgtctgttgcttttttcaaagttggctcgagtatagacttacctaccacatccttggctttccaagtatgtaatcttaagctgtggaatatattcatcatcattcattgttgtaatcatttgtattgaaacaaaaacaacaaattttgcttgtgcttgtatgaatctctaagtaaattggtgaagggtgtaatcgacaatgtaagttataaaacttggtatatatttgaagggacagaacttattccattagcacgaaaacttttataaattaagctatcatattaacatatttataaaataaatgcaaacacgatacactgttgagtattacaaggaaactgtttgcaaattaaggattccgtctgacttagcggtctgtgaataagtcctgtcatcatgaagaacaagcaccttcagtgtgccggattctttcaaccaggcagccaccaccggccccgacgaagtaaatctgcctatgttacactttgccacctgaaaaggtgctcccatgctgattagaagagactcaatggctcgtcttagagtgctgtctccaaccactttgctgtgtttaccccatcctgtcaaaatgctgtaccaaaatttttacacaagattcaaacttctgcgttcttgttgtcatcacagacaaaacactatagatttacttgcatacctcaatagcttcggcaattcttggccttcaaacactactgaccgtatgttgagcagccaagcatggagcattgcccgtgcagccccagaagacattagatgcagatctaagcaagaatttgaccacatactctcccacacgttacggcgtttgccttcaagaactaccagttgggctcctcgtttctaatgaaaccacattaagaatatcaagttattgcataagatcaatcttaggttggaacctgagtttaattcaagtacttgggcagcagacattaaagaccagaacttagtaaacttacctggccgaagtgc

SEQ ID NO: 188993 - DNA, 3701 bp, Cannabis indica
gggcataaaacccaacaacacctcccatcgcttaagaataccaatgggagaataatcaaagcgtgaaccaccaagccattgctcaaaaagagctcccaacacaacatgacttgacgacaatattgatggctaacctcaccaatggaatcattcaaccattgggaaggtcatctttgatgtgacaccctccaccatctataccacaagatctcgacacttcaagatgtggacccagaaagaaaaagcaagtgtactcgatgagctcaagatcccaaactctccattatgaagaggagataaacaacctctgctagaagaatcaaaggctataaactatggtggctagcatgcaaaaggtgttgagtggcatactcaagggcaaaacccaagcctcacactttcagtacaaaatccaccagcaggagcacgaggtcccaaccgcacatgttggtgaagtggactccatgtcatctacttatagcaccccgaaaggtgagggtggacgagaacatcgcaagacaaggaccctatgggtcatttgagacaactcaagcctacccaccataagaagaattcactgaggaaaaaatcccataaccttatgaagagacttgcccaaagggtctcgtgctaggggacatcttgcctatggcccccgcctaagaccaaagtaaacgtaaagccttatccttcagtcttggtgggaagtaacatgctgatgggacaaaaggagtatctcttgcaagccctatgcaaaccacaaagaagacccaagttccactcgctaactcccaagaaaggatgagcagaagaatgaaagagctggaagcggaaatgcaagacctactttgaaaaatagatactgcctcgaagggaaacttggatgatgatgagtttgatgaagaatcccctttctcaagggagattgaagttgaaccacttccacccaattttaaggagtagcgtatgacaccatatgatggtacacctgatctgaagtaccatctcggagcttttaatgagctaatgaagataaaaaaaaaaagtgtcatgcaaggcaaggtgtcaatgctttgtgatcacattgaaaggagctgcatataagtggttcaaaaggctaggttcgagaaccatcacatcctggaagaaatttttgggagaatttctccaacaacaacaagttgcatgtgattatgttatgcctatcacaagtatcaccaaggtgaagaaaggagaacaagaaagcttgtgaagctacatccagtgcttcaacgccaaagttaccaaaatagggaaagtgtctaaagatgaactcaagttcatcgtaaccgctggagtacgccctagaaatggagtatgggggaacatgctgaagaaagaattggaatgcatagattacttttacgagagagcagataagtacatccatatggtggagggtaacagagtcttgagaacaatacaagtgagtgttctttaggaagctcattagacccttatagtgtctgttaggtgatacccccaacagttataagttgatacattcgagcgaagcctccaacctacaacacataaacattaaacatccaagaggttcttcaaagtaaagttattctatttccaacaatcgatcaaggagagcactcctgacaatggcaagcctatctttaataaaatatactaaattaagtagggcacctaagttggccaccaaaaaaaaaagcaaatgtacccaggcgcttgcatatttgtcttatcaatgaaatcttaaattttttactttacgtgtagcagttatcactctccacaaatccattcggttcactatacttgtcaatcaaaattatcaaggtgaatgagacgacgcatgaacaaaagcacctagcggtgttgaatgaccgcagaagcaaaaaaaaaaaaaaaaaaaataggaagaggaaaagagtacgaccatgggagggacaaatctctaaaaggagtataaattttttagcatctgaaaaacatgctataagcgccacgaatgcatagaaggagtcgagtctaagaggccacaagcacccgtaagtaaatattataccatgaaagggtttgagcactatctaaggggccaaagctcccccattaaaatcttaaatcctaaaaaaggttgagcattgcctaagaaatcagaaactcccatacatccaataggtaaccgaaaagaggtcgagactcctctaatagtctatactccctcaatgaaaaggttacaccataaaaaaggttgagaaagttcaagtggcacaaagcttcctcaaacaaaatgataactcataaaagatatcgagaaagctcaaaaggctagcactccctccacgtgacaagtatccaccataaaaggggtagagatagatcctagaggggcaaccacagaactaaacgatggagacaaagctcatcgaatttagtcgaaaataattcttatatactaggggacaagctttgaacttagtacccgcagtacactttgaaagtatatgtgcaagaaaataggaggccaactacacgaggagggggcaaggcacatgttgtactcatagaacgtgtgttacaatggggtaacacttaactaaattttttaatgatattcccatattgtgagtctgaactataatgagggaaaaccaattgaatatacgataagagacaagttcgtcacctctgagagggaggtgagaggcgaacgtataacgggcatgacaagtacaagaagtggagacaccaccacttgtcccacttagggtacaaattgacacatgaccaccagttctccccaacccttcttttttttttttgaacaagttctcccctacccttctgagtgttgatattcatgttacagacataattttgtcccctaacttttgggatcacttgtatgttggagccattagagctccctataaatactcttctcttccattgaagaggggcttggaaaatcaccatttgtaagagagcatagatattcaatataatatgagtttactccattgatgctcttaacttcttttgagcttttcatctttagacttttgtatttgattttctaactaaagtttagttgaggagtttttatcgtcaatataaacaaaaatataaaaatatatatatacatatgttagacaaaaaagtaaaaattatttttaaaaatagaaaacaacatcttgatattttctgtttttaattttttgtaatttagtttgcataaaattatttttaaaaaatttggccaaacaccctctcttagtttttaaaagttattttctgtatttaaaaactaaaaataatttttaagttatgaagtcaaactccctaaaaattctcataagtttttacttattacgaccaaaatttattgtcagtgttgtttaatattttcatctaactgtaaattttataagatgttatccttgttactcactttcataatagggatggtaattttgtcggaaactcgtttaccagtgggtaccctacccatattacatgttgaattagggtttagggtaagataagagtatgaaaatatgtattcgatgtgggtatagggaagagtacgcatgtaggagtaccatgtctacttgattgtatatatttatgtttatacatattttaacgctatgcatttaatttatatttgaaaaatacataaaaaa

SEQ ID NO: 188994 - DNA, 1641 bp, Cannabis indica
aacaatggtgctcactcaaagattgaaaatccaaactcaaaaacacaagtggaactgtaattattagcttattaagtttctgatggttaattacacttgcagtgaaactgcaaaactcacctgttaaaaaaatgatcttcacctagaaacctcaagttataagaggcccaattactgtacctctttttgcaataaggttaagaagcaaacattaatcaagagttgaaaattgaactagaagttgtaaagaaactaatcttggacatgttttttcagtatctgaggttcttagcaacctcaaagaaatgagctacattctcttcaggtgtaccaactacaattccatgaccaagattcaaaatatgttttcctctaccagctttcttcacggtatcatttattcggtcagtgatgaattctttggagccaaaaagaacgccaggatcaatattaccctgtacggctatatttgatcctaatcgcttcctaccttcagccatatcaaccgtccaatccaagctaacaacatctacaccagtcaaaggcaatctctcaagcaacccaccggagccacttgcataaaggataaggggaaggtttggatgtgtttgtttcacagtgtcgacaatctgcttcaagtatggaagactgaattcctcaaaatctacaggacttagttctgtggcccatgaatcaaagatctgaacagcttgagctccattatcagcttgatactgaacatattttgccatggaagaagcgaatttctgaagtaatgcatgaagtacctgaacaagaaatcagatgtacaaataagtaaatggcagaaccttcggactaaaatgggaacactaattaatatactaggggtgcaatgtacgttgaaattggagcgtaaaactattctcatagagctcaagtatatcataaataagtggtggtctagtaatagattgtagctacaaagtcaaagccaatgagtatggtggataagaaaacaattctaaaatggcaattaataatagctaaatgacttataatacaatatagcaaccactaggcaatcaacaccaagtaacatacatgggtaccactaagacactagtctagtcaattcctaaccggtcaatgggtgatcccactcattttcagtagatgcacaaattaccttgggctgagagaacgctaatctcttaatttttgtgaaatgctttgatgaacctccttcaactacgtatgatgccaaggtgaaaggagctccaacaaaaccaagcactgcagcctcattatctacctggaaaagtaaggatataatgtgagtatgtcaaatgatgttcagatacatataccataagaaataacactaaatcttcttactgtctatactgatactattatttattataaaggttctaaagcaagttttccaaaaacattgctattaaagcagcagccatttataacacacataaactactagtttttttcatatttacagccttattcatatccataaaaataaaaataataataagaaaaaaaacccaaacaagcaacaaaattacctctcaaacttgcttacatttataaaaaatgctagattttcctctctaattcatacatagtacacgaagcattaga

SEQ ID NO: 188995 - DNA, 2981 bp, Cannabis indica
tcaagggagcgagctagatcacgagtacgtttgagcatctttcgaaattcaatttcattgatacttggtggacgcttaggcttatatcgacggacagggggcgaggccgtggctggtgatgataaagatccaacggtaaaattcaaaggctgattggcgttgagatccgccatgatagtagcgaaagcttgagacacagggactgtgtacccggttgtatcagaagtgttcagagccatattggcagcaggtgaggccacagtaggattagctacagccgtttgttcagagagagatatatcattgttgctttgagtatttggctcattggtaattgggtagggtaaggtaggggcatgtctaggagtggggctatcaaggtcaacaatcacacccatgttttgccaggccgagagagaaggagcagagtttgggttaaagtgatcacggttaagagagatattgtgaggattttgggtcatgaaacagccaaccggggtagttcttggttgatggagatgctggattccaaaatcagaggttggttcattgtaaagcggttcagatatgatttgggtagatgagtgccgagggctgggaggaggggccagtgagacagggttggagatatgggggcgaaggcgagttctagtgttggctatgtagaaaggattggaggttatgcgtatcttggctcccaaagtgtgatcatattggagaagaggaggggcagaggatgaatcacacttagcaaggaattcagggcagtgattgacaatgtgattaagccggccacagtaatggcaaaagtcaggcagattttcgaatcgaaactctaaccaaacaggggctgccatcccttgaaaatggaaacctgttccacggggaagaggttgagtaatatcaatctcaattcttactctaaggtatggaccccaggtctccttaagggaagcagtatcaacctcatgaatcgacccagtacctcccccaatttcctagcaagagctcgagaacgcttcagaaaaggaattccagaaacttgaatccaaaagggagtcgaagtaagcatatcagcattgacgattgaaccagcttccagaggagacatgactataagtttatagtcgaagtgccatggttgaccaataaggacacgcctacggtcaccaaagcagccaaactcaactgtaaaaaaatttggctctttttccagaacattgatagagtagcgttcaggccacatttctctcagacgttttttgaaggcttcaggattaaagtgacgattggttagcaatttgactgcaagaaaagctgaaggctcctctctgttttcatcttcaggcaactcagttgattcgacaaaggagtgtattttggtttcgacttcggttaggttcaaattagcagagagattgttggtcagttcttccatagggacaggaatttgaggccagcaaaaggaataaaggaggagtaaaacaagggaatggatggggtacgaataacacagggttttgtgcggtaattgtgcctggtacaaagctgttagattctttatataaggaaagaaaatttggatcaataactcccagggattttccaaaataggaaataaatacctcatgtcagagagggtaatgatacaaatggaatttgcagtggctcttagatctattctaggggttctgtgtaagaagtagaggtcgcctaaaagggtaggattaatgattatccatgggggtgcagaaggaattgattttcctaatttagcatcggctagggctaagatgggaagaaattgggcatgattaatgaagcaagagaagagcaagcataaatataatttcaggcagtaatgatcagatgggacgcaaatggggaaattaatactgagaagaaggttacctgcatttgtggagatgtcttcgaagatggatttgcccagatgagtaccagccgttttcgttataaatgttgaagggacaggttccttcccaccgccaccaggaattgaaagccagggacggacgaaaacgccgattaacggcgacgacgacagcagacggcaacgatacattgagatccctagagataccctttcagagagcaccggaggagaactatccagaagttttttatatataactgttctctctaattctgtatagaactatatatatatatagagagagagagagattaattatagtgggtgttgtcggctcctgacattattagccaaacccaacactggtgatcaatagtggaaactgtactgtaagggcaaaattggaaatttatcactttctttcttacttttattttcttgggatttttgtgtattttgtagtaatataagggctattttagcaaaaatgtatttttgaagggctggacgacaataaaagtattttgagggggggtaacaattattactatgtatagagtacgggtgtttatcggttagtttggttaaattatatatagtgaatatttactaacttaatataaatattgggttataaattaatatctaattataatttatttatcgtctaatgaaaaaataaaaaaaaattaacctgtctaataattttattgatttggttagattaactcgatatttatttatttgtttttttttattattattgtttgattttagtgttcaaataattggtttgaaaaaatagatgtatagtatgcatatattaaaattaaaagagttatagtttaaattaaaagtaaatactattttgaacgctatgtattgtaaaagttatagattgggctatctgttttgttaaataaaaaaatagatcctatattttttaaaatgatacaaatatgatcttaataattacccgacctaaaggtgttatgacaaaattagcactaaagcttaggcactagtgcttaatattctccttagtatcatattattatggtgtaataattaagtattagatcttata

SEQ ID NO: 188996 - DNA, 3509 bp, Cannabis indica
aagaactatatatcgatgaaatgttggaaaatatgttatatagcaaaataaaaggaaagaaaagtttgtaattactaattactatatagcactacaacttactataacttcgagctttttctaaagatgatttaaaaactattcacgatatgtatgtattgaccaaatcttttagttgtgctaaacagaaatagtggtatagctgactatttatagacgtagacttagggaagaaaaaaaatacccatagagaaatttgtatggttctcgattgttgacgtagccatatattatatataaataaatggcctgagattgagaacttgggaagaagcttcgtggttaggcaatagtactactcgtggggggaccctatatataatcagacttattctttcattgaactatcaccaaaggaaatagtggaatataagataagagtatgaagaacgctgccaagtcatgtatgtgacaaaatttaatatatgataataatagaaaaaagagttacattattatttttatatatttatgtgaacgtaaatgaaaccgaccaaataacgtacatacatagattgttctagaagttacgagagtcacgtggatcgaagtcaaggaccacaacttcatactatagagaggtttagtttagagatatttttgttcctcaactatatcgaaacgaaaatcatcttttccaaagattatattattgttttttatgtaaatacaactaggacttggaaaaattggacagaattcttaaaacttggagaagtacaatagctttataggaaaaaatgcatatatgtaacaaactcagtacttattattgtcatttatctttaaataaatagaatcatctcacggcagcttgattagctcttgagaaagaaaaaaaaacatgaggttacaaaatgaaaatgaatgagaatagaaaaacttgaattaaggattcaagatgaatttggcaagccaactgtttcgagctgttggattcttttgattctgaaacctcttattcttaattcctcagctacagaagtatcattatgatccaccttttcaatggtccaacccttgttttgtaccgaaccccctacttttacctgtttacagtaacattaataatataaataattcatataatatatatttatataatctatatatctatacacactacactggaaatcgtggatgcaattatatgacaaatcaatgactctccaatgagaccttgtttaaaggggtaataagagaatttttccatagtaaatataatccattcacctttcttctccttgagattaggcatgcaaccaacctaatctcacacgtcattttttcaccaacaacctacagacgttcacacataagttgggatccgacgtcccatgtagtagattacgatgaaaacaccatactttggttggcacgacatgcggtgtaagacaccagatgtcggtttatgtcacaaatgacattaaaaaccatcaaaataagccagtttcaacacatttgggatatcatttgcctggctttccttcaagacaaagaagatacaaaaacaaaagcataatccacataataaacgagaatgctaacattactcatctatctatttgaaggagatacttctaggttcttctcttattacttttatacgtacacagggttcctctctctctcactaggttattattaatttcatttaaaatgagactaagagtcattgagtggattttttatcaatttgaaccaaatgtcaaatggtgatttgaggacaaatcaaggtgttttattttttttttattttttgacattgggaggggggatttgaacttaggcctcctttttgtgaggaaaattgtgaaaccagtagactatacttatgaccacttgtactaatttttatggggaccaaaatgttacattaaaaaaatgttaagtcagtattagtaatggcttgtgtgatcaatccagacctaacgtgggtccacagatcaatggacagaaaagcatcctcaaaaaaaaaaaaaaaaaaaacaaaaagaaaagaaacaaggaaagagaaatactgcatcattaactgaatatgtgtgcttgtgtaatttggtgatcttttaagttatctagccatacctctgaatttttggcggcatcaatgacaagagcaccatccaaggatagatcttccacaattacgttgcagcccttaataatcatagtagacctttgagaaattgaacaactaccaccaactttcttttttatatcagaaaacgtgagaccccattgaggcttccatgtgatacgtgaccacacttcaacttcctgtccattaaagacctctggtaccggatcagctatttggactccagcctgggaaacataaaattagcaaccttaagtacaaaacagcaagcgaagtaaatcaattataattcagtagattgtactctgtagtttagtagaattcttgttgatataataatgcaaacacaaacaattcatacagtctgttttcgacatcaaaaacttatagaactagtacttctttgtctagaaattggattgatgaaatcaaattattactggaaagtgcagaaatcaacaccaaaaagagtgatgcaaggtcataattgatcattcccacaaaagctttgtaactgtcgttttcaacatcaaaagattaatagattatgttcaagtttagaagaacagattcggaagactttatagttgaaggtttgatgagtgaaactttttgacaaaagaacctgtaaaatgaatttaacaaaattacaacatacaaaaatgcacctttctaaggatgaggctgtttgcacgatagacggccatttctccagaagtggcactatgatatggatttccctttggtacctattcattcaaacaaacaattagaaatacgaccacacttccgaaatgaagcccatcaagcatgggaaaattttaagatattgggcaaagcttatttatcaaacaggacaacatgaacaactagaagtaactttgaggtgattgtggtatcttaccttagcagcatcctcggggttgttcttcacgggtgcatatgcaaaccatgcatccattacctaagcaatcaaatggcaagacaacatacataaaataagtactaactaaaacaacattataaaaaaaaaactatgctgattaaatattcagaaaactagaaacctataaacattgaaaattcaataacagaagaacaactttagccagttgaaactttgtttataaaaaaattaccgtaaatccaaccctagctgttggaggcagggtttttggataatcctgcatcatgcactccagtcgcgttgaagatttaaatgaagttttgctggcatctttatacctgcaggatgaatgggtgagacatgatataaaaacataataaatgaagagatgggtgtcattcttgcaagcaagtaataaaaacaaaaatttggttttgcaagaac

SEQ ID NO: 188997 - DNA, 1158 bp, Cannabis indica
atttttaataaacccatatatatatatatatacttgcaggaaattactacaattactagttttatactgctcacaacacaaattatgaaacatgaacattcatagtagagtaactaaaatatttagtaaggtggtacaaaaataatgagatgtattgctcaatcaaatgagctattatatctaacagatttagctttatagcactatccactaacctataaatattatattaattttttaaacctttttgtaatatatattattatttttatttatttgctttttaaaataaataatttttaaattatatgaagaagatttagagaatcaagtaaaataaataaaaaaaaaaagttatatattttaaaagatatagagaagttgatgtaattgctagtaataatataatttgaaagacacaaatgagcaacaattaccttccacgcatggatttgtcgacaatggttgcttcttcatcttcttctgacacaagaatgctctgtcaaccaagaaacacaaacaattaacaggtaattccattactatttatacagaaagaaaagcctttttcctttattgacttacagttcgaccactgctaatcaaagctttgacaaaaacttcatttgaaagcacatcaagctttttctgctcttcacccttcaatcaaaaaccccaaataaattcactgacaagaaaaaagaaccatatgtataataattaattaattaattaaaaataaatacctgtacattagtctctccagcaagccctatgagtttggccagaccagcctgccacaacaaacaagcaataatccaaaacatacccaatcacctttacagtccaagtcaaaagtaaaagaaaacgaaagaacttatagtataaaaagaacccatttttcataaccaacaaatgaaaaatcaccattaagtaaacgaaaatgaaagaaaaagaccttgttaacagcagagcaaacgaatttgcatcccaaaacgatatgactgagcaagatagtaaagtcaccacgagactctggatgcttagactgttcgttcaaaacgaacctcgtaatggtcatcaaatccgtccggtaagcgtcggcctcgtgatccatctctctgttcgacgaaaatccccaatggaaaaaaagaaaaa

SEQ ID NO: 188998 - DNA, 2983 bp, Cannabis indica
attttgtgattaaaaagttagaaaacttagctaaattaaccatttttttttattaactttagtcaacaaaatatttctgactttcaggcgcgaaaataactaaggcaggcgccaaaaactttgaatattccttactttcaggcgcaaaaaactttgaatattcctcaatcctcactcacatttatgttttcattaataatgcaaaataatgaaaatgtgaatattttgcttagaaaataattttgaaataaagaaaacacaagtcaacctttcttcatttattagaaaaaaagaattatccaaaatatgttgctcaccaaaacaaaaggtattttagttaaatgataagcccttcttaaacccaactaacctaacctaagaaggcatcaaccttagaattaaccgaagctgataaaaacttcatacaaatgggtggtttaatcccagccaaagccaaaatagccgccggcaaaccccacaatgactcaccgcagatcaatcccgccgcaaccgacggagcaaaattctcagccttcctcttgttcaaccttctccaaacaaaaacaatcaagctccccaaacacatatcaatggcaaaatacccaccaaggaagaacggaatcgccatacacatgggactaggtactactctatatgccccatacttagtctcaaacctctgcaacaactccctaattgcattaatcgcaatagccaagaagaagaaaccgatacagagctcaagacagtgtttggggaaagacgaaattccttcgactccgatcagagcaattcctcggtacattactccgtacggggctgggtacgaactccctggttggccaatgtcgtaagccttgtagaagaaccagaaaattaggggcgagattatgcaacccatggctgttcccaaagcttgactgaaaaacatcgagcgaggtgaagctagggttaggtaccctgttttgaaatcctgcatcagatctgaagctgtagagacaatactcatcatcacaccacatgaagctaagccagccactacgccgccgttttcaaggccgatccaggcgctgaatacgataatggctaatttgccgtagttggaagcgagtgaccaatctgtaaggccacaggcgtaggcgttgcagaaagcgaggagtggtgcgatgatgtaggccatgaggacatgataccatttaagctggggaaagatgagggggacggcgaggattgagatgaaggctaagatgtcgtaacctaggaatgcttgccatgtggggatttcgtctcttaagaagtactcatttcgcctctgttcatcgtaattttccggtgacaggttagttatttctccatctacttgttgatgatgatgatgatcttcatcttctttcttttttgagtgttggtattgtttggttagactgtttattgttttgtataacatgtaacagatgtgaaatataccatctccaagcatcatagctatggcaatgaaaacctgcacataaatcacatgtgtattcaaaatcaacacatacatatatgatatattacacattcaaatatatatatatatatgtatgtatataaatgtaccctgtatccttggatgccgtggagacttgtaggagataaatcagaacgataccaaatgcctttgtttagctcaattagaggccacatgattccccatgaaattatagctccaataagcaaagatgcatttaccatgtatgggcagattaatccaacaccaacataagtcaatgaaaaatcaaagtagaacctacactccataagatatacatacagatcattagtataatttatattataattaggtcattatttagtatgatattacaattatatacctttgagcataggcttggaggccgaatgttggaaaattggaaaatccacagccatcaccagctgaaaaaaaccactggaaaaatgcagatgcaaagctacaaccgaacagcttaaaaagaacccaaacttgcttcctgcattgcattacatgcattaatttcaatcatatatgtttgtttagatatatgtgtttgataatgacaataatatttattatttactttgcaagcttagctcctttgggggtgtgaaagctgttgatgagatacgccgttgcagttccacttgggtacgttaacttgtacttcataatcatcacctgttaatatataattattaattataattctaattatagattcagcaaattattaagtcagtgagattaggtatgtatttatatatgtgtatatatacggtataggtacctttctgaggggcacgatagagaacaaaccaataaagctgacaacaaacagaaatccaatcatccacccaagtgagagattcttgacattatttggagtactgttaccttcatctccttgggcagctatgctcttactcatagccagtagatagctagcagtgccacctgtatatacatatatgtatatatacgcataattaaagttctgacaaagaaaatagtagtatatgtataacctttcttgaaaactcggtaattatatgtcccagagctataggaattatagttgatggcataattttacatgaaacatttactaactatagtgtagaattacgtatataataacatgaaacagtaccatcaagactcagtttgtcacatgcgaaatttcatatgtatataataatatatttacatatatacattgagtctaattatgtagctcaaagaattatcaagaaacacaacaaccaatcctatatacttatagggttgaatataataatacctttaaacttaaagaaaacaagaactcacaaacattaattattcaagaaaaagttttatagggtttgataaattattcaagaaaaagttttatagggtttgataaattattcaagatcaatgtacgatgataatggtattcaaaagatcatatatatatagaca

SEQ ID NO: 188999 - DNA, 955 bp, Cannabis indica
ggatggtatattgaagacaacattttggtctgtatttaagaatatttttaacttgtcatttttataagttgaaaacaataagaaattttgttaactgttttatagttggtataattgggttataagaaaaacattataaatgacattttctttttccaactaaaaaagaaaaactagtactagtagataagaatatttaggcacacagattgagtgagacccaaaacaaagatgaggtacttggtgaccaaaataaaatccaaaagagcaggtaatcttggaaagagcgtaggaagacattaggctaagttttccttttcttttattaattactactccccaaaactcttttttaaaatccttgtaaattgggaaagggaaacagaaactcattccttatagtttggtccctccgataagtcttcctagagaaaagttatttatttatttatttttcaaaacaactgtgaccacgtgcatagccgttgtgacaaattgcctataatattattaataataattactattattatagttgtcttagtctacctaaaagtgaaaaaaattatggtcatattttgacaatttcgacgtacactaaactcttcactactgcttcagaaagtttagtgttggtaatatcttattagaagctttatcatgacgggaaaatgattttgtcctgttattgtacttttgcggattgtaattcgtgatgtacggcagccgtcagatgagtgagttatttgatttgacggctgacattgatctaagggtaattagggttaaaaaagtgaaaatgtaccttgacacttatttaatataccctgagattcatctaatgtaccatgaaatacattccgtgaaagtacatcacgggacaaaatcatatccttatcatgatgcaagaagattaggtgtttaaaatgaaaaacttgtaggagatatattgtag

SEQ ID NO: 189000 - DNA, 2261 bp, Cannabis indica
tattttgcaatgaagttgctttttgaattcttatacagttgtacatagtttggtagcatatataagaacttttacagttaaacatagttttgtagcatttataaaaacttttagtgaataataatttagcttaaaattttcttagacaaatagtggacaaggaaagggctactgaagagagacaaagctgaattctctacagataaagatcactgtcttattcctttttcttggttttgatatttttctctttcatttggttttgttttatttgtttatttatttttttgcttattacactttaccaatttccatctttgcccttgttttaccaaattatcttatgtaatgtccctgttatttaatccttaagtactagatcttaagcataatctttaaagaagcctgtcccattaaattccctcctcttttataaagaacaaaagaaaaaatttaactttaactttttctttataaccacttttccttttctgtattcccttgctctctctctctttttatcacttctttacaatcttttaagtgcttattataagtgtgaagagtttttgtgattaagctccttttccttaatgggtttgcttttattttcctttatggctcttttaggataaaattataaaataaagagtgcactttgctttcccaatgtaaaaaaagttagtagtaaggaaaagctttttcttctactcattttcgtttttattatggagtaggagtatggacattatttgaaaccagatcccattttatacataaacaatttcattaaataccaactttcacaataatacaaaccttcaatgtcacaccttcgatattgaagatagggaatatcagattccttgacatattcatctaggcactgagtctttttcacaatcgagttctttccatcttagtggtgagcctgggcatattgggttgttattaataataacaaattacaatgctcaagaatttcacctccactactgagggcagagtatgatactttatttttttcttcttccaagattgctaaacagaatctttttccaccatacagtacacaatttcagctaatgttttcatgtttcttcactgaaccaggaaagaaacaagagcagcttgagttaggactctcatagaacaatcccatgaagctgttgcattcatccattgccgggctttctttcattctctttatactattcatcttttccccagtcttagctgatctcaactctgatagacaagctctccttcactttgcatcctctgtttctcatacaaaaagactcaactggagtgattctgacccagtttgttcttggattggagtcacctgccatgaaagtcgagttacttcagttcgtcttcccggtattgggcttgctggactcattccacccaacagtataggaaagcttgatgctttaagggtcttgagccttcgttccaacctcctcagtggaaacattcctactgatattccatctattccttctttacaatttctctaccttcaacaaaataacttgtctggtaacattcctcattctctctcacacaatctgattgttttagatttatcctgcaactccatttctggaaacattccaaccacagttcaaaatctgacacggctcgccaagttaaagcttcaaaataattccatctcaggagtcatccccagtctgagtctctcacatctcaaacttttgaatttgagctacaacagtcttaatggctcaatccttattccctccaaaagtatccaaattcttcatttgttggaaactctctattgtgcggaccacccttaaagccttgtcatacaagctcctcctcttctccagctccagctctatctccttctaactcaacattgctaccaacagttgtaagaaatgctccaccaaagagaaaaaaactgggcctagattccatcattgcaatggtaatgggtgctctgcagttatatttctcattgttctggcaatatacatatactgtaacaaaaaaagagatgctgaagccagtggcacacttaaagcaaaagcctcctccacagctgggaaaactgagaaacctaaggattttggaagtggagtgcatgatgcagagaaaaacaagttgttcttctttccaggctgctcatatagttttgatcttgaggatttactgagggcatcagctgaaattcttggtaaggggaataatggaacaacctataaggctgttctggatgaagggtc

SEQ ID NO: 189001 - DNA, 4539 bp, Cannabis indica
aaaattattatttaaaccaataaaaaatgaacacttcatttgggtttaacgaaaagggaccaacggactcacataaaatctgacattggggactattaccgccaattttttagattggggactaatctgcatcaactctaagttttgggggacttttgccgcaatcatccctactatttattatatatatttgtttaaaactatttatatatacttaaaagttagggtttattcatttttacattttaaaataatttttttatatatatttttacagaaattcatttagcaatccacataataactaacggaagaatttaaattgcaaccaaaatcagcatatcaatccacataataattaccggaacaattcaaactgtaaaaataataataaaaataaaaaagtaatatttcgagtgattccgttgaaaaattcataaaatgtaatattattttaaattgttagccaaagaagtaagtaattataataaagttcaacattaccattaatttattctcctaatattttgtttttatttctttttactttttcttttttgacatttcaaaatttaagtaccaaataaattaacatgcctttaattatgcacttcttaatctttatgctctttttttttttcttcctttggctgctacttaatcttaataagagataatcaaatcaactaaaagaaaaaggtacatacattcatttatattctttttttctttctataataatataaactataacaaagtactagcaatgtatacttgttagaattgactaatcaaatcacttttattttatttttcaaaattagttttctataaaatttgttgattatttttatcaaatattctttttcttggtgaaaacgaatatttatattttaatattcttgattttttttatacttttagtttcaagtagcatggcatatgcatttgtacaataaagcataatgctaaatatcatactttttgttctaaatttgacattggcattattagcacttaacttaggttaaataaatatatattctattaatctcatcatataatcaatgtatatcgaaatactaattttgttgctcatgatatgactagatgaactttcgtctagatcatttcaggtctagtggagccttcctctatacttgatattatcctttataatgaccgtgagatctaatttttctatttataaaacgtttatttttttttttaaaataaaaacatgtaagttataatatactatttaacccaccataaaatagtgtgattcgtaatcatatgtgtagcctaatagttttatacttcttttcacaaacaaaaagttccaattttgaatttccgtctcccaatattaaaaaaataattttctttaaagaaatgcaagtaatttaaacaataatattattattattattattatatagattccacttccaatttgtcatatatttagattttaaaccaattacacattaaatcaacttagttatgtttggtttattgtaatgataattgtaatgaaatcatgattataattacaatgtttgatttgttttaaaaagtgatacaatggaattattacaatgtaatgatgattacattatataaggaaatctccattacatgcaaaaagctatgtattgataattacattacaaaggattaaataaaataaaactaaaatgactcttataccctctttttatacaaatttcaaaaataaaatgagaataattttatcaatttatcacttattctaatattcattttagcaaaccacacatcataatcaatttacattattattcttattttattacaatatactattacattcttccaaaccaaagatcactttatttgtattttgttgcttaaaaaaacacttatttgcattttggttttgttggtgaagtttcttttaagggttttctattaaagtttttttgctttaatattgtaatataatgagaatggtaataaaaagagtttttagcggttaaactttcacaactatcgtttcacttacatttaactatctaagcttaaattttagcggtaaaatctttcaaactactaaactgttaacaaatttaaggtgttacccgattaacttccatcataaattacttatgtctacattcttgtaaacgtgacacgtttatatgggtaactgtgaaaaatatatgtcacacttaaaaaaaaatgggatgttgtgtgagctttcaaatgaggtcatttttgtaaatgtcacatatcaaaactaaaacaatgcattagacattaatgcttaacacaataaaaggagtttgactatttaatgcttaattattaaattaaaaagaatgacataaacgaaagcaatctttgtactcatttattcaaataaatcttccaataaagaaaaaatataaatacttaaaagatatgtgactcaaaatgtttgtcacaaccaaagtctacaactattttcttagtcaatttctacaaaggaaataatgtccttttctaacctaaacaaattgacacctcatttattaaaactaaagaaaagtatcaaattttagtttgatttattttttaaaataaataaataaataaaaaggaaaaactttactaagtcaaaagaaataatagtcacatattcaaaatctagagtctaaacaatttgtgattcaaaatatttagtgatgggtacacacatatttaatatctctaatattagtaaattccaaactaattaaccaaaaaaacaatgacacaaacaaaaatcactatcaaaaaaactcaaaatcagaacataactaagctttttgtactttattgccacgtgtcctataatgattggaaccacatgtttgggtcccacgtgagtagccgtcatgccaaagctcctggagataaggatagcgcgtgccatccacgctatctcccgactcgtagaggtttaggacgtgcgttgttgcacgcgcgaacactgcgatgactgcttggtgttatgacgtggcggcaactcattgattagattgaccttaataaaatcattcgaactggtttcaacacttttgtcttgtagtaaataattttcactttgcctatttttttattaatttatttttgattaatacgataataaatgttttttaagaaaaaacactcaattttcaataaatagatttggatttatattatttaaataatttattaattgacctaatattaatcattttgtatagactttccaattattattattttcgaataatatcacatgaatttagcattatataatatgataaataatatgaatttgttatttatatttgtaataaattttgacttttttttgtgctcaaaattattaatttggttagagtattattttgaataatttaatcatatattactaaaattagtttaatattgaattctcaaaattatatttttaaaaaacttttactaaacgactagcttacgttttttattctaatttgataacggtaatgagaagagtaatacatgtattttatgtataatattatcaatatgtgactctctaacaatgtgcaactttgacacttgagttggtcgctaagggtacccagttttgtgtatatgggtgaggactcacacaccaaaccactacacacgcactgccatccggccgagttgacgggttggtatggtgtcactttatttattacagaaaaattatttaatgaaataaatattttattaattgtttttatcattaattaaaagaaaacaatgaaagcgatcagtgaatgatccgtttttttttactatgaaccaaggtctccacgaccttatctactgttttcttactgttttatttttgatcaacttctctatataagtcgtatcagaataatgagagaacaaaatctcttattccttataattcatatatggtgattgttttattctaggaacaccatggttgataaattattgtgtacactttcgatagagtcacgaaacatctttaaaaaagcaacatagtttgtgacttggccataaattttatttggtaattcgttccaatttattctttaacctacttaatcagtccccaaaataacgatgatggagatgtatttgcgacattgtcatgttcatcaactcacaaccaaatgagactagaaaaaaaaaagaaacatgagcgaacagcaaaaggtcaagttggtgagtcctacctttcaacaccgtttggagagcactgctttcagggagagcatccccgaatcccctcttttaaaaaacaaagaaataattaatatatttaagataattttaaaacaaaaaaaaatattaataagagtggaagttagaaaagtatattacattttagaaaaagtatattacaacatacatactattcgatttgatgaagttgggttttaaaaaaattcttattccataatccatatagttcaatatgcctctactaaactatcaaatatgtaatccaatgaatttggtagtttttcaacttttaca

SEQ ID NO: 189002 - DNA, 1760 bp, Cannabis indica
tgactaagagactcgttgaggaaaaatctgattataatacacacaatcaaatctcataaaaaaaatagtagagtgaaaaagagtgactgacaaaaatgtaaattgatataatttgtggaatttagaactttggaagtaattttattttatttttatcaggtgtgtttcttgaattttaattatgttgtaaaactttattatattgtttatttacttagtgtaaattccctataccacaacatatttttgaggtgtggtttatgggattttgaaattttgcagttgttgtctaagaaatgtttggtttgaaaaaataaccaaaactcgtacggtacccactgcgatcacccctaattcttgcttgagctttctctttgcttatcaatgaagttttcctttataaaaaaaagaaagagttataggttggaaattttcttttattttgacacaatttaactatcgtgcttttcaatgaagtgcttaatttcagcttaaaatggtttgggaggattggaggagtgaagtggagccatggaacaacaatccaatgtctctcaacttcaaccattatcccctaaatatcaacaactacatatataaatatatatatacacacattctcaactacatcacattaatggcgtacaatttccttcttcacccattttgttatactcgctctttctcccggtaaaaaggcttcacaacaaagcttggttggttcttgaaaagatccaagttaagtaccactggcaaaactttagtattggctcgtgctccgctggccatcagaagcatcgaaatggccgcctttcccgcctcaaccgcgcactgcagcggcgtgtacccagcgtcgtccaacgcgtcgacctgagcaccgtggctgattagagcccttgcagactcgatatcacccttgaacgctgccctatgcaacgccgtccacccgttctggtctctaacgtttacgtttgctccttccgcaagacaactcttcaatccattcacgtcgcccagcctcgccgcgcggtgcagggcgtcgttcaagtgaagcggcgcaagaagctcagtgtggccgttatcggctgctagtgcgaaggctgtcctcccgtctcggtcgacgacgtatttggcgtttgaccgttccaatagacactctacgacttcgtaatggccttctgacgatgcacagtggagcggggtccatcccctactgtctctaatttcggcatttcccccggcggagagaagggacctcagagcttccacgtggccccgtgcggccgcttcgtgcatcggagtccaaccatctgtatcagacgagttcactccgaggtttcccatactcttgcagagaatctcgatcatatcggctctgttcatcgccgctgcgtcgtgcaaaattctgtcgacggagatatcgaatcggcaaccagaagctatcaaaaccttcatcacgtcgacggttctggccttaacagcggcagtcaacaacgaccttccctcggaatctttaccgttgactttagctccagcgtcaattaaagcagagaccagatctgggttttcagaatttatggctagtttgagggaatttgttatttgagattccgtacacccagaaatagcttttcccatataagaactcagttcgggaattttatcgtggtgtgtgatgagaaactctacgacctgaggaccgacgaaggaaatgggtatgaaggcgtctttgaaaacatggcgtccggggacagaaaaca

SEQ ID NO: 189003 - DNA, 4016 bp, Cannabis indica
agccttttgacctcatctttgagctcttgggcgcactccttgtccaaaaattgcctcttttgctgaacaggtcagatgcttggatctatctttagttcatgggtcatcacggaggggtcaattctgaccatatctccatgtgaccagtaaaaaaggtctaggtttttccttagaaattccatcaatgctgatttaatttttggagctaagccttttccaatcttcagtcttcttgtcagaaaagtggggtcgacctccatttcttccaactcttctacaggcccgaagcaacctgtaggatccccaaagtgaggatttatgtctgtgtccctgccttgggctagacttcattgcttcttgctgggctcgtaaactaggcttttggtaggcatcttctttattttggccttggacagggccaagtttaaacaatgacgggcagactactagtctccacttacacatgccaccccatgccttattgtaaatttgaggcataagtggtgatagatgttagtgccttcaagttgttgagggccggtaaacctatcatggcattcaaaaccgagggaatgttgatcacgacaaactacgtcatcaatgttttggcagttggattttctctaattatgagtggtaatctaatatacccgacaggggcgatgccttcgccaaagaagccatacatcacttgattgcaaggcaccaggtcggtgagttggagccccaacttttaatatgttgatttgaaaagaatgttggaggaggctccgtcttccaccatacatcttgctacgatcatgttcccaattcatacagtaatgaccaaggggtcattatgcgagaaattgacctgagcagcatcttcttcggtgaaggagaatgtgggctctataggtttttggtgcttcgagctccttgtctttgacagctaggatatcgcttttatgctcatgacgaagtgttcgagcaggtttggcctacaatgtggggttcgccaataatgacccctagatgtcccgccattggcggtggcattagatctccgttctaggctcgttgcacctaagtttggttgtcttgaacataacaacgcaggtggggattgttacgtcttatgaggtattcaatctccctcttcaaactctgacactcattggtgtcatggccgaagtcattgtgatattggaaaatttttgacatgtccctcctgctcatctcctttttgataggaaagggcttttggtatgggattgttccctgagtgtccagatggcctcaggtttctctattaggagggtgaagcatgtgtacttctcctccttatcctttgtggcatgggagaagtgttaaaattctccttttgccattgttcctcccagagctgttggtgatgtgcttgtttctagtgttttgccactagaggtctgggcatagttgttggtgtctgcctgtgcgcatggtgggtcatgagactactggatgcctcgtgactgattgttgttgacatgccctgcatgggcctattgtatggcttcatcaactttgataaagtcgtttgatctatcaaggaactccttcatgttattggtagagatccttatctttccagaagtcactcaatgggagtacgccccctagtagaagttggtcttgtgtttgatgggcagttgattgtcggggtctctatttctcaggtattaacttggtattcttaccggtgagctgtattgccacgtgacactgattctatccacgtaagtactgccacgccaggaggacaaaaattaggataatactaactaaaataaaattaaagctaagaaaatagatgaaatataaaaattgagatggggatttttacatggctcgtgtattaacacaccctagtccacgagtcaacatgatttgggtagaaaatacttcaagtattacataagtactcttgtcttgtttatgaaacctagcttttggccttgagttgttagaagaaaaatcaatccctttgcatgaacgtaacatattatatttataggctagggtcgggtaatagtatacccagacccgcaagagtttccatgtaaatctagctcactaatgaggtaaatacaagtaatatattaacattgggcccatttggtgtgccctactcatgaggcaatggtcgtctgtacacgtggagacctcctgacggtaacaggtggcatgtgtgcgccgtttttacatataattttgccagagtaatggttgttggacaaagggcacgtttctttttatggtacacgcaatttcaggacttgttgcagggaataaggtcctaatttcaagggattcaacattaatggagtgttatatcagccttgtcttctggacgcctctttcattgctcttttgaaagtaccacttaaagatatctggatactctccctactaggctttctctctatctggatgaaatgctctttcagaattgaggaaacccaattcttatgataactggagttgccttagaaccgaaactgcgacccaactcattcagggagtttatcccattaccccaatggggccgtggcggggcctttgtcaattgatttggataataaaaatacacgtgttctcttccaaaaacacaattaacatccagtaataattataacaattaattagatgtaattgatatcatccactaattgcttcaatttcatcaaacttaatcaaggactgcatgcggccaataataatttaaccaacttctatacataagctataatatatatttaatgtctaatcattgggaaagggctggatgaagcaataggctatacagataggtacatacatatatagcttggcctaattgagcagaaaagggtggaggttaagaagagagcgaaaataaccattaaattatgctttattataaatagatgagaactttcatatgagtgagattacgttttaattatgtcatcattattcatgataattgtaattgtgatcatcattgtatcacataatggcgaggattaaaaattgggagatgcataattaggtatgttataaagcatatgtgtaagtggatcccattgtacatatattcataaattaaagaacccagcacatgattaagatccacttcctcattatctacattatataaaatctttgacgccgccaaatcaactatcaataaacaaataatatacaattatggtttggttttcttcctacatggcatcaccaagaaattgtatgcctatacaagagatatagtggtccttatcaattatggtgacatatacaaatatatacatttcctgttatcctttaacatatacatgttaaagcaaatgttggagaagcatccagcaagaataatataatgatttaacacacaaaaatatttatatacatcataaagattcattattataaatattaatttcccttttaatgcgcgtgaaatgtaaaggaggagtgctatattttttgccctcttccacacttttctcttttgaacatcttggaaaggcactataaatgattaaatttttgttggaacggggtgtggcataaggtggtagatgatgatttgctaatatgcttattctttggacttttgaaacctaattaactgtagctacctaggtgtttcagggcataaaggagagccatggtatattgtttagttaatgacatagtttaatagtactaaaaactagggtgtcttcatggcagcaagcatgaggggcttggagaggaaataatatgaattattgaaaaggaataagggatcattaatttaatttgttagtccatagtacaactaatctcgatctttcatcaatggaattaatccttcgtacgtttctgattgtgatctgaattatatttcctttttttttttgaaggagaattatatttccttttaatttctccctttcagcaatattttattgaaggacgcgtacatgagaggcgcgcgaataaatataatatatatttagaaagataaa

SEQ ID NO: 189004 - DNA, 1454 bp, Cannabis indica
gtttctcaaagttagataactttccataagagaattcttctcttacaagaagtttcctaaaccaaaaagagagaaatctttcttacaagaaaagagtaattgaatgcacaaaatcaatgtagtaaaaataatttaaatgctcaataaaaatgcacattaattaaaaagtattttaacaactaaattaaacaaaaaaaaaaaaaaactaaaacaaatacccataattttgaaaaaactaaaagaaagaacgattactaaagcaaaataaaatacacatcttcttttttctttgcaatattattatttattttattaatattattatttgaggcaggcaagggaattgagatttgagagagagagacacgcattaagatgaaaaagaagaaagaaaaaaggagaatgggcaaaaaaggcaaaataactcagcttcactcacctcacctctactctctcagactcagcccttctctcttcccttctttctttctcaatcggtttctcctaaacaaatgtagagaatatactttcatttaatccattttcaacgcacggtgagtccaattttagggggtttcttgtttttgctgtatttgttttcttcttcctgcctactttccaccttgcttttccagttcatagaataattttttggacgacatgatggggtttcagtaagaatcgtttttatttttgcccatctcttaatcttatctcaaaaatatttgtgggtttcattaagatttggtttttgttttttgtggttttggttttcggctttgcttttgtgaattgtaaaggtcaattttttttaatgagggttagaatgattagggagatgagcaaagaactaccgcctgagcctcttgatttcttcatttggactgttgaggtgagctcttccaaccttccactatttataatcgttaattaatttggatcttgatcttcttttcatcaatcatcatctgtactgtttcttcgttcttttgattaaagtatttgagctgcttaattattgatgaaaatctaaatttgttgcttgatacttgcatctgatcctttttatagttcaggttctatatctgattggaaatttgatctttgtcttttgctacttagtattctacaatttagtagaagttatggtataattagattcatatttaatggtcttgttgaatggaacaatatttgtaattgcaaattttatcttcgagaaaggatcaacttcattagtctttatttattgacagaaactattgcaattttttatggccttatagcaagttgggagtatggttttccagcttagtttttgaggttaagaatttgctactttttgtatttaactagaaaaaaaaaattgctgttttgtactgcttccaaccagttactgtccgtcaacaaagaaccccaataagaagttaagaagctgtgtgtttgcaagtgtt

SEQ ID NO: 189005 - DNA, 1563 bp, Cannabis indica
  modified_base (61)..(61): a, c, t, g, unknown or other
tagtttttaagagtatattatgtaagttagtagtttgatttgaatggaaagggaactgaancttttagaatacattgaattataaacacaaaaaatgtataaatatatattttatataaagtggggtctttataaatgtgactaaatgctcatatattggtggttagaaaatcactacgtatacattatgcttctacatatgctcaagtatatttgaacagaaaatggtccacaccctcatattaatgaaagcaaattcgtttaacctacttccaagtagtacatcatatataaatataatacatcctaaccaaaaatttcttctcctttaacccctgaataaaattactttaatgttgtatggtgaagcactatatatactcacgtactaataaaagatagataattattattattattattgtatagtattcttctgacaaaaattcctagccagatgtgcaatattaactagctaagatttaagtgaaaaagaatgaaaccactattagttaccagcacggtatataataatttttacacagagacagtacataagatttatggtttctttttaatacggggtaagtttaaatttataagggtagttttgtttatcttataagaaaaaaattcctgtacaagaaaaggaaacaaaatatatatttatattaattaaagaacctttattatgttttgaaaagcctatatatgtagttaatattcacgctaccactggttttaattagattttagtaaaattaaatgtagtagatttttttttttttttttttttttgtgctttggtttacttataattccttggttatagaatcctatttttgtactaacttgtacctaacaataagaattataactttctatttttttgtctataattaaaaaaataactcttgaccatgtgaaatatgggcataactggtgaaacttaaatgaccgaatttggaaccaaagtagaagtcaagttattatacatattatatctgtcttatatatatatatataaatatatttatcaatgtaaatgtccgtacacaattagattctaaaataagaataacaactcagtgtatatatagcttagttggctactaataaccattattattttcctcatgttgaactctctacccttttctaaaagtttcattaattaaagaaatacattaaatataccagaaaacgaaattccagaattacatatataattgtaagaggaggaaaagtataaatacatatatatatatatataatggtccaccaatcctagttgcataattcaattacatatttagcttgtgcttccaaaacagctggcatattttgggccttatcctattccattatgtacaaaatggaagaaaattaatttatagttaaaacatacaaacaaataatagagaaatagtaaaccaaaatattatttaaacttaaatatatgtgtttatatagaagaaaaaaaagggaaacagggttgatgacaaggacacgctcacatgagccaaaccagataaaacatgggtccctaccttcaatatcact

SEQ ID NO: 189006 - DNA, 1876 bp, Cannabis indica
ggattcaccacaccaggaaaatagtccccaaaagtcaatctattgattttgtgacttatctgaatcatgcatcataaataaatttcattgaacgaagcaatagtggaagctactattaaaatacagtagaaaaaagaacagcattccaaatataaaatatttaaaagatatttgaaggttaattgtaatacaaaagcacacaattttctcaaaaataaaaaggaaactgaagttccatgaatcatgtcttacattaaaactatctttctgaaatgatagaagatcatggacgtgaatgttcgattgttggaaactttttccaggtgcaaaatgaaaattcccagcgaccttattaacttccaagaatccatatacgttacacccttcaccttcttcatctttgattctttgtaggaaaccttctcttttgcactgaatgtaaacataacaatagatatacaaattaaataataatcatgttacaattatgctactatcataatattatcaattacaaaattataggttcttgaaaaaaaaaattacaaaattatagtaaataaactccaatcaaatgatattttatctatagacatgagggtaggggtgacggatgtgtgtttgtgaattttgtaaagttaggcactcacaggggcagagaatatagccaaaagaattcaaccagataagttgacaacttggtgtggagaaaaatatgcaatcttatagacaactttaatatgctggactatataataaatcaatatagttaatctagaaaatacatacttatgtcccagaaaatttataagagaatcaacatgcttaggctttaaaacatggcgtagcacaatggtagaaagtgggattgtaaattgaaagataacaaattacaagtgcaatggcataagagcattattccaatactcatgttgcgatgtatggctcagggacttgcaattacagacctgatcaatcatatctggatttgataatgcccaacctttcttccggtatgcctcacgtacttcttcgcaattattacagcaatcatcatctgactgaaggggttaaaaacaacaaaaaccccaagtttaacaaaatgacataaaaaagttcacttgtaaagatgaacaaagaaacaattaaataacaatgacattaaaatttcctctgctattgaaatataattaaaagccccagcacaacattatacacgaaatgaacatatggtatagataatttttgcaactagatgattcatagtcaatttcgttaacctgaataaaattttcttttcaaatgatcaaaagatttactaaatatagcaaaatacaattagatagctacagaattattatgttttgtaattgaatgtttcacactagaaaattttaaaacaggattacgtatattacaataataatttaaaagtgtttaatagtacagagggataaggtaacagattgagcaataatatatacacagttgatcgtcccgtttgttgttccaatagtgtataaacaaaacttcattctatagtatcatctcaacaacatagattcgtaatgaaaagcataccgcttctgcaccatagcaggatccacagtatgtctcattatgctcaagcctgccaccatgtctctgcaatggcttatcaatctgaacaaaaacaaaccgatattagcaaattgaaagacacatgaccaaaacaaaaactatatttcaaatttatatgatttagaacaccaattgaagaataaggaaatatacatctaagaaatgatgttttctagtgaacgaaaaagaaaacaatggcaataatttttttaactatacaaatcaatacagatgaatatttccttaaaaaaaaaaa

SEQ ID NO: 189007 - DNA, 1990 bp, Cannabis indica
aaaaaaaaagaaagaaaaattgtgattgactaaaaaacaaaagtggggttaattgaacaattattttcagttgactcattggagatgccctaatagtctaatatccctataaattgctatcaaacttcttgttattaaattaaaatatatattatttaatatcaaactatatcaatgaaaataaaaataggtcctaaaaatatcatttagcaattaaaataaaaataagtatacttcttttttcgaagtaaatattaaaatggatctcattaaagtgactagatatttgatactaatggtcaagttcactcttgacttgtacatatttccatgatcaaaactaccctaataaagttgctcattgtgacttatgaggtgtgctagcgtcattgcggactctttaatcatagattgcacttatatataaacttgctttagataaagagtcatgagcttcaactgaaaacctcaaagatatctcattttatcatttattctttcttagaattttttaacaccctttgaactatatataatggaagttgagaggactccagctactaaagaaagcaaatatgaggtaagtttcaccaagaaacatattgtgaaagcattaaatatttcctcattaccaaaatcaagcatcttaaccctttccaatttagatttactctctggtcgatttcccgtaacatacttctatttctatcaaaactcacttgggaataacattttctctataaacaaactcaaaagctctctagctattactcttgagcactattatcccttcgctggtcgaattgttcaaaatccatttactagtgagcctcaaatcatttgtgataattctggtgctcttattatagaagcagaagctaatattccattgaaaatgttggatttctacaatctaaatgagtctctagaaggaaaattagtttcaatcgttcctgacttccctctccaaatccaagttacacactatacatgtggaggtatttctattacgtttacttttgaccatgccctaggtgatgcttctgcctttggtaagtttcttctctcatggtcccaaatagctcaaaataagcccatgtcatgcacaccaaaccacaagaggaacctctttgcacgtaaccctccaacttatcacccttctttagaccaaaagtttgtcaagtgtaccatggaagaaattacaaacataccaactccaaaagttttgctaaagagactctattatatccacgtgtcgagcattgattggctgcaaagtctcgcaagcaaaggcagtaagaagcagtacacgaaaatagaggcattctcggcctacgtgtggaaaattatggtcaaaactattgacaaaagccatgttatgtgcaagatgggttggttggttgatggacgtgaaagaatgtgtgttggtggaaagaataattcaatgtcaaattacatagggaatgtgctttcagtgggttttggagaagcaagagttgatgagttgaggcatggttccatacaaaccatttctggaaaggtccacgaggccatttcgaaagtgactaacgaggcccatttcagggacttgattgattggatcgagagtcataggcctgggctgatgttatcaagagatgtattgggccagggaggccctgctatagttttatcttcaggaagaaggttcccggttgctgaattggactttgggtttggtagtccagttctgggaacagtgtgttccacagttgagaagattggagttgcttatatgaaccaaaggcccagtgccactggagatggctcgtggactgtgtctgccatcctatggccggaatttgcctctgtcttggagtcggatccaatatttcaaccaatgactagtcttcttcttcacttgttctaaagatatatgtattaatttgtaatatggtatttacccaataaatacctactgtttcgagtttatatattattttttttcttt

SEQ ID NO: 189008 - DNA, 3913 bp, Cannabis indica
agtatataaaaaaataaaaaatagggaagattaatgtttttacttaattttgtttttgcaaattaataaacatgtaatcccctggtcaaaaaaagtaactaaaatataacttattccctaaaaaaacaccttatttcaagtgttgttagttttgttccaacagaactacttagtttcagctgtcaattaaagtaaactaattgaaaagattaagatgaagatcaagcttcccagcctctcaagagggtagcacgagcaactcgattgactcctagtgtaaaggcgcccattcggaggttacaaccatgagtttgacacattccctttatatcaacaaaagctttcctcatgtacctatttagttctctgttcactttctcttcctcccacataaatccttgtatattctatatcagaaaaacgcaataaaaatcacaagttaaacatgttgacagacatttttagagtgagggaagtttctttcatgtctgttattttacctgaacccattcaaagtagctcacagttacaccacccgagttcgcatatatgtctggaagtataactactcctttcttggataagatctgcatatatttcaccaattaaggtgatgagattgattgagatgagcatggttgatgaaaggctattttgcaaacagttcaaattcttttaatgttactaaaagtcacttttcgaaatggtatatatggatttgatcaaggattatggtaatactataatcagtacctcatctgcttcggggtcagtagggtgatttgcagcttcgattatgaactttgccttcacatcagcagcattttccctacagaagagaaaaaagatcaaatataccatttctacacaccttacagtatttaagtcctatgtgcatttctttctataaaagatcagtttcatgttgtatcgactagttacacaccgaaacaatgtgtcataattaggtgttctttgttaagtaaaatacttactgttgagaacaccacctaaggcacaaggaatgagaacatcacattcatgaacaagcaagtcctttggatcaataacatctccaccctgaaattccttcaaactttcatgggcatctttgtgtctcatcagagctgggatatcaatcccatctgggttctttattgcacctgttatatcactaacggcaacaatcttaccccctctctcatggatgaaccttgctgcccatgatcccacatttccaaagccctgaaaaattgcaaatcaatatcgaaacaaataaaaagaagcatcactaatacaacaactggaaagaaattagaccaaattaacactcgtatcattctatttctcattcctcttctttaacacccaacacttctttcatttatttctgttacttaagagtacatatataattattgaagcttcatagtgataatggagaaacctgtatgacaaacttcagattagagattgacttcccatattcagctagtaaagcctctgttgcaaaaaccacacctagtccagttgcagcctcccttccaagtgagcctccaaggtcctaacatcaaacaagtacaaatcaaaaaattgaaagcactaccatctattaatacaataggctttttaagctttgtatagattaagtgtcactcttttgatacttacaataggtttccctgtcacaactgcaggtgaatgcccatgaaacttagagtactcatcaagaatccatgccattgtctattggaaaacatatatcattagaaggaaactaaattgaccccccttccaaaaaaaaaatcccatataatgtatgagaagtttatatttgtttttttctttaaaaaaaattcataggacacatgataataataatacctgtgcattagttcccatgtcaggggcaggtacatccctgtgaatgcctataagatcatggatcctttgagtgaaaactctagtcaaacgttcttgttcactaatactgagttcccttgggttgcatccaatcccacctttggctccaccataaggaatatttgctactgctgtcttccatgtcattaattgagccaaagcattcacttcatctggatcaaccttaatatacatacaccattgaaattcatacatcaaatataactatcaccttaaaatgagatgagactcaaatgtaaaaaatcccaaatcaacaaagacatattacaaatcaaagagagatagatagagagtagatttgggggaagcaagaaaaaacctcagggtgataacgaatccctcctttcataggccctcgagcgttatcatgttggattctaaatccaacataggaagctagagtcccatcatctttggggattgtacactcaacctgaaaatatcaaccagattacaattaaaaaaaaaagaaagaaaaacaacaactttatttcaaaacaaataaaaaaatgaatgaagagaaaatgatgattactttaatttctctaaagggtatcaagagactcttttcaagcttagaatccaacccgagaattcgacttgcgttgagaaaattacggttggtggctgcaagagcattcatggttggtgtttgaacctttaaacaaacaagagtagaaaatgggtagaatacaagtaagaagaaagatacaattttgtagtcaaaagaaaaaggttgtggatttgtatgaaatttgtaaatagaattggatattgtaattaattgggaaattgatcatgactcatttgagactttctttgacattaaataatataatataatgagatagatgtttgatatgacatgacatattatacgaggtaacatatatgtatgagagagtatgagtatgaatcacctgacccctcctctgtgatttttccacaacttctccgtgacctgtttttggagcaatgctatgctatgcctacggtgacaaagtgacaatggcatggcatcataatctcatattaatagctcgcatttattgcttactctgactcactgtagcgtcacagtctctacaattatttaagaaatgtggtactttgtcattggttagttatattgttgttatatttaactatatacgatttaatatttaatatttaattgtattatagcatatacacacacaaacaaaaaaaaaaattgctaggtaatattagtattttttattaataattaataatactaatattgaaaaaagagaaaaaatctgatgtgtatccttgtttttgtatgataattgctaaaagatattaatggtgtttaacactatttttagtgttataagtatcgagtctcatataacttaagaaaataatttagaaagtgttggatactaatggtgcttaataacaatgttcttttagtatatttataactattttaacatttaagagttttttaagcgaatttatttttatgattgcatataatataatatttaggattctctgtaaatttttttaaaattaaataaaatagaatgttaaaaataaggtttaaacagatatttattaaacgtataagaaaaaataattatacgcatgcaataaaatatttaaactttaattttagcattttaaaatttacaggtaatctaaataaccaggacatattgaaataaaaaatttgctgaaagagtctataggggtgtacgagaacatttttttaggctaattagtaatttttcccctgaattttaacatgtatcaaatcatgcattttgaacttttttggctgttaaaaatttaaggactttttgtctaattttagtaaattctaacatagataaaagttgagggagtatgatttggtacatatcaaagcttaagggatatgatttggtagatattagagtctagggagcatggtttagtacataaacaatcattgagacaa

SEQ ID NO: 189009 - DNA, 1567 bp, Cannabis indica
ggtcagcaacagtatgcagttctaacttggttgctagtctttcaagtatggcactatcagcatttcgatcatcttttttcttagagaacacaaccatcaaatccattgctaactccatatcttgtgtatcagttcttctccttgctctctgaagttgtgtatgcattaactcaacctgatgtaaatccatcaaacatagaagtaaaatatctactttcatccttaaaataccattacctctaaacagcacactttgaaatttttctttcaattatgaaactgtcagtgtatcatgagatggataaagttcatggcacaatcatataaatataaatgcctatctaaaacaagtctctttccctttcccctaagagagagagacaaaaaaacctaaaatgtgagtcccactacctactcattaaagaagattatgactcagaaaaacttgacaaagggtcatcttattatattctgcagattgcagctttctgacaaggaattttgagtaaataaattaaagctatatatatgtatatataagtagaatttaaaataaaaataaaaacctgttctttaacttcaactgagattccaagttcatcgtaaggcatttcatctaaagcttgatttaatttgtcatagacagcatgaaatctccccatcacggcttcactctctagagcctaataattgatttaaaaaaaaatcaacaaaatcaataaacatcacatcaaaacaaataaaaaattacccagttgtcaaattcgcatctacatcccccaaaagaaacaaaattaaataagactaaccaagtaaatcttgcttccatagttacaatcctttaacaacttcttagccggaagaagtgcagtcttcaaattaaccaaaccattcagagcctgagcagaaatcaatgtagtgtcgttttctctaatctcttccaaaagcggcactaaaagctgcagtcttctgaccaagctcaggcattgcttccttgtcgttttccggtacccagaataagatccaacggtctcgatcaatcccatcagttccacaacaacgtcgttctcatcgccgccactaccgtcgcttgatctgatgaccacatttctcctcttctgttctccctcctccattttcttatccaaccccttctctctctctctctaaagccttaaagcagctgttgcttccagctttagtagtagtagttactaaaaagaatatcgtctttaacgattttgacaataagggtatttttttttttatttttctttttatagaaagttaaaaataaataaaaataattaatgacgacgataaataggtaatatagttccattttgtttttttggttattatataatttatttttcttttttaatttaattggctggatggcattttggcgggttgtgttgtgttgttgggtgttggtaaaataaaaagaaaaagaaaaagtaaaggaagattttcttttatttttctagcaaggaagaaattattttgaaaaacagttgaatgtgtttataggtcacataatattatttattattataatatatat

SEQ ID NO: 189010 - DNA, 2762 bp, Cannabis indica
tcttgttgtgtgtagccttgtgctaccaaacgagctttaaaacgttccacagatccgtcactgttgagtttgatcttataaacccaacgacatccaatagcacgcttatttggtggaagtggtacaacaatccaagttttattgtttcgaagagccgttaattcagaattcatagcatcaagccagtgttgaaattggattgcttgttgatatgtctgaggttctttaagagaggtcactgcaaggataaatgctttataagattcagtgagtttgtgataagatagatatttattaagatggtgaggtgtggaatgattggcctgtgaaactgagtaacactcgaagtctttgaggtaagcaggtggcctagttattcggcctgttctgcgaggaatcattgctggtgtagtatgagatgtttctggtgtgttggaaaggtcaggtgcctcaatattggtggttggaacatcagtgttgttgtcctgcaaagaaatgtcagttctaggaagagtagtttcatcagtaggatagtcattaactggtgtgttagttacatcagcagtaggcaaaatagttggagtaaatggatcaatattaccatcatcagtattcaattttagaaatggaaaaatgtgttcatgaaagaccacatttctggacaagaatatctgtttggtgttgatgtcatataacctataccctttcactccttgaggatagccaagaaagacacaagctcttgcacgaggtgcaaatttggtgcggtttgcagtgagagtagtggaaaaagctagacactcgaatgttttaagatgagcataatcgggttgtttctgaaagagtaattcataaggagttttgttgttcaggttggaggagggagttcgattaacaagatatgtagctgtcatgacacattcagaccaaaaaataagaggaacatgtgcttgaaaacagagagctcgagcaatattcagcagatgttgatgctttctttctgcgattgcattttgttgaggtgtttctacacaagaaaaatcatgcataattccataattggcaaacaaatttttgaaaacaagttctggtgcattatcagaacgaaatttcttgatcttacaaccaaattggttttcaacataggccaagaattgtggaataacagtgtgcacatcagatttattctttaaaagatatatccaagtaaatctagacctatcatcaacaatcgtaagaaagaatctaaaccccgagtgagattgaacatgataggggccccatatatcacaatgaatcaaatcaaaattattttcagcaaaagtaatgttgttattaaagggcaatttcctttgtttagccaaaggacaaatgtaacaaggaatatctttgtgtaagtttgaactgttacaattcagttggttatctaaaagtttcaagcatttatttgagggatgtccaagcctcgaatgccaaatatcagccttgacagcaagaataggagaagcatgaggttcagaatccagaatgtacaatccattttgagattcacccctgccaatcttcttcctgttgacatggtcctgcacaataaaatggtcagagaaaaattgaacatccaagttgctgtcattaagaagacaacttacagagattatattatatttgaaagtgggtacataaagaacattattcaaaactagatctttggagagaataatggtaccactgtagttgacagtaagactcacattgttaggcaaaattaatctagttgggacaacattacatatgcattgaaaaagatttttatcataacaaatgtgtcgagttgccccagaatcaagtatccaggaattattcaatttcatattagatatgcttgtgagtactatacctgggttacctgttttatttccattttcagcattggaaatgttagattgctgtccagccaagagagtgagaagttgctgatactgtgttgctgtcaattgtggcagtaaggcttgtccctcattcccactgttagcatcaacattggtttgcacttggttggctgctgcttctttatttttgtcattcttgtgatatccaggtggataaccatggattttgtaacacttttcgatagtgtgtccaagaatattgcaatggctgcaaaatggtctgtttcttttggaagagttcgatctgttgccttgattattggttttgttattgcttttatctccatggaaggcaaatgccatgttcgaatttgggtcagcagccgcattaacattggttttctggttttcttcttgagtcaccaaatgaaatactctatttacttcaggaagagggtccataatcagaatgttacttctgacttgtgagaaagaatccgaaagccccattaaaaaggacattatgtactccatgtggtagtgttcttgaagccttttaacacctccacatgtacatccattgcacacacaactaggcctgtagttggatagttgttcccatagagttttgagtcttgtgaaatagatgctgacagattgattttcttgctttagattcatcaagttctttctcaaattgtatatatgtggcccattcttttgctgaaatctgacttttagatcagtccaaattgcagctgcagattcatcatataaaagactagaggaaatttctttagaaaccgaattcaagatccaagaaataacaatgttgttatttctaaaccaggcattgtacataacagaattaga

SEQ ID NO: 189011 - DNA, 1519 bp, Cannabis indica
aatactctgtatattatagtgcaatagctagtaaatccgctagcaattaaggtgtcaagaatatttctacgggcggcatgcagcgttgattaatattaaattatattaatgcattgcattcatagtatttttatgactacacataataatatattgttgcgaaaggactagtctccacgttaatatgtaacaatatatctatgcacatgtcatctagatatattcatcattcagaatttggagaagaatatatatatttatatatacatacatcaacaatccttgtgccatgcaggcgtgttccactagagtcactaattaagtctatatcatcagtacgcatgtattagtatatatatatatgtcacttcaataaaataatgtttttaacgaaaatatttactagatcattttattgagaccactttctatacactgaacatttttcctagtagaaaggagaattaatttttctagtccataatattatgtatatatattaagagagagagagagagagagagagagattattagtgagatgttactatgttgtgtctcagttttttaggtcatatatttatattctcctgtggtttaggtgggataggttttgtccactttggagctgaccagtgaccactacatgtatcttcccacttttgacatttcgtggggatatctccatgttatataagtgggtttatatcatagccaaatttatcatcacccaacttaccacaatatataaactatcatatacacacatatatatatgtattgatcattcacgaccatcatatagagatatagatatatgtatatatatatattccagctagcacagctataaaggtattgattttgaagatatctcaaactaaaaggagtcttctcctttttctcacatttctttctccttttggggattattaataatggattcaactgtggtgatatcaattccacatgcggagtctcatgttgttgaagctggaacagtagtagctccaacaaaaaaggaaaatactaggatgaatttattaattaaaacaattgcttctcttatttccaacacggcttcctacgttagagaaaggacaagaagtattaataagcaaaagatgagaagagtaattcatagtgtcaaggtgggacttgctttggttttggtttctcttctctatctccttgaccctctttatgagcaagttggagataatgccatgtgggctatcatgactgtggtggtcatctttgagttcttcgcaggtaataattaacttgtagtaataatatatatgtataaatatttctttatatgatgtaattaataagtttatatatgttatatatatttgatcatcaggagctactctcgggaaaggtttaaaccgaggactgggtaccatattaggaggaggactggggtgtctagcggcatctttagctcaacaagttcatggaactggaaattccatcatcgttggtacctctgtatttgtatttggtatgtattt

SEQ ID NO: 189012 - DNA, 2435 bp, Cannabis indica
tcttttattagcaatggaaccgagaatcaacttatggcattgacaatttctcctcgtcatccaaaggtagctgcctcttatccagaccctgagaaaaatagcactattacaaaggcaagtacaaaaagaataattaccttaagaaaaaaatgcaagggtatgatatgaatactcaaaaccaatcaccccatgttccctttctttatgataaaataccaagaagacgaaatgtacctctcctatccatatcaaaatctccaaattagagggttcataaatcacggaagaagcatcttcacagactttacgtaaggcacatgcacaagaactcaaagaaagaggttctgacatccctgtggcaagaaataatctgtatgcaacaaatcagtatgaaaaagtcaaaattgaatgtcgacagcaaggtcaaatgcattgatagttactattaaactgattttatactttctgttcagtagctaaagcaagaaaaaggaagtacttacaataaggatctggtgtttacttgaaaagcaaatatacacttcgaataagagccaattacatctgcaagcgatctataaacctaaacgaaaataaacatttcaaagacatggaagaatgaagaagatagttgactttttaatacgaaagaacgaacaataaattcacagtaaatgaggaagaacggttaagatgtttaacgtacaatgcacatgaagcccttaagttcatccgaggatctagtggacaataaattcaccaattccatgaccatggagaaattaaaagtttggccctcttgtaggattacctcagcaacctggaataggaaactttgtttatcaaatacacggaacattgacaaaataagctccaatctacaaatgatatcaatgttgccaaaattcacatggggtatttcaaaagacaataaacatcgacgggtataaataaaattgtaacagaggcaacaagtaacagaaccctggtatggaaaaaattaagctgacaaaaagtaagttgtgctcaccacattaagagcaaacaatttggcctccacctctttccaaggaatttgtacgtttagagaggcccaaccaccaaagaagagctacagtagaatttcgtaaaatattatcaaaaatatacaacaattacatttatatatgtgcaaaagaaaaaatgcatgaatatgagaacataaatgcaactagtggaaatctgtccaaagaatcaagatatccagcatcacttgaaaaccatttttttttgtattgctacacatggggtccgaaccccggccccgtaacatacgcacctaccatttgagttagcctcaagtggttgtgcattggaagatatatgctcctaatagaatttataacacaaagtacaattaaattatgtttccattctcaaaaaaaaaatgagaaccaactaattgctactgagggtgagagacaataataaaaatatgcgcatgcactgtatacatgtagaatttcaagttctattaaaatgaaaagaagaagaaacaaactccctcagttttctaagcaattttcatgataccgtaataagagtaaaacacgatggtgatagcactgtcgtgagcatatcccaacaagtacgcaatgcagagtacagcaaagaatccaattaagaaaagctaaaataaaaagcatgacttgacacacacaactaatcaacataaagcaagcaccttttgtgtgaatttagcagatcttaagagctgacaaatatccaccaaaagttcaacaaggttcgatctaaaatggacaaggctatcaggtagttctgcagctcctctcttgtcatcaaaagtagctacatctacctatcaaacacaaaattttgatttgttaatatcgttctcctctttagagataagcagcaataccatcataatccataaagtgaacatagaaaccacacaggacataatatctctacacaacgaggctgaacttatcccagagagcatttatcatctatatattgcactagaataaaaaaaatcttcctttctcactcaatccattacttaaaacaaaaattgaaatgtttcacccaaggacgatgttgtggtcaccgaacatttaggatgttaactccataaatgaaactacacccggcagttttcagtgactgaaatgtatgttcacgctatttctactaaatttccatttcattttctgttttgaattagacaaaaacatctagggcagtatcttttttcttgtcgtcctttcgaacattgttttcttgcagaaaaatattatagcatattgcaccatgtttctgccacaaaagaatatgtttttgtcttaaagaacatcttcaaatttcttttaaagaaaacaagtatctaacaccccaatcgtcttttaatgttcaaacactaattaataaag

SEQ ID NO: 189013 - DNA, 1881 bp, Cannabis indica
aaaaaacaaaaaaaaaagaataggccctaagcgcaagcgtaacctgctttagcttatggtaggctctaatcacgtggcctagctcgagctgcccaattctattggaagcaatagcagtactttttgtgtgtactttctactcttaatttttctaatgagttttcagttaaaatatttgttaattaatatatctacgtgtaaaaattgatctctttatgcaattatatatatgtaagatgttgtatcatatatcttcattggtatattagtataagatttcactctaaaaatgataagaaatctttattaatattagagctagcttagtttaataattctatctttatttttatttgttgtagaaaaaaaaaaaaaatcggcaataaaggtgtaacaatatgttagagtgttggaaaaataatattaaaatgtttggtaatttcatcgatgaataatataataataatataaatttaaataaatagtaaagagtgatagtgtcaatcttttattataattttttagtcaacttttatacttgaaaatacatgtcgcaatgttttttttttttcaaaacttttttttataactatatttgttatagttacaaaattatcattgtaaatttttgaaaaatttcaaataatttacagtaccaaaaatagatataaaatttatcaaacgcgcatagtaaactgaaatattaagtttttctatttgtggtattgcaaattatatgaaaaattttaaaaatttataaaagtaatattgtaactattatataaaaaataaaaaataaatattctaatatgtaatctctacatagaaattgactaaaaaattataattagtactcaatataattatcataatatgtaatgacacataatatatatttttccaaataatttatccataaagtccctaagtagtcttgtctaatctttccattaatatcgatcaatcacccaattattatatggtaaatacacaccatgaaaatgaaatcattcctaaaatgttcaataattttttttgtcatttactaatttgacctacaatttcaaacatcattttctgttttgaaataaattaattaaacaaaagaaaaatacattttcaaatttagtaaataataaattagaaaatataatggattaaaatgtttatctgtaatctactgttaattaagatgaggttatatattgctatatacaaatttagaaattagacaaatcttgtttgagacggaagatatcacccaaaatcaaagaaaagcatgtatttgtaattttgtatagaaagattaaaccatatagataattttccaattataataataacatcatttttattttattaggctaattaatattaaggtttataccattttatattttatactaatttaggttttatgtgtatattttttaaaaattattttaaatcctaaattttgtaagatattaaggtcatcaaaatctttttaaatatcattaataaatatccttaattattaaaaaaagagttatattattttgaaccttaaattttaggataatcaccttaatttttgaaaatatattttcaacctcatttttcttaaagatttaaattaagagttaaaatccattttagttaaaatattttcaaatataaccaaatacactgtatttataaattaaacattttaaaaaaccaaattactatagatattcttttttttcgtccaggcccaccaatttttttttgggtcatagatgcggttcggtcgaaattgttttgttattgtgattcgatttttactattgtaatattaatcatgtctctgagtctatgcatgattttgaatgtttagtcttttctttatgacataatttt

SEQ ID NO: 189014 - DNA, 3150 bp, Cannabis indica
cttacgtatgttagttgtcctctaaaatggaaatatctacatttattatgttataatttttgtctgcggttattttgcaactaatgtaggtcaaaagatatactcctgcgagttgttgcgcaaaatctctcacctgagttgactctggtggaaaaggttttcttttaagcattttcttaatcagttttgtccttttctttacaacttaattgacttttatttctattttgaatattccataatttgtcacctttaatggccatcttaatttgtcaaggtaatgacaccaaacccagaatgtgccactacggaaacgacaatccttgatgcattgcatataatgcatgatgggaagtttcttcatcttccggttttggaaaaaggtgaggggcactttctcaattcatgactcttgtcttttgacttggacgattaatttcataatatctgctctacagatgggaatgttgctgcttgtgtggatgtgttgcagataactcacgcagcaatatctatggtaaaaatgattttgtttttttttttaattattaattttgtagtttatgtatacagtgaagcatttaaacatttctttgttgtctattgagatctagctatccagttctttgattaacttgtgcatttctgtttatcgtttttttccttttttgaattgtacttgtcgcggttctctcaacaattttaattgtggatttatcaatgtataattaactgttggttaatcatttttaatttccaattctgaggtaatctccaattttactgcaagccagcatttatgaattgtgactatgctttgacaaaagttgtgatgggggaagtgaatttttttttgtgtgtgcttatcttattttgctattttgaattgatttaaagaagtatacttattttcatctagtgaattttccgtacaaggcttgttttcaagtatgtgcttttccccctgtttttaggaagtggtcaaagggagtaaaccttgttactgtatgattttaaaaaatttcttcactatgctgcaccattttcttgtctactgcttcatgcaggcctaattgtgatgcttttggtgcctaacagctgactacgtaaaagacacttttgacaatcaaatttcatggcattttttcagtgtcaaaaatttcaggatgttagaacacagaatgttttacgaagctatttattgtgttcataggttgagagcagctctggtacagttaatgatatggccaacaccatgatgcagaagttttgggattcagctcttgctctagagccacctgatgattgtgacacccacaggtagttgaccatttaagatatatgacaaactccatctcaactattaaatttgcttgtacactaaaattgttcgggttcggttaggtaaaaaagaagcatgtgcataaataacttatatatatatatatattatatggtatgtgagtacactttgttaattttgtaatcttgttatttattattattgttatttattttgcaattctttttgtagtgaaatgtctgcattcacaaactttgatggggcagagataggaaagcctaactacccttcgcttggtcttggaaattcatttgctttcaaatttgaggatttcaagggtcgtgtacacagactgaattgtggtgagttgcctgtagaattggatgtctatggtgggaggaaaggatggatctgctttcgttagtttgctatttgatgcaatcatttggtcttttcttctttttttccgctagtgtaactttgtgttcttcatccttgttttacaccaggtactgaaaacttggatgagttggtatctactgtcatgcaaaggataggtgctggaagtgattctaaccagcctcagattttagtaagtttcagctacattttatttttaatctctctctctctctctcacttaatggtgatttgttcggtaattgacactatttttttaaaattttccagtatgaagatgatgaaggtgataaggttttacttgcaactgataatgatcttattagtgctgtcagccatgctcgatcgataggtttgaaggtgatatttatattgcatgccatgtgaagttgatttcatcgaatctactgatctcatttaattctattctctataacctgtatcactgaaatttatagttttgatgattgtttgcttggttattgtgacagtattttttccaaaatttttattactccgaaattttaattttgtttgaatggatcatgtcatttttacaattttactttagcttttatctcttttccttctcaggtcttgagattacatctggacttctctgattcaaatcagcaaacaattgagccatcgagcacagtggccttacagacaagtggatggaagccttctcaagcaagcatttttgccggtgtggctgtcttgaccggcattggggtgctggtttacttgaagcgatcttagctgtgaagaatttgattatggaaaagaaagaaaacgaaggttgtaggatcagaagggtgatctctacagagaagagagaactacaaaacttgagagagattgttgggagggccttgtgggatataatatccatatattctgttcaaatcatcaactagagccagtagtaataaatatatgataaatgctgtactggtaagtgcaaaaagagtgaggatgatagtgatggggaagaactgataccattattttttgcttaaaaattgtgaaaagggtgaagtggggtcatttcttgtgtcaactaaagttttggaggaaatgaaagagttgtaaatctggtgatgggcatagttttgattctcctcgtatacattcttacgctcgcctggcttgtgttgctcttcatgtatggtatgcaccacattttttatattattattttattctttctgatggggggttttcccatttgaaaatcagaaagaaattagatcacaaattaacttggaaaaaagaaaaaatttaaagagaaataaatgagacaaatgtaaatattgtgttaaatttagttaaaaaagtaaacaaatgctatatttagcataagatttgcaattgtgttacaatacgcagcaatatcttaaaatacaaattgctctaaacaaata

SEQ ID NO: 189015 - DNA, 3607 bp, Cannabis indica
taaataattaggaaaaatggaaacgcttacatgtagaagatgagagagagagaaatgagtgtgtttagagagagaaatgaacagaatctctctgcgtaatttcatgaagggcttatttgatatgattttacaaagaaaggggtattattggaattttagtataagtggtgatgtaatgattgtaaaaagggtatcaccaaaaatttggaatgttcttgaatgagtgggaaatttttcaaaatgttatggggccaatgttaggaataggacatgactgcaggggtattttgggtattttattggtgggtgtgtgcttctgtttcttttatagttcaattatttataaaaatacgggtattattattgggtaccagtgacgtctaataatacttataggtagtgttatatgagatttgatatattttttttaatagaaattcaattttattaactaataacttctgctatcaaacaagataacaaaatagttaaaaacacactctaaactgaatcgacgatcaaagaacaaaatagcagtttttacaaagttatgagctattaaattagcagatcgtttaacaaaaaagatagaaatatttttcaaagtagcaagtaaatttttacaatcttgaatgactaaaccaaataaaaaaaatatatatttaatgagctctttagcgtttgtaccgcacaaagactcgatatttaattgcaccaatatttcttaaaaattattaaattaaattatatgagacataatacttaaatgtaccaatagcgacgtaatacttaagtacactaagacaccttttagcatttctcaaaaaataataatgataattatttaaaaaatgaattattattataattattatttttttgaattattatcattattattgttgaagataaggacagtctgaaaatccaaatgataagaaagttcctctttggaacttccaaatcaaatattttaatttcctcttaaaaaaatcaaatattttaaatattaataaatgtattttaagaatgaaagaaaaaaaggaaaaagataaagttggcctaattaatgattatttcatctcttttttgctttttatttttaattagttcaatgaattagtttgaaaactcaattaagatttaagaacctaaaaaaatcacaattcacaattaatgaccaaaaaaattggtttaaaaataaaaactacaccattctcattttatttgttaattatcctatttcaaataatatgactattttgcccttaaaatttaaaattagtaataatttattcttaagactcaattattacttcttctaacataattttccacttaattttacaaaagttaaaaaaacaaattgtatgtggttagaattagtagggttttgtatatattgaatttgattggtgtgtaagaaaaaataaaataaaccaaatgtaagctattcattagtgtatatccaatttatctttttacccaattatattttgccacatcaccatttcaaaagggttattatttcaaaaacatataatataggtacataaaaatgtaataaataagaagttcatggaccaaaatgtaaataaaaataaataaagctatagtatgtgaaaattaatggtgtggccacccaaaccggtagtagttaaatcaaggttaatagtttttattcatttttcatttatttatttattttacctttacttattttaatttcaacacttggcatcataccatccctatatcacaaccacttggtttttttttagaaaaaaagttatattatttttattttaatttatttttttgtatgtgactctcgtgagaggttataatgaccactagatattataagtggtggatatttgttatattcaattgttttatttggcctacattagtaacaattttgaaaataattatgattttattgtgcattaaattatttatactaataattcatttttaaattgcatgactccaaaagaaaaaactcacatccatggatcaccattggggtcttctatttcccatataatttttgttgatgataattattttcatgagagtgaggtagccagtaatattgaattgttttgaacgagtgtcgagttaaaaggtaaattttgttaagtcttcaaatttttatagcaagaatactgatgaggaggttaaacaacgaattagtgatgttcttggtattctttcagttggtgattagtgtacttattaggggttatttgtgcagctccagtgtctttgacatattgtcagcttggggcgcttctatttactttttaaaagatgtttttcgagtattttctctgcctttgtctaaaatgaagatacaagtactttcaaaaaataaacagagtcatctggtggccagaatactaactagcgcctgggttgatattgggcctggtcaccgcacctaggttaatatatattgtcaacttaggccacttccaatgacttttctaacgaagttttctggacatatactctgttttcatcaacaattaagatacaattattttcaagaagcaaacaaccatttggggaccaaaagaccttatcagtacttaggttgacctaggtactggtactagcgcccaagttgacattcaacttggtgtgcacatttccatcactcagatggaaattttgctccgaaaattcttcttatctaggtccaaaatggggggaggagcccttgtttcctgacagaagtatcattgaagtgccaaaacgactcctggaaagcccacaaataggcacccaacgctcgggttgacactcaacttggttcgatgggttttggttatccgattctagttctgtctcgagagtctgcctatttttccatcataaataagatctacaacttatggcaagtcaaatttacactttgatattttactgctttagcaaagtgatagtcacaaatcgggtagtttcgagtttcacgattttgtgaaaaggcaaaaccttcgagaactagtgaacgatttcaccataaccaaaaaattagctaagttgacatcgaacaacttctcaatcgcaggattgtcaacgtgggtgcggggtgttgaacaacctttagtaaaatgaccataactcgcttaaagatatggcgttgaacaaaaatttgatctctttttggtggtttgtgcactttacgggtctaagtaggagacaaaatcgtaacacagtggggccctgtgtctggtaggcaccatgggaggtgatatctgggaaccgtcaggatatatctttgactactcacacccggattaccccatgagggtatccaggttaatcctagcagactttttgtcttctgatccagacagcgtcctccgaactagagtggttcgaccttgttatgtatgtaactgggcttgcatatttggaagcgaagccatagcttgactccgctcatgggctgagttattaacttgatagcctagggatgggcatgccttcgctaatagtggactttggaagtgcttacatcactgctccaaaaacacaaataacatgagtcatctcaaccactagatctcaatcaatggtcaagatcatccaaact

SEQ ID NO: 189016 - DNA, 2190 bp, Cannabis indica
cgcttggagcgtcatgcatttcaataatatatattatcaaagtgtgtgaaagtcattatgggaggcaagcagggcaggtccctcttctaaacgaaatcattttttaaattccttgttagtttttagttattgtatttaataatccaattattcgtttcaaaaaaaaatccaattattatatatattttttaaaaaaaaaaatgaatccaattattataattattaagatatattagcacacacttcaatctttatattttttttttgggagtacacttcaaaattacttaagccatttttaggtccacgaacgaatgataagagatggggcccgtatataatactatttcatttcatattgattgagtgatatcaattcaaaacaaattttgtgttgtgtgaaagaaaatgagattgatgtgaagtttttttagtctcactacatccacgtttataataatattttatttaaacttcacataatatttaattcattcaactactacacgtgttaatgtgtttcacaacattgttatattaatatcaacagtttgagcataaattaggttttgtagcactctaaagttggtcatcgcctagcaaatctcatgttgacattcacttctggtcataaccttgccgaccatggggctatgtcttttatctaagaggtgttgagattacccaaaaagctcttgtctctcacaatagtgaatcacattatctccattgtgtttgacaagtctaacatggttttgaaacggggattggcgaggcttgttctaacgctggtgacaggtgttatgggcatcgtcggattggttttgctttcggctcgtccactctagaagatggtggttgagatctagtagggttgttgggtttgtcagttgttggaagtgttgtggtttgttcttgattgatgccttctgtgtttatagtggaaatactagtaaaaatagagtagtgaaagatgcaaatctcagctcaatgagcatgagtaattccattgatattcaagtgttacaaggattgatcttagccattgaagaagggacagatggaggagattatacaaaaaaaaatattacaaaagtaatgattacaatgcacggaatttgttgtaacagaattgtacaattctagaatattccttctgataaaatctccaaagaatggggagccatgtaagcagctgagtcatacaccaatggcagccaggtcacagaaccttatctcttatgaagtgaacatccaactctatatgcttagtccttgcatggtaaactgggttggaagccaatgcactagcactcatattatcacaccagataattgaaggggcagaggtgtacaacttcatttctttgaataactcttgtaatcatgtcaattcagaggcaagttgtgtaagagatctgtattcaaactcagtgctcgatcgagcaacaacaaattatttcttagaagaccaagaaatgagagaatcccccatgtaaacacaataccctacaatggattgtctatcatcagggcagcaggcccagccaacatcagaaaatccaaccaggttgagttgagtgcctggtgaaatgtgaatcccatgatacatagtgcccttcaaatatctgagaactcttttacttgcattccagtgagcagtagtaggagctttaagaatctggctcaatttatttactgcaaaagaaatatctggtctggtgtgactcagatattgtaaagctccaattatgcttctataagctgttggtgagttgagaggttctccatcagacaaggatagggattttccagcaaccatgggcatagggctaggcttcagattagttagctccactttttgtagcaactctgctatgtacttcccttgtgaaaggtatatacctgtgttgtctctaaacacttcaatgccgagaaaatagttgagtggtccaagatctttgagtgagaaagtcttgtttagtttgataatgaacaagtttagctcccttgaactgttccttgtgatgattatatcatcaacatagatcaacaacattataacatgtgtggtttcttcaaaatgaagaaagatgtgtcagctttcgaaatctcgaattgccattgtagtagggtatttttgaatcgatcaaaccaggccctcagggcttgtttaaggccataaattgc

SEQ ID NO: 189017 - DNA, 709 bp, Cannabis indica
ggaaacataaaataaaagatagatgagaagagttgatgaagaacaatggtgtgcttgaaaatcctatttttctctctagttttcgtgcctccaaaagcttctcttcccattaggtttaataactggctgtcctaaaaagctctatgcgggccgcaacatagtatggaccatgcagtggcctctgtcttcaactgacagagatcctagcgtgaataacagcgatgggccgcgatatggtgtagaccatgtcgtgacccttgtgtgcaatttctgggcagcaagctttctatgccttggcatcgtatctccaatgccaaggcatgtgtccaacctccaaaacttcaactttctgccattttttcccgaaggagcgccttggcattgaatatctatgccatgaggctacttcaactttttcaattctttaactttagaggctttaactgcatcaaaatttctcaaatcttccaaggactccacttttgccatgccaacatgaggatagttttcagaatatatatatttgtattagtctgcaacaccaaatatcaagagagctcttaactgagtctgtcaaaaaacttaacaacccaggccatctggcaagttgttatttgaaactattaggttatgagaattacacaccgcagagtttataaaagaaaaaagagaataaaaaaatcacccccctaatagttattgtatgagt

SEQ ID NO: 189018 - DNA, 4846 bp, Cannabis indica
agtataagttatgccaaacaagctcatagtataagtcgcacctagtttctgtaaaaaatataaactaatagtgtattcaataagtagatttagcctttcaaaacataaaaataataggtattttgttttgttttgtttgttttttttttttttgtttttttgtcttaaacaaataataggtaagttgatttttgaagtgagagagcaagcaaaggttcgaatcgtaaaatgaatggttttttttttttttaagtattattaaaacttaatgaattaattaattctaaatataaatattttatagagtagtagagtaccatccataagagccaattcctctatttatttgtttggtcaagacaaaggagacaatattgtgaacaaggaataagcatcatatacaaataacttgtatagttttttcaccggtaggtgctctctgtcaagttctataaaatataaagacgttgattagggatatcttgattttactaattgcagatttgtaagccctcttgttcttgtttcattacatttttcaatatttgtattgatcttttcctaatttgaattcatttggattgaagggtttagaaccggtggccagtgtggtgggactgaaaaaaggcgctttagatatggatctaaacgaggaattggaacatgcagaactatcaagggacgtagccacagcacctttctaacttggcgccactgtttcactttagacatcttgtttaatctgcacttgtacatcttttttcttttctctttgtaaaagattatagattcaattggttttttacgagcaactagtggttttcgtttggtagttttaacaagtgaaaaaatttaactcgtgagcgcactgattttcctgtaccgatcatccatatcgatgaagaataaacctaagaattgatgtatttcgcaatgagaagagtaaaatattgaaagcgaatccttgttttctcttataaaaatagaaagctagactagtcaatcaaacagaatttgaattaaaacaaaattacattaccagaaataacataagcagtaaaagattatcaaatcatcaatctaatgatgttatataatacagcaaagttcacttgggtgaccgatcatcatgtgatggccaattctgtatggcagcagcatcagcaccgaattggtcattcccaatctcgtaatcccacaaaaatgattgtaagccatgtgtcaatggcgcatcaagatcctttagttccagaaaggagagaccattgtgagcagaaatagaaccatcctcccagtttggatcccaatttagaccagccaggttgtccaagttgcccagacctccgaagatatcattatcaggacaagcaacctgctgctgagccagataattagtagcatcctgcaaacaataaattgtaatgttaaaataaacttaccacaatcaaatgtgttgcaaaccatgctaaacattaaaatagaagagatactcatttaaaatattcaaacaataccaggtaaatgctaaagaaaatgagatattcccttgattctagaaaagctgaaactttgaataacatgcttcaaacatataacaactacgaccaacagaaccatgttcatctagataaacaaacagtccaacaggattcatatgcagtgtaaaacaattggacacgtatacactctgcacaatttataattatttacaggccacagtagacttgatcacatttataaactttctttcacaagattaagaccattatgacaccccccctacaaagcataagtttcatcattccaaagttcggaactctacaagggcagcaaactaaatcacaatctacattcctaccttacacgaggtttggaatatcatactacatgcatataaaaagggcagttgcaaaatgcataccttgttaatttcatttaattggggatggtcttcttcgacaaaataatgcaataatgacaccatgtcatcatcattagtagtctcagacataacagtctctggggcaccttcaatggaaatgctctcaggagcacgggagctactagcagtatgccctgtagtcggcggcagaacatctgatacagacatgatagcaaaagggtccgcatccaaacagctatcattttcatcatcagtagtccagtcttcttcaacaaatggtgcaccgtattgggcaccattttttggtccaggaccctctttcttgaaaaccacacacaacacgtatgaatcctgcagaacagaaagcttcaaatgaatcaacaacaaacaccaaaattttatcaacattcacatataaactgtatgttcaagaagcactactaagtgagcaactaaagcgaaatatgacattttaaatttgttcatacagatcgcatctcacttattgggatcatgtttatttacccacagagtttgggagcattggtttcagagatggtaaaacgtggaatgaagctcctaaattttttggttggattaatgctatttacttaaatgagcaggactttgggaatttccttcccaaacatgattacagttggtattttcaaaagcttgtcaaacttcaaaataccttggtgcttgctgatgtggtaggcactgagagaaaaggtaagttttctgtaaaaaggttatacttatctctaatttcttctgaaagagttcattactctagaaatgtgtgcataggctttgtgttccaaagaacctgttcataatgtggcaagcgataaatgaccatttgctaactagggatcatcgcttagttgtctggtttgtgaaaatcatactgaattgcatcagcatattttttttactgtatcttcacgcagcaggttattagggaggtacatggttggtttggccaatttgattggctagtgaacataatggattggaaatcaggttatgagcatcctcaaaaagatttcttggctgctgttaaggatccaactattgctgccaccatgtattttaattggtgtaatagaaactcttgtgtttttgaggctttttgtaatttggctactgttataagctctaaagttaggtcggctattaaagctagggtgaagggttgtcttttttctaaacatagtaaaagagtctaatattcttgatataatcagaactttttagtggtttggttctgtgttgctgtgtttctcacagcttggttgtattgttttgatggttcctttgactaaaaattcttcctttgcttcaaaaaaaatatatgtacacatatgtcatacaacttagactcactttggccatcagatattgagttcacttaatttggattaaccatatcccaaaaaatcaagcctaaaaacaatgcaaaaccccttagcgacatcatattcaaaatactctaactcgctggttaaatctaggtcaactgaaatcttccattcacaatcacttgattttaacatcctataaagcagctaccttaatttatatcctaaataaaataaatagagttttaaatgctccagaaaaaagaagaagaagaagaagattttacctgaacgacgccaatgttcttcagaccctgctccatcaaagtgtactcgtgcattacccaatctgtcctatccccttttggaggtccaccagtgtggaaaaccaaagtcttaatggctcctacaacttcattattgtgtttgacatccctatcctttccagtagttttccaatagccaccttcggcggcccggttcattctttctccactagcatattttttcactcgtggacaaaaaaagaaccactttaaatccttaattggagatttatctgattcaaaataatttgtgtaagtaaaagaaaaaacagaactttacaattatccataagaaaaccatttttatgaataataatacctggaaggtcccatggagtgtacttgtaaatatcaacttcaggaatcgttcctgtcgacccttttcccaatacctttctcttcaaatagtatttcaccagttccacatccgtaggatggaaccggaatcccggtgccaaaaaccctttcctcattattaagtcactatcgccacagaacccaacccaataatctggaaataataggtggtaaaaaaataaaaataaaaaataaaactaacggtaataagctaacaaatcaagtccaatggcgaaacaaaatcttccacgagcaccaaagtcttcggttcattatccaccaaaaattgcttgaagcagagcaatttatcttgtggagatcaaaagacatctgaaccctgcaaaatcacatcaaatataactataccattagccataacaaaccctaaacaacgatgacgattcaaataactattctcatttgatcaacatcaaatcgtcagcaaaaagaatttcaaaaccctagatcaaacccagaaagggaaaaactttggtgatcgaaacccaaaatgcctaattgacagagagagaaaaaaagatgaagggagaaggagaaaaatgagtagcgatgattaccaaaaacaaagaaggagaaagggaagaagagcctaaatcgaagatttacagaaaccctaatatagttatagtacccgagaagaagagaaaggcctcgaaagagaggagacgaaagagccgcggagttagagtgagagcatgataatattgagaaagcttgttgcatacaatgttcattttataacccaaaagagcgcacttggactgagctgtttgcttctttgttaaaacgactgcgttttccccgtagagtggcaaacacgacacgttattattattttatttatattttgagatcattatttatttaattttaatttt

SEQ ID NO: 189019 - DNA, 6785 bp, Cannabis indica
tctctctctctctctctaagtttattatacatattcttcaccctttcctgtttcccctttggtatcttttgtcaatgaagttatggtttggaattatgatcaatttggattgtgaagaaattacaaaaattataataacagaatagacgggactgaattgcttttgcctttataagaaactaggtttttaattttttcaccagttccttctgaatattgaatgaagatggtgtgggccaggggatgcagttgttggttatgcatttttatggatttcgcttcatcagttgttgtatggacctggtggaagatagtaatagaaagggtttaatcaacttcctagccactaatttggtatagtgagagagaaggtagtttatgataaggccgatataaacttcaagggattagtgaatttaaaactatatgtgcctgttagtttcatgagtctgaatggttgctattcttttttcagaatatagaagcagagaagcaggttaaatttttccaaagctgtgtagctgctgcttttgctgaacgggataatgcaataatggaggtaatgattgttatatataatgcttgatagcaattcgtttgtattttctttaaattgcaatatttttaaaaggttcttttaattaaatacttcatagtttattcaaatgttacatggcttataaattttttataggctgagaaggcaaaggagaacgaggaattcatgtcaaagaaattcaatgatttacagaggaggtatttattcggggtctctctcttttcctggtgccctttttatattcatgtgctaatttcttttttgactagttctagggagagaaagtgtgttttatttattatctttgagtatacagagtacaatcgttggaaaagtagttctagaactcatcaaacttgtggatgtgcattaacctgtttgtttgaaaatttaaacgtgaagtttggtgtcaaaatttcctgtatcatgtaatttcttttgaccttgcggtcaactcagtagtaagattgatggtagcttggtgcatatgtgattgtagcattctagcttcctcaactaggcaataatcttcagctttgtccacttggggctagctcaagtggttaagtgtaaaaggtgggggcaggagttcaaatccccgctggatattaaaaaaaagacaataatcttcagctttggttcttgcctgcggttttttgtttttcttaaagatggtagttgagtttcatttttcaacttgcgtagacttttccgatacaatttcaggggttgtttctggttagatggttccctgtatatagttgtttttcattttgatcttaaattgagttttcattaaattgaaaacctttttacaattttgcctgctgctattaatgttacaggatagaggagctcacagaagaatgttctgcacaaaaaaagcttacagatgaactgcaggttagcttagaaacaaaggaggagcagaatgaaacttttaagaaggtgattgtcttgtattttctctctttaacatacagcgttgatagtgtgactgctgtgattcttttgaattttaatgtcaccaggcaaatgttttttttaggagaatggtataagattgtagattgtttccccttgcacacctgaaggatatgctttcttggcaggttgttgaccagttttatcagatcaggcaacagtctgttgatggatctcaggatacaagttgggattataaatgtgcatgtcttttgcacgatcctatagaattttggagttataatgatacaacaacaactaaatacattgtaagttttcataaccttgagttttggttttttataaaattatgcttatagctatcatcattatcattttcaggatctcttgatttgtgatcttagcccaatctttcattagacagaaaatttaattttctttgtaattgaacctaatcttgtaattgcacatacacactatggaatcatatcagttggtaaataattgcaatatttgaaacgatttagtctagtgtaaaataatgttgtttgtttttgagttgagcggttttttattcacatgccatcaagtaacttctcttcagacagagtgccttggaatcagaattggagatggtgaggaagtgtgcagatagtttccaacataagctgcgagtggtatgaataccatactgctcctttcttttcatgcaaaattgaatattttaacaaatgttcacgggttgattgtgtttggcctgtagggtttggaaattgaaaatcatttgaagaggagagttcgtgaattagaaaaaaagatggtaagtctttatttcagaaagagatgtttaccatgttttagtgcatcttgaaatctaattggcttgggtgcagatttatacagataaaatgatgaaaaagagtatcgaagagttacgcctttgtcattctgagtctcgagttcaagtcgtgaatttacttgatgatggaacatcctttatcaaatcagttgcagatgcgatagatgaaaagattaggcaatttgagacaagagaaccacacattttggagcctttatcaagagaagataatcatgatgaaaatgaatgtcgagacgtacacataaatactgacgtggatcatgatttactatctacggtaagttaaataattaatttaatatgacttttgaaattggaatgtgcttttccaaactgaattatgatgtaactcctgacatttaatattgttgatatttggggattctgaaattttaattccaactaatcctttacagagggatagtcctgacgtaacgattgataggaagagtgatgcttctgaagctctagcacaagcattgcaggataaggttttttcccttttcactattttaaagttttgtttgtgcaaatcataaatacagtcttcattatttgtttggttacagcattgcatggatttgtgtaagaattataaatacggtctctttcgtaaatttttcaggttgcaacattattgcttttgtcacagcaagaagaaaggtatttgctggacagaaatgtgaatgctgctcttcaaaagaagatagaggaacttcacagaaacctacttcaggtgttttactttttacagtgtttgtttctttctagctttcttctctgatattagggtttcaagttccattttcagaaacccaatttttacacatgattttcattatgtatgtaattgctcaatgctttgataagctgtctatttgcaccagttttctggtgctcattcatgaatcaatttgcatatgcttcttcatttgtaaattaatatgttgacttcatttcttgactgtaatttttttattggtttaggttacaaatgaaaaagtaagagctctgatggagttggcacagctgaagcaggaacatcaacttcttcgagagtaagatttcttcttgtcagagtgttgagatttttcatggctgtgtttgcttttgttttgagaattctttctgtttcactagtgataaattaggtttgttactggttatagctcttttggattgagatgtacaaacatttactgcagatgtgtatgttagtgtaaatccatcaagttacattccagttgtaaattgtaaatatttttcagtttatcactcacatcaatcagggatagattggtgctgtgtgttactttgttctgttattgttattataaccttttgctatagtagtttggttctcataacatattaatattagttcgagctaatagtgtgatccatttatgcaggaaaatttctggtaacgttaatgcagaaaaaatgttggctgatgttgggggtagaagtgttgttgctcctgaaacaggaggaagattaacaaacttgctgaagaaaacaaatttgaaacgctgggttggttcactagactttagaggacgcgagggggaatttcatctcaacaatgaagggaacttctttggcagaaaatctgaaagcatggactttgccaggtttgtgaaaaaattaagatacttgagttgagaaaaatgagtatctgcagttggtttttgttgtgcaaaactagaaattaatgttcccatagaattgtggattttcttaatctaatttacttttttattttgttgttgctgttaatgcataaggatgaaaattgaaaatgcaacacttaaagagagcatggaaagtatggagcatctgatttcttcaattcataggcttcgtctctctcttcttgtaaaggtaaaatctgtaaacttctatttattttaaaatgatggctctctaattctgttattttgtgttcttggtttgtggattagttttgttttgtcgttcttatgcttggttttgttgattacaatcaattctattattttgttttcttttgaatcttatcacttgtagtttctgctgtaacatattgttcaggccaaagagtcagagacttccacaggtacagttgctttaatgccagaatctctagatgagataatctacgaggcaaaacttgtgaagactgctcttggcagctctttaccaattagctggtctgcagaggcagatttggggttggatggtgaaggacttggcaaagagcaaggtgacatttccgggagctccaggaatgaaaagatagattttgttgctgctgcaggatttgagatggtggagctcttgatacttgcttctcagatcttgaaggacaacaccatgaaagcgactttggatgctgagtgctgatggatcttgtaatctgtttcatttggcaatgattatggtgcctaaaattccacaaccatgacccgttaagcgctgtgtgaaacggaagaggtcaatttacaagagcactgtaatacaggtggatttcatttacattgtcttgtctatagttaacacttctacaatctttgtattatgattatatttcagtagaaaagtatcctgaaaattggtttgttgcacatacaaagtggtatgtacagtgatgatgtatctagtctagagtgcagtgtatcaccaattcaccacaacagatgaatctatctagacatgcgtcacaaatcaatattatcaatattctatataaatttatatatgtttctagtaactaaaatttggtctctgttttcaaagtgattgttcgatctcgacgttgtacggtacctgtaagatgcagttctatagtatcaactggattggtgattaaaagcaaatgaaaaccagtggaaatatgaaattggtacaaaaacatggtctcatgacgatagaaaaacctttcgacttgtaaacagatgctgacacaaatcaacaatggatgcatattaactcacttgaaacctcaacaacagagtaccactctaaaacatttgaacgatggaaaatcaaacaaaacccaaatatataaggagatgtagattacacaatgagcaagaatctgatttgtaagtgtactactacaattcagcagcaatttcaacagcggcgactttctcattcaaggaattgtcttcattatcgccctcgagctggctgtaatttcctttctccttgaagagttgaatgtggtgatgcttgcagtagagctttccctcatgtgcaatatagttagatgggcttatggtgcaacctccatgagtgcatttgaaacaactcttgtggtaaggagttccattaaccgtcaccttagcaaaccaaaattaagttggttttccaacatgaaaaggaaataatatgatttgaattgaaacaggcttattaccttctcaatcggataagcagtcttgttacatcccacacacttatctttggtgcccccaaacatattcgagactgtctttgcattctgtaaaatccaattccaattcaagtgttgtttcaatcattcttactcttattaattattataacttacctcactagttggtctttctggtttcaagatcttaggagtccctaatatataagaaataagtatcagaaaacagtgtattgagttgagtagctcaagacttatattaattaaactcctattaattatgtgtgttaccttcaaaactcttgtctaggctgccagttctcttgaagagttgatcatagtgaggcctgcagtagaggaccccttcaaacgaacaatagttgctaagctgcaaaattaatcaaaaccaaaatgttatcctttcttaaataatggaaatcacatatataactctatactatgtgggcatggttaaaacaataattaccttaagggtgttcctgcagtgatggcatcggaagcaggccttgtggtaaatcctggtatcagcagttaacttatcaaccaggtacacagtcttgttacaagcagtacatttctgggttgttcctgcaaataatgtggccatttattatatattgcttcctatccaatcccaaccccaaccacaaccaacacacaccttattatatcccactgatcttctcccatctctctcttttaccctttttatttgtgagaaagtaaaaaaaaaaaaaaccaccaaaaaggttaagattaaaaaatatctgacacagaaatatgcgggttgcactgtctttccaacgacaatgatagataatttgtaaataaagtaaattgttatgactatttgccaattattatttgtccgaatctaaagcgactctactaccatttttttttttattcatgataatctctttttttttcttcctttaagtcaataactgtcacatagttgagtgaattatatgtttaca

SEQ ID NO: 189020 - DNA, 1149 bp, Cannabis indica
gtttcttcaccaccctctccactcaaaatgcttccttgtacagcggcaccataagcaacagcctcatcagggttaacacccttgtttggctctttgccttcgaagtaatccttaagaagttgttgaacctttggaattctggtacttccaccaacaagaacaatctcgtgaatttggctcttctccaaaccagcatcatccatggctttcttgactggtcccatggtctttctgaacaaatcaccgttcaactcttcaaacctagctcgggtaagtggttcggagaagtctacaccatcgaaaagtgactcgatctcaacacggatttgatgctggctactgagagctctcttggctctttcagcttccctcctcaattttcctagagctctgttgtccttgctgatgtcctttccatgcttcttcttgatcaacttgatgaagtactccataatcctctggtcaaagtcctcacctgaagccaggagcaaaaagaagcacattcaacaaaattccacggaattaaaaagagcaaatgtgtgtgaaatagaataagtctcacctcccaaatgagtgtctccgtttgtggcaagaacctcaaacacaccattgtcaatggtcaaaatactgacatcaaaagtaccacctccaagatcaaagacaaggatgttcttctctccacctttcttgtccaaaccataagcgatagcggcagctgttggctcattgataatcctagcaacattgaggccagcaatagtaccagcatccttggttgcctgtctctgagcgtcgttaaagtaagctgaacacaggaaagggttaataataagtcagccatggaacttaaaaacataattgtcagttaattgggtaaaattaaaaaagattcataaaactcaccaggaactgtgacaacagcatccttgattttctttccaaggaaagcctcagcggtttccttcatcttagtcaaaatcatagcactgatctcctcagggctgaaaaccttagtctcaccatcctgaatcttaacttgaatgtaaggctttccatccttgttcacaatcttgaaagggaaaagcttcatatccttctggacctccttgtcctcaaacctggataaaattcaagtataatttaagtact

SEQ ID NO: 189021 - DNA, 5121 bp, Cannabis indica
attgttgggcaatcaaggtattacaaagttgtggatatgagttggttctgttgtggaaatgaagagcgattattgaggattaatatggaggaggaaatttgggtagatacatcatatattttatcattttagatagttttgtattatatttagttatcatccttttcaaattagatttggttggatgctttagtgaatgccttgagagattttatagccaactgatatgttgtgttagatagaactgaagacacaaactagctgtgatccttgatagagtaaattgtgtagtctttataaatatatcatcacgacctttgctttattctttcgaggatgattaaaaccatcttaaaagaattaaaagtgataccatcgatcatgttgaggcgattttttcatcaagttaccaaagttttgccataggaattatcttagagcaaaatttggaatgatttataatggaaaccagttagatgttttgataatcagcttatagaaaactgttttggttgacagatcaaaaagcagggcaaacaagtggatatttcacagtttcgtgcacaacttgatgtgttgggcctaaaaataattcaagtgactgcagatggtaattgtttcttcaggtaagcatttaaatgatgactttattgtgaatactggggtaatggcgttatgtggatacttttagtataatttttaatgttaaaagtaaattattaaattaatttagtatatgcagaatgacagatgtatgtcattagttaagtgtttatttcatcaaaaatgttccccacgtggttgtactactagccaatgaaccgcatgtataagcttgttcaatccttataatttgcagagctcttgctgatcaactagaaggcaatgaagaggagcatgcgaaatatcgcagtatggtggtacaatatattttggtacatgaatctaggaactttcggaagagaaaagatttattttttaaaatctagaataggtgtctaatgttggagttacaatcaacagaggaatcgagaaatgttttgagccatttattgaggatgaggtcccatttgacgactactgcctaaacatggagaaggatggtacttgggctggacatatggaattagcaagctgcttctcttgtaacacgcagtaacatatgcattcacagggtgattaatatactgtagtttatgtttgtttcctcttacatttatctagatgcttctcactattctgaatctctcaaatatgcgtcatgaaagccttgtatgtactgtctatattggtatccttgttggataaaatttttcttggtttctagctttttttattggtagttaatgtactgtatgttggagtattttattttttcctgatttactttgtgctatattccagggcaatctgacttttattttattttatttttgttgtcgggaagtttcttatgtcttactcatatcttgttataaactctacaaattaaaaaaaaaaaaatcaataaaaatctcatgtcatacaaattatttatttattgcagagcatgttcccttgctgttacataacaaattatttaatgaagatcattgttttatttaatacagagtatgtcgcctcgctggtacataaggaactttgaagatcaatgttttcatatggttcatttgtatgtactctataactaacatgactttactgttcttttttacctttcatatttatattaaggagaggatatgaaatgttaggattttatatgaaatcttaatcaatgctacctaaggatcttttagatgactttgggtgcttgtggaactaaattgtttttgggttatatgtttgaggatcaacaaattgctttgatatcatgggcttgagctagggactgtagggagacattgttgcttttcataatatcataaatgtctatggtgttcaagctctgcatattgatctttgaattgtttcctcagatcatatcatgatggtgagcattacaatagcgtgcgatcgaaggaagattcctgtgagggaccagctagacctatcacaattaaggttttacattgttttctcctcatatgcattatcccctcttccatgatttctttttaatgtggataatccatgcatttagaatattttaatagtagcaagggcttaatgagttctagtttgttaaaggttgatgctgatcttaccaagaaatctgatcaaacaaaagctgcggagaacaagtggaaagggggagctggcaggaacattatagatgctggatccatcaaattggttattgctggaacaggttgtgctaatgctgaaaaagttgaagaggtgatatattgtcgccttatatacataaaaccgtatattggtgtatcaatgtatttatatatattcatgtgaatggtgtacattattccttcatgtctattgttgatttcatttataaccagctttctgacatgaggtgaatatgtggaactttgaggtgttctaaacagaagatggttttacatcaggttttactacaggtagatggtgatgtggatgctgccatagagtttttggtagcagaacaaggaacagaagagtgttcagtgcgacctgattcactttccaatgctgcagataattctccttgtaatggctggtctgtatgtttttatcttacataattttcttaagagtggttcacatatttatttcccattctaagagtagttagcaagttggaactagtgaaagcactttatctatctgatcagtctagaatgtccaggaaggaaacatgattttggtatgaagcttgagaattaaatgctttcgtgttttatttttaatttaatgcttgaatctgaaagggaaaaaaaaggtctcgtgtgcatgaggattgagtaatatgagaaagaacaatggtgtaaggaagataatatttgttttggggtcttgatgatcttttattctttcccctgttgttctgtatcacattttgaatcaggcttaatttattgttattttctacatttaagaatttcgttgaaaaaagtcacacaaaatgagatgagtacatgttatgatttttcttgaaaaaatttaaaccaatgacaatatttaaaaatttggcattattttattttttttcattttagtatgcggtgtctcaattctgtctatgcaaaaatttattgaaaaatgcgaactttctttgtattctcatagaaaatctttattcaaatggttttatcaacctctcttcatttatttatgtctagcggtgatgacaggggtgaagataaacaagcaatagaagtggagaagacggatagacaggatgtggctagcagtagcaataatcttgctcatgaaaacattagttccctaccagatgataaggttattcaattatgtgaatgagaattttttttcctctatcttaagcttgtatctgttgtctactcatttacatttatcttacatactgcagaagatctctagaaaccagctctgtccatgtggttcgaaaaagaagtataaagcttgttgtggaacagtcagtgcgaaggcctctaataagtttgtaatgtatgctattcccaacttgtgatttcttcttaacctatacataggctactaataaccacacctttttttttatggcatacttctgaatttgtcataagtaagcaaagtggtcaataaattctttagcataattaagcattaggtccttgaatttacaaaattagtacattaaatttagagggagcaaacatgctagtctaaaatgcaaatctactatatgtttaaggagtacacgtcaatagcttgttacaaaactaacggtgcacatttaattgtactgttgtgtatttacttagtttactgttctgtaaaaatttgagtatctgattgtcaagggccatttttccaatccatgtatcatcttgaaacccctttataatgtaaaaaaggtgttaaccccatcatctggtttggcttctgaacaaggataagctcaattttggttgatgaagggtgttataattatttgtcaagaaaatattctgttaatctttttccatgcattgcgtgaccgtaattataggcctagttagtgatggtattattgttgtatttctattcaccgcacatgcgcgcacacacacacataaaagggaagaaactaaaactaacaaaagaaaaacctatttggaactttgttgtatcagtagtcaaactatggactctagaaagggtagaagagagaggaagcatggcaagaaaggagcaagcataaaagttgtatcagcctgcggccctagtggagggcctcctgacatgggtgcactctgtatttgatctgttatccgtaatctcaaagtatgggaagatgacttgtgaaaacacttatgtactgactctctccttcctgtttactattgtaacatttttgtctatcatgctgttcttgacaggtcttaccacctaacaggatctcatcgctcccttagtttctgccatgaaccctgaaccgaaagagcttataataagcgaggaactttgcatcccaaacatgaacttgggacactgtaaaaaagttggaagggaaaaaaatcaactctcagagcatgctcagtccatgaattctccattgcttccaaaagaaggatactttttgtgctggttttttgagtgatttcgtgttcttttgttgatttctttagacgagtcccttcaagacaggagtgaaagagggcaaagctgagggaaaggaaagagatagatcagtacaagtgtttgttttggttaaaatagatgaaaactacatggagagagcttctagttagactttgagttgcctgtgagtgaatataccaatattttagcacataattgttattaaaacggcatttatcaattttattggtatggagatttatctcatgtactatttggtcatcttgccaacaaactttaaaattgaaaaatcacgcagacaaaacaaaattggtgtttggtaacactttcgtttttaattttttaatttacaaaaatagaaagtaaaatttagtgtttttaaagtttttagtctttcaaaaaataaaaaataat

SEQ ID NO: 189022 - DNA, 601 bp, Cannabis indica
tattttgaggtggggtatcaagttattagattagaagctagttggttggttaatagtttagagtgagctttcttaaaattagttaatgtgtcttgtaactaactctgagctaatataagtacatgtattctattgtaatcaaaacgattattcctttaatatacaatacaaatttcttccttttcttttaagtttctttactattttattattggtactttattaatttattctattttaattactgtttagtaaatatctcaccaataaattactaccatctattaattttgaaaatgatttttgttttgtttaaaataaaaaattaacacgtggtcaatctatgtagtttaattcaactttatatagttttataagatcgtttctaactatatatatgtatagttatattagatcgttgcgtatagtactcttagaaaatttgagtcctttcctataatttattatacactacgttgaccttgaagtttatatatcttctttaaatatatgtagtacaacatttaatacaacttgtttttaagcaaaaaacattaatgtacaattgcaacgatcgaagttggatataaacgaggaatta

SEQ ID NO: 189023 - DNA, 961 bp, Cannabis indica
atattcctctactagatacctattgagataaatgttcataaaatattggtctagccgagccatttgatccgaatatgaagcgtgaattaagcaaaaatgtattatacctctaccagaagtgctagcttccggggcaccttcatcaggcgtaacagtagcaaacctatccaccagctcttgctcctcattgatgggacccagatgacgtcttgcccaatctgccattatgtgcttatcctccttaatggcttctgtcatttccctcgttaacatggcaaaaatttcctccttaacctttggaggatcacgacagagatctcaatttctgatatggtctacgctcaaagacttcattatcaggccttacttttgaagtagctcggaggtgatgagatcatctacttgtaaaatgtcgtcaggaatcttgtcatattgtgcctgcttggtaaacaaggctttggaaatggggatttgggcaataggtgttgtgtaaataacagtgttttcatcaaccatgaacataagactcgcggaaagaagaactaaaagttaaaaaaagttggattatttacctagggtcttgaagtcaagatggagagttggaaccctcttcagtgggaagccggtagagaagaaccaatagtcgcaaaagtcaggcacatgtttgtaaaagctgatcttgctagtgttggtctgtattggttgggaatgaaggaatgacaagtaacataggtggtgagagtgtaacaattatattagatctaaaaccttgcaaaattatttcataataatgaaaactattaaaattaacagtgtaatcctgatcacaaatttgactattgctaagaagattaacttttagtccttcaaccaacactacattcttaagcttgggtagaccttcaaaattaagagtttccattcttatgacttttcttgctagaccattaccaaaagtaac

SEQ ID NO: 189024 - DNA, 2932 bp, Cannabis indica
ccaaaactaattacgaactaatgcatggatagctaatcactggaattgattatatcaatggacactatagtaaaactcaataaatataattctataattactaagagttcaattctatatttatagtggagtaatcatgcaattaataaacaataattatttggttgatgagactcaataaataatctaatttagtatagcttagaattatagatccatggtccccaaatcgccaccttaaaatattgttaaggatagggataaatagtagtataataatgttcagaaaaatctatattaaattggtgaaatagtaattatttatcaaatatatattttttcaaattaattaaataaggaaaagacaaaaattattaagacaaaatttgtcaagacaaaagttgtcaagacaaaagacatcatatttgtcctaaaagacaaggtaggcgcctagcatctttttgtccctatgctttttgggttaattaattatttaattaagtaaatatctaatttgaaaaatagttattgatatttcaagattattgagatattctctcaagtagttgagagattctcttataaatatccgtaattaaatttggttatagacatttatttaaacaattaaatatgatttaattaatatgatttagctactataaacaaaagtctaatttgagaaataagaacattattttacactgtaatttttaagagagaaaaagaaaacagttttctctttcaaagtgttgttgcttatgtgttgagaaatcaacaagaacacattatacactttatcctaatagcctacactatttcttatgtgtggtgaaacgatttggaagacactagtgtgagttcaaattgcattatctggactaagggataaattatacgagaagtttcgaaatatcatgataggcttcaagaggtatttattctaaacttatgatttattgttttgattttaaagtacacacatctgtagtttcatttagatatggtacaatgataagcagataatacaaaactttttttgctgcgtacctgatttagtaccataataaccaacttttatttaatatgttggatatgttcttatgtaactgatggtaatagatattgatctaaataagatccaaaatatgttcttatttaatatgttgtgaatatgttctctatgtatagtatgtctacactaggtagaagctcttcgaaaaagaaaagggtgaaaggtaaatacaaatgtgaaaatattgaggcagcactttctaaaggaaaggaggccaaactacacatttcattgcacgaggagacgggtgctccaagcgaaaaaaaatgaaaaatacttcaacaacatgtgtaaactttttgtccgcaacattatccccatcaacaagttcaggcgggaaagtgtttctaaagctgaaataaatttagtgtaggcgaattccaggtggtggtggcggagctcttagctttgcggctgggattgctttaggcttcaatgtagtgagaacggagacaaattcttcaacagttagcaattgagtgaattgtcctaattctaatattatgtttaaacctattattgataaaattatttctcttttagttgtagttggtagtggttcttattgtgtcatttcacatttagtgaatggtgtaactcacacactaattaagtctgttactaatttcataaaagcgtgtttaaattaatatttatcttagattcttaattgcttctgtaataattgatttgatttaatatattaatacacttttctttaaaaaaatgtatcatgtataggtatgatatagccgcatatgcacatacttttgtacagatttatgaatgggctagatgtgagtgggtgaaatatttttaataatataaaatctgcttaagtttagctttttaattagtatattctgttaaaaatacaacaaattataattagatggacatttatataattagtaaaatatatttggacaaaatactaatctcatatatatatatataagaaacataatacatactagaagtctactaatttcttttcaaattgtcactacctgagttggccattgaagctaggaaaacgctaattggaagcttaataataatacctttccatttttattttttttctagctacgatggcactcataatatttagcaccacgataaatcttaaactgcctaacttacatgttcaagagctggctccagctccaacgctagttacgttaatggatatattttttaattaaaatattaataaattaatcaattaaaaaaaataaagttaacatcgatgcttaatatgagttactctacttacatttaaggttgaaaaatcaatatttttttttggacattaatcccattttctgacagccactgactgcattagagttgcacttagaaatttgaagagtgacgccaatcatattacggctttgggtgcttattttctttgttttaaggaggcagccccttttgttgcctctttcaattcaacaacttctccttttgttaccttgtttttgcttaatacatacattaatgtttttcttgaagtgaggctcagagtgttcactcggatcacatcacacatagagacccaaaatatcaataaaaatgtgaatacaaataataaaatttaatatatatgctgaaaatgattgatgagatttttattacttttttcttccttcaataattgaaaaatcagttagggtaacatttttgcatatactatataaaaaaaagaggaaatcgatttttttcaattctattagatagttacgaaccaataacccaaaactataagagctcaaaactactgagaaattcagccacccacaattgtttgtttgtataatagtttttcttaattgttgcaaggataagatcaat

SEQ ID NO: 189025 - DNA, 3050 bp, Cannabis indica
gagaaatatttgaagagtactgtgatgattgaaaaggagtaattataaaacaaattctagcagtttgagtttttttttttcttctttttttgtaatcagataacagcttgagttattactgcgctttctgagtttcctttatcatagataatgagtttttcggaagaagtataaagtttttatgttaggttgcttaaccaaccatacataggagattgtgttggccttttcctgttgtgataatttagctgtttctttctgcagatgaatgggtgcagaataatgacatacttttgttctggcaagtcacgcctgacgtacatgtttttcaggtacaaaatgaaaatgttttgcaaatagcagtatttccagttgcagcatttgtgttttcttatttcttttgcgcaccttattcttggcatcttacttcaacattcttgctaactagattcgtaattttatctaaaattgagtgaacttgtcccatattttgactggaaagtctaatcatagatttcctctgttaaactcctttattagaaactatattgattttctgatcatcttaactttgttaagtagtaaacccgaaaaggttttccattaccatgatctaaaaaacttcagaacttagttgtctgggccttctttcttttttttttattcaaagtttttcataatacttgttctttcagcttaatgaggaaggaccatctgaggatttaagtggggatggacaaccttctaccttcaacgaatggagtcttcccgcaaaggaatttgatggcatgtgggaaaggttggtctgcaacttttcttttcccttgaataattttaaaatcattcacattgtgacattgcattttcaattgatatgtagcttaatttatgaacctggtctcaagaaaaggctactgaggtatgccgcaagtgcattgctctttaccgaaaagggtgtggatccatttcttgtttcatggaatcggtagggacaagtttgttgatttcattgatattcatatacactaacccatcagaatttgtataattggagagcttttttggcagtgttgtccttttacatggacctccagggactggtaaaacttcgttatgtaaagcacttgctcaaaagttgtccatacgttttaattccaggttcgttatcatttatccaatgagtaaagagtttattaagtggactgtttttccgcatctttcctcattattatttttatttgtagatactcacagtcccaattagttgaagtgaatgcacattctttgttcagtaaatggttttctgagagtggcaagctggtatgtagtaacccttacagctatgcttttgacacaagaaattatgctaagaatccaatctagtttacgtggttcatttctattgtaggttgcaaggctttttgagaaaattcaagaaatggtagaggaagaaaacaatctggtatttgttttgattggtgagattaatttatatagaacttctaatttcacacttttcttttctttcttctagctttcagtgataaatattcatggatcatggttatgctgcagatgaagttgagagtcttgctgctgctagaaaggctgctttgtctggttctgaaccttcagattctattcgggtactgacatgcaactcttctcttctaagatggttttgttctctttattattggatctgcataaactatttaatgatttttggcaaaatcattttgaacaagataaaaataaatcaaaattcacccaattgcctctcataattgggtttccaggttgtgaatgcactgctaactcagatcgacaagctgaaatcattcccaaatgtgatcattttgactacatctaatattactgctgctataggtaagttttagagttacttttaactgagtcaattgtgtacttttgaacactgcttggtaaagagaggatttggcatcctccttatcccctcatacttattttacatcctcttttgtcctttgtactcttttttgctgaattttatcatttgtagcatgagaagttttccaaaggacagcatgtaacctaacatttttatttttgtctcagacattgcgtttattgatcgggctgatataaaagcatatgttggtcccccaacacttcaagctcgttacgaaattctgagaagctgcttggaggaacttattaggactagaatattatcgagcttcaaggtatgcatttctcaccacctcatatacaccccttaaataaaaccgcttcaacttaacacaattgaaaatgtaataggattgcgatcaatttatgcttccaaactatactagtttgaaggagaaattgaatacggcagagggccaggaagctgaaacactgcagttgtgcaaacatatgcttgaagctgcagaagcatgcgaggtaaaagcaaaatatgctttaaaatgcacacttaataaggatttcctttgttaattcgaccatggatttgattttgttcttgttttctatagggattgagcggacgatccctaagaaagctcccttttttagcacatgcagctctttcaaatccttacagttgtgaccccaacaaatttttgcgtacaatgattgaaactgcagccagggaacgttctgagattgctgactgatttttgtaaataatgtattttcatgtgcggctagtgactgaattgcagcctattgtgcaagtcagttgtaatagtgatatgacatttgcaagatgaaaacacttgtaataaagaaaatgagagaaagaagttgcaatctgattacaaccattttttattacattgcttgggggaaaaccttgcgccattacagagttgttccttgctgttgacatattaacaaacttcttttaacctaaacaaagattttgttgtttaactaaaatgactagttgagttcagccaaaaaaagaaaagaaagtaattattaaaataaaagtaaaacagcagatttgctctccacagagccaaaaagatcgcaaatgtcgcgatgtttgcgtatatgat

SEQ ID NO: 189026 - DNA, 741 bp, Cannabis indica
ttgatcaaacaatgaggcaatttttattgggtttcattagcatgacatattggagtgcatgatatcaccatccaagtagttgtaaaatattacacggtgaaggtgaccttataattttgtaaacaatcacatttatctaaagagcatttctattaggcacactttctgacatgtcgcgttgtaataagctaacgatacaccctaaaaactattatattaaattatatgattattgcagtgatatatcgtcctgtttgatatttggtacatgttttgagtgtacacgtcgttactcatatgctaaaaccaacatcacaaagaatataagcaaatacttctctacttattatttcaaaataccatattatacatatgggtttgtaatatttaaaatctcctactagttttgcagaaattttaaaataatttaaatgtttaaaatacgcttcaaaataactttgatgtgcttgtagaacaagcttcaaaacaatctcattaatgtacattttataatatgctagagattttattacaatgaaagaaaatcaagacattacaattctattgtaatataatacaaagacgtccaacaaaaaaattgattaaatatatgttacaatacacatatgacttgaacaagatatataaaagtaaaagaagaagattaatataacacatgtaatataatatatatatatatagatataacaagaaaagtgtatatatatacactcactcaca

SEQ ID NO: 189027 - DNA, 1918 bp, Cannabis indica
tattttatcttacaattttttgatagtgtacataaagtctgttaagttgcaactcaaaaacacgtgacgatatattctttaacttatttaatatatagtctaataatatatcttcacgtgtttctgagttgacacttaatgataaaaaaatgtaagtcttacaacaatcaacaaaattataatgtacttttactgtcacttttttaattaaaattatatgtggaacaattataaatattaaaagaagttgttagtaaatattcttgatttagttttagaaagaaaaatcaccaaaaatataacaaaaactagcaggagatttttgtaaatttggatttgcttaatattaataataataataagggtaataataacaattatttgcgcataagacggtaagatgaagtgaagtgtggggccaaaatatgggccggcgaggcacaatttaggcccattagtaacaaaacagtcaaaacgtctggtactactactactggatttgacctcttccctttgtcaaaacttaaaccctttcaaatcaaagatccttgtttttttccataaaacctcctccgttatcatcgtctctcctattctcttctccccttgctttcttcgcttcaccatactttgtccttttcttcctcactcactcatattatatagaatcgtttctgagctctttactttacattctctgaaaatggattcttcaccaatcaatgttctcaaaacagaggaccaatccctcggacaagaaggaaagaaattttccgattctaattctgaaaaactggtggaatttgaatcggagaagatgagcgatgcgaaaatgatttgcgatgttgagattctccagcctcattctctgctcccgaagcccgaggcaccaccggggcttcttgactctccttcggtaaagaacgacatcgttttggatcatctaccgttggagaatttctccgtcgatattccagcgattggaaaatttatcagggagagaagcaatagtttctcggctgcaatcgctaagaagctctcgtcgtttaaagaaaatctcgatgaaccgaagtcgccggcgatgtctgagtttaacatatctggacttagagttgttgtgaagctgaagaacgacgacgataaaaaagacaaggaagtcatcaaaggcaggatcagcttcttctcgaggtctaattgtcgtgattgtactgccgtccggcaatttttcagggagaaggggctgaaattcgtggaaatcaacatcgacgtgtaccctaggagagagaaggagctcgttgaaagaacggggagctcgtcagtgcctcagattttcttcaacgagaagcttttcggaggtttggtcgcactgaactcactgagaaacagcggagatttcgatcggagactacgggaaatggtagcatcaaagtgtcccgacgacgcaccgtcaccgccggtgtacggattcgacgacgatcccgaggatgaagaggaatcgacggaggagattgtctggatcgtaagggttttgaggcagagattgccgattcaggaccgtctgatgaagatgaagattgttaagaactgtttcgccgggtgtgagatggttgaagctctcatccaccacttggactgtggccgtaaaaaggtacgcacactgaaatcttatcctctgtgtcgcgggtgtaccgtaacttatggtgtcgctttctgaatccgatttgttttgttgaccaatttgattttgatggcattgaagtcagtagtccattcgttacggtgtaccgcgaaaggttggaatattttcgggagtggacacgtcatcttatctatgctagttcttttgtcagttagaaagaaaaggcgatttttgaatgttttctctaacggtgttattaagttttattaattattttaa

SEQ ID NO: 189028 - DNA, 2960 bp, Cannabis indica
ttttttagtaaatcggctgctattatatatatatctataatgaaattgctgagcacactcaaattcggaataccgtatgccaaagtagaagagagagattcatatgaagatatgggtcacttgtcaaaaatcatgatcatgataatgaaagtgaaattatataaatggtggagtaggaaaaatatgttttgaagttttagggccaaatgggtaatattttcttttttgtctttggaacgaatatattcttctgatctcgatttaaacatcaatataaatgaaattttaaaaatataaaggtagttcttcgcaatcgacaaccaatattttatatgtaatttctcaacctagcttggtggaaaaaccacatgttcaaagctgtcttaaaaattatatatgttgtctttcctctcttgactagaatatttatatatatatatataattgggaaagatggaagaaaaacaaaatcatctgagttgatatacgatggatgacaaaattgggaactgagagaagttcttatcttcagatcgaacagattaattcctaaaacgtagaatcacttataagaaaacttatctccgcggggagcacaaagattgaaaaaccagaagatatatattttttttaaaaaatgaatgtatagatatgtaaatatcaatacctaggaccgctgcaaaactcatagagcttgcctcgagctgagaaaatgataagagcgacttcagcatcacataaaacggagagctcataagccttcttaagcaacccattccttcttttagcaaaggtcacttgtcgatttatcttgttttcaatcctcttcagttccacctttcctcttcccatatataaaatatatattatatagttctttcaaaataaaaaatagtatatatatttccaaattaagtatgaaatatatatattaattaacaccaccaatcttctactgcaaaactactatatatataaaatatagttccttatatattcccccttcttccttcttcttcctcctctttagggtaaagtttccaatcctcttttacttatcccagccgtacttttaccctaaccaacgcatatatttatgtataatagataattttattttgagaagagagagagagagagtagaaggaaaaacaaagttactaaattctgttttgtcctattggtataggatttttttatgtaatgaaatgtgtcctattgatagttgctgatatataaagagatgtcatatatatagttatactattagtaattaatctcagtttttctgactaaatcatcacgtaagatcacattaataaaaaagtttcctttgatcttttattataaatcttttttagttctgataagattattttaaaactcatttactacaaaatgatttagtacgacaagtctagtcctatacattcctgtcatttagggccatgtacgtgtcgatataagaatggtgatgggaccctcttgccatttcgaataacctcattttttactttcttcctcaatcttataccttcccttcctttaacgatatcattatgtactctttactctttaaaaacgtttattattgttcattaaattctagctataatagtagatcaataaataatcagtgacgtacaaacatccatatggtattccccttaaaaaaattaacatcttattacaagaaaattttagttaaattatgtcttcaaagaactctacttaattagccaccagaatattttattactttcatatttgttatttattatttgatgttttcctttttatttaattaccttaacaggacttaaactttaacttcaatgttgaataagtgtggttataatagtattatgcatgcagcacatacgatcatatttattaaaaactctaatatttttttgttaatcaatctttgaatttctcatttgttgtttgtaatttcatgtatataaatatagatatataaatatgtactgtccacaaaaaattgcagctgctttactgtgtacttagctagctttgtgctttgtttgtgtaaatattgatgtggagataattaaaaaagaattggacttcaagtttctggaccccacaatcacatggcatgccgatccaattttttgttgattccatgcacgctaatttcattgcaaatgtttaaaagaaatgacaataattacttgtaatatttgtgaaaacattgcctaactacattcaattacttactgcttttcttaatctcgtgattatttttatctttttgaaaaaaacaaaaaaccactacgtgtcaatcgtcaagtctaaataaaattgaaagaaaccaaaggggcaaaaattgattttattaaaaagtgaattgattattctatgttagtagaaattggtcagatatgtatattgggtctttattggttttttttttttctttgtttgtaattacattatatttgatcagttcagtgcgttattggaaaacacgtacgtgaagacccaacaacaaatgtatgatttatagggggacaagatttgtggttctcaaaagaattagaaccatggactgatcgaattacctgatcactcaatacctttttgtcgagtacgatcctctatgattaaattaagaaaaaatgctaaaacagcactaagataataaattatattgttaaaagtgtaattaattattggattttataatatttaatttaataattatcataaaatatcgttaatcatttaaaagatatttttaagataatttttgacaccactagtaattaataataatcaataaacaaagatcatttaaaatatatatttatatatacatgattcataatctagaaacatggtgacgtgatcaatgcatgatcaatcacctcgcaaacaacacaatacaaagaatttgatcaagaacagaaataaacaattgaaattaaacaatacag

SEQ ID NO: 189029 - DNA, 5903 bp, Cannabis indica
ttgtatgtaactgactctgtttcgccaactgtttgtgaaaatgcgtcaatggaaaacaacaacagcaaccccagatcttattgcttaaggaaggtacggatacttctcaagggaaacctcagctagtgagcaatattaatgcttgtactgctgtggcagacgtggttcggaccactcttggtcccaggggtatggataaactcatccatgatgataaaggtagtgtcactatttctaatgatggtgctactattatgaagcttcttgatattgttcatcctgctgctaagatcctcgttgatatcgccaagtctcaggattctgaggtaatttttgtatttggttgtgaaaatgggatctattaactatcttccctgatttcaagttttgtttttgaattccttatttgggttttctgtggttctgttgttgggatttttttttagttggttgtagaaatggtggaagtaggattagattgctatttcattattgtcacgttgttgtgttggaattggaaagatgactggcttaaaatgtaagtagctttagtttatttatgctaagatcctcgtcgccattgctaagtctcaggattttgaggtaatcttatgtttgttatatttggttgtgaaaatgggatccatcaaccatctgggtctttttcttttactgtgtagtgatttcaagttttgtttttgaattctttatttgggttttcagtggtttattttgaggatttgtttttagtgggttgtagaagtggtggaagtaggattagctatttcattcttgtcatgttgttgtgttggaattcaaaagttgactggcctaaaagctaagtagctttaatgtgagtggagaatacttgggccctggatattaacaagcttgttgatattgaaaatttagtagctgtaaaagatcatcaaagggatgtttttcttagtttctatttgaattcacgagaaggtttttctattttgttagtagttcatatagagaaaaaaaggtttgaagtagaatgcgacacaaaattcatgaaatttctacaattttatgtctctcgggatcatcttcattgcttcttagacttaataagaccgatttgggtaagtgttgtttatataattctccgattaagaaattttttagaagttaggtaagtaacttgtaagagaactgtttctgatcacttgcctttggtttggtttcaagtccctttaatttcatggtattcacaagatcgtaaaatgttcaaggatgataagtggcttttggtagaattttttttttgtcaaaagtagagaaccagagtgatagctcttacaagaaagaaactatgaagggcaggaataaagattgttcgatgatggttgggcatttaatgtggtgactaacagttcttgtagaagccttggaaatttcttatcatggcatggggattgcttatttcataaatagtgtcaattagtttgctggaattaagaaatagagatgatgtgtctttgggacggtacttggtgtgtgtttagctctcttatttgggctagttaccaaagtttgtagcatttttcttctcccatatctttggtactgttcttttatgtgattctgtgattgtggtgaacactttttttttatgtctctttttcaaaggtggattaggtctagtgaaattgttatatgttattgaaagatttttctcctacttttactttgtattggtaagtgcattttgatgttcacctggttccaatctttgtcaagcattctttcttttcttcactgttaatggtactcctctgtttaatctttcactttcccaaatatcgtgtgtaccaactagattttataattgctgtagtcttgacagtttttgcttgtttagttgatgtagtcttcatacaatttattttaaaacgttcaattttaatggataatgcatttattattgcaagcgtccagtgcatttcatttattggttgtatgggtggacggggatagtatagtagtgcttgtgaggaaatttctttgggttgaggtggagcctttgctcattaacattgtttaggtgtgtcattatgtgtgttcaccggaacgatctttacaaaatttgacctattttcatttcatatttttgtgtaggttggagatgggaccaccactgttgtcctgcttgcaggagagtttctaaaggaggccaagcctttcatagaggatggtgtccatccccaacttctgattagaagttaccgtgctgcatccacgtttggtaccggagtcttaccttatttctcttttttctatgagcagtggaccgttatcttttatcctgaatgttatgaataatgtatgatgtgtaggcaattgagagagtaaaagaactagccactagcatagagggcaaaagtttagaagaaaagaaaggcctactggccaagtgtgccgctacaacactctcatcaaaactcattggtggagaaaaagagttctttgcatcaatggttgttgattctgttattgcaatcggcagtgaggatcgactgaatatgattggaatcaagaaggtatttattgttgtcatctattgttttggcagtattcttgttggcctgctatatcttgtatattattattacgaaacattaactcaagtgaaaaatggactagaggaaagaagtatttttaaacttggagatcatttgatcatgaactttatttttttttccttaaatctgttttttgctaatttatgtttctttctgcttctattaatcggttgtgatcaagttttgtttaaatatatatttttacaaagatgaagaaaaaggaagaggtatattcatggccaccaatggctttaaaccccacaattcatgtcctctcgtaatgtccaaaaacttcgaattactgtttcattactctccccaagtttccagctaattttgtcatggaactatagaggagcatattatttcatgaaatattttcttaaaagttattctaacgagaaagtttgcttgcccgtctgcaggttcctggtggcaacatgagagactcatttttagtaaatggtgttgcctttaagaagacattttcgtatgcaggatttgaacaacaaccaaagaagttcctaaatcccaaattacttctactaaacattgaattggaactgaaatctgagaaggaaaatgctgagataaggtaagttgcttttgtgttatcttctttaaaattcaatagtttccttcttctaaattacttgaaggagcaactttatctcttttcttgcagacttacagatccatcacagtatcagtccattgttgatgcggaatggaatattatttacgacaagttggacaagtgtgtacagagtggcgccaaagttgttctttcacggctggctattggtgatttagcaacacaggtttttatttccttctacatttatctgtgctgatgttatctaactttcaattcttacttgtgaaataaattagtgtggacactggtgaattgtggactctcttttaatcattcctttaaataaatacaacctgggcattatcgaaccaaattgataaatgttgattcatttatcatccttgcatatatccccacttaatctttcacttaagaaccttccaacttttaagaaaaaatgaagaggagtattagtctctttcatatgaatgtttgaattattgctttataaatggtttgaaatgatatatttgtaaaacggtggttgtcctcgtgtaattttattatggtaatctatatgtatactttcattcactagcattcattcacatataagactgaagaggttgtgtcatatccgttgacagatttttgttttttttctttggtgaccagtattttgctgatcgggatattttctgtgctggtcgtgtaactgaagaagatctgaacagagtagctgctgctactggtggaactgtacagacatctgttaacaatgtcattgatgaggtctgtcctcgaatttgtcatgaacactagctagagtgcagccttcactgtttgtttatttgtttttaattaactaactctttaccgttatctggttcaaggtccttggaacttgtgaactttttgaggaaaggcaagttggaaatgagaggttcaatatatttagtggatgtccttcaggtagaacagcaactatagttcttcgtggtggagctgatcaggtattattatgtataacaaacttgggtttgacatgttatttaactgctgagttgctgaccttttatttatcttcgatacttctgtccagtttatagaggaggccgagcgaagtttacatgatgcaatcatgattgttagaagagcattaaagaactctacagtggttgctggtggtggtgctatagatgtatgtgattatatttcttttatgtacaaaaaaaagattaaaagtaatttaagtttctaaatattgctttagctcatgttggcacaatgctttatggtggtagatggagataagccgatacttgaggcagcatgctcgcacaatagctggaaagtctcagcttttcattaactcttatgcaaaagctcttgaggtatgcatttttaaattgctccaagacatatttatatctatacgaaaatatggaaattgaaacacatctttgttgaaagcttctcttatggtgttttttctctatgatttctaagtctcgagtcatgttttctaatgagtgctaagctttgggttaaattgtagcttagatattattccctttaaccgtttgaggaccaatcttgtgttactttacaatttcatattagtcttctagggtataagcaagcagttaaacttgataattgagtttggctttctctttgtggagtcaatttttttttttgttaacaaagttccaaagtctaatgttctctttgagtgtattctcattcttggtgagaggttatgaaatgtagatggaattggagaccattgatgcttacgcaaatctagaaattaaattgacacacgtttctttccttgcgttgcatcttcttttctctccccttcttattacttgaaaatttctcctcagtgattatggtataatgttgcaggttatcccacgacaactctgtgacaacgctggtttcgatgcaaccgatgtgctaaacaaattgagacagaaacacgcacttccctctggttggcattcaattgatgattagctatttcgattttgccttctaataaataaataattagtgaaaatcatcaccgagtttcctcgtgcacgttttggagttaaacctatgaaaattacatgaatatccatattttcttgtttccccagaaagtagggtagattattatagtgacaatatgtgattcttttattccctactcactgtagttttcttttaacaggcgagggtgctccttatggagtggacatcaacaccggtggaatcaccgattcatttgccaatttcgtctgggagccagcagttgtaaaggtatcaatcattctttaatcttttatgttattcaatcgttaagagacgagtttatacccatgaggggtagctcaaatgatctgatagcaattgcgtgagacgagtttatactaaaacaatatgaatatgaatgaggatgattttatttccttttctttcgtagatcaatgctataaacgccgctactgaggcagcttgccttgttttgagcgtggacgagactgtaaaaaaccccaaggtaaaccaatattgcacttcaaatttcaccgggcatgttcctctttctctacgtgtcttttcagattgttgtttctgttctaaatcctgctaaatttatggcacgttttcacccgagaagtccttgtttttctttttatttt

SEQ ID NO: 189030 - DNA, 1150 bp, Cannabis indica
agaactgtttatattcagatttataataacttcactgctgtaaatttatcctaaatctaatctggtaactatgaaaagttgcattttctctatatggagttatggaggagtactaagaatattgtgttttgattatcaggagcattaataaatcagaagaagatatacctgtgccacctctactcaaaagtgcagctctttggggtatgctcaactttacctgctggacttattatggcttatctagcttgttacacttagtcagatatgcatgatttcgtcgcatgtttaatgaacaattgcttttgtatctatagtggtttctttccccaaacacatctttagcttttacacagttttatagctttgactgatgcttttcttcattcctcgttcgtcccaaatttggaggtgtgttcccttgcagtttcttccaacacccgatatcagattgtcaatggacttgagcggttggtagaaggctctgctatggcgaagcaggttccacctgtagctatggctttcactgttggggtacggtttgctaacaatgtatacggtgggatgcaattcgtggattgggctaggttgagtggggttcaataactgaatggtgtgcgtttagtatgtggtttgagaagaggatcatagaaaactagaagtcttgttgttttcttgagtagcatagtccatgaactacatgaagctgatatttagaaagttgaatatggtttatgtgcttaagatattgtagaacaaagcacataagcatcatcaactagaacaaaagtggctgccttcttataatcctgataataaaaggaaggtgaaatttcattatggcaggcctactattgctccatatggtaaatgtcaattccaaggcaacaataaatcgatatttttttaaaaaaaaaaattacaaaattaaattttcaaaaatactttcaagttttaaaattacaaaaatgatatgttttagtaaaacaaaaatacaactatagaacacttagaccacaacaagaataactataaaataataaaaaggcaactgcaaagtaataaaaaaataataagatactaatcttattataatatgcaaattaatattaacttcttgtttttgtagtttttgtattacgaatttttt

SEQ ID NO: 189031 - DNA, 1498 bp, Cannabis indica
tctcagccgttgattgaggttgtctgaacagtacttgcttctgggaattattagaagaagataatgagctcatcaaaccaaaagcattgccattaaaagatgttggattacttctagtggatcccatttgagctgctttttgaagaagagcagtggctgacatgtgtgttggaccttgttgttgtaactgaatattgttgttgttgttgttttgattaagcagagaagaagatgaagaagtcatcatactattattatcattattaggaattgtagcagtagtagttgttgtactactgttgttattatttcctcttgattcttcctcttcctttagccctcgggacaaagacgacgacgatgacatgttcatccactgatgttgttggccgaaaatgttactcgcagctgcggtttgcaacaacatttgatgatcatttggaattggtgtagtcatgaaaggattaacattagtactgttcgcggtcgggtctagccaaacaggcaacctagaccggatttcacaagtggtatcagagccgaattcaggtgaaaagataggcgaaagctgatgcgtaattctgttggaagcggttataactgtttgatgaggtggattattgttgttgttgatgataaaattggggatattagttgttgggagtgttgttgtggttgttgttgtaccaaaacgagcattttcttcagctaatgcgtcacaaaaagctctgtgtgttatgaaactatctttcctgtataaatataaacacagcatttaattcagatatataaatatattgcttttattacattaatccctatgaaagcttatagcattaaataaaattctacaaattaataacatagaatgaatttattactagtaataaatgttatgtttggtgtgattaaatttatcgagaacaaaaaaaaaaatatttatacctggagaagagtgttccacaatcgcatttatactctctagtcccacaaatcttggtatgagctttccaatcagattgaacagcatattttttggaacacttctcacacttccacttcttctcgccgtgttttcggctgaaatgttttttaattccggtgaggtcaccgagggctcgagaagggtcgtgatgaacacaggtcttttcggggcaaacgtagacctttttccgaataacatctttgtttgatctttgacggagtttccatggaaggttgtgtcctcttcggtgaagctgtagattctggtctctctgaaaacccttgttgcaaatctcacaaaggaatctgtttgttgccatcagagactttggagataaagctatcacttctgcatctggatctgaaattaatttcataaataataaaaaaagagaattaaaaacagtacttagatatcaagaataaatatgatcagtatatatatatagatatacttgcctggatttcctggtaagtttcttttcttcttggctgagggatttgtattattatt

SEQ ID NO: 189032 - DNA, 3189 bp, Cannabis indica
tttttttttttttctattttgtcgttttgatttgtgctcttctgattttttttttctttcaggaaagctgtttggatagctggaaatcgagggagaaagttttccggggattttcttggtaattcggtagtctgaaataatttttgaaacagtgatttttatatacgaaaaactgatttttgctgtgatatttgggagatttggagcctgaagtttgttatgaattaaattcatatggagaataatagattgatggaaattgattgtgtgcaaaaatcagagtttggtttctgagaatttggttcaggataagtgggattcttatttgcatgaacctctttttgaagattgttgttttttgattttgtaaagagaagggtatacttttttaaagatttgttaacatgacagagataccaaacaggaattctttgatgattgaagaggaaagagaagtacatactaatcataatagtgtgaggtttgagggtagaatgaatgatggtcgtcttagattgggatcaagtgattcatttctccctggtcttgttgatgatgtggctttgaactgtcttgcttgggcttgtagatctgattatgcttcattagcttgcattaataaaaagtatagtacgttaattaatagtgggtatttgtatgggttgaggaaacagttggggattgtggagcattgggtttatcttgtttgtgatccaagaggttgggaggcattcgatttgtcgaaaaagaaatggattacattgcctagaataccctgtgatgagtgtttcaatcatgcagataaggaatctctgtctgtgggtagtcagttgttggtgtttggtcgtgaaatgttggattttgctatttggaagtacagtttgatacgtcgtagttgggttaaatgtcagggaatgaaccgccctcgctgtctgtttgggtccggtagtcttggttcaatcgccattgttgcaggggggagtgataaaaacggaactgtattgaaatcagcagagttatatgactccgcaacaggtgagtgggaaatgctaccgaacatgaaaaccccgcgaagattgtgctcggggtttttcatggatggaaagttttacgtgattggtgggatgtcaagtcccactgtctcattgacttgtggagaggagtttgatcttgagacaaaagaatggaggaggatagagaatatgtatccacaggcgaatagggcggctcaggcgccccctcttgtagcagttgtgagtaaccagttatatgcagttgagcatctcaccaacatggttaaaaagtatgacaaggttaacaacacatggcatgttttgggaaggcttcctgtgagagctgattccgctaatggttgggggctcgctttcaaggcttgtggtgaagaacttctagttgtgggtgggcaaagaggtcccgaaggtgaaagtattgttctcaacgcttggcgcccaacttcaggcgttgttagggatggcgttttggattggaagattcaaggtgtgaaggaacatggtggtgtctttgtattcaactgtgcagttatgggttgttgaagtaagattctatatttttttttttctcaaaaaaagaaaagaaaagaaagattaacacaaaaagaaggaaccagtttctgcaatctgacctggcccttttcgggttctatcctctgtgtattggattgactagaattaatttgttgatgaaatagtgtttctctttggttggggatttggtttccttttctcttaactttccttgtattgcatatgtttctttctttgcatcctacataagatttggtttctaggaaatcaaaatagggtctcgctctcttgtaatttttgtgcttttttcttttatatatttcaagtttcttcttttcacctttttgtttatttttcttttcttggtttcaatttatgaagcttgatatgctattcaccattctttcacaaatatgtctaattgtctttcaattctagtgactaaactacttgacccaacttgttggtaagatgtgtttacatttaccaccgagcgaatggtctagtgacaaagtgcttactctcgaatctcggtggctcctttgcgagtctaaccgcttaattagggctcatgggggcgactcgcttcaaagggtcttggtgaacatttgtgagcggagttagatatagttatcatcttcaaattatcagcctttgaaattgatttgatttttgtttcaacaaattgtcatagagatgaatggagcatatatccttttgtcaagtattattctcttaagagcatttggaatttaaactttccactaataatttggaatcaaagtacaaaacatagaagcaagtctccataagtaaagaggttcttattcttgaatctgaatatttctaatttgtcatagtgttttcattggattctatctttgtaattaaagctttcgtctataaataaatatccactagtaatggaaatgcctacctaattttcttttttataaatatgtttattttttctgcaaagagaaaattgcttggaattgaaatatttgaaagaaaaaaaaagcttggttaaaaaatcatattcatttgttagcttcacctaaaaatagagatagaataggggacatttgaacctccatctacaactaatgtagagtatttgattatgttttctaaagtattaaacatggcaaaaaaaaaaaaaaaaaactttaattaatagctattacagtagcgtttggttggaaggatgaaaatataggaatagaaaaataaatagaatgaaattaaaattaaaatgtgtaaaaaaattattaatcgtttttctcatttagtatgaaataattttttttttctatttcaaaatggaatagtcattctactaaaatgatggaaagtatttcaatactttaaaatacaatcaaacatattggattgtcattattaacttttatgctattttagtagaatgactattcattttgaaatagaaggaaattttattccaatgcaatatgaaaaaaaaaaaaaaataatttttttattaattttttaattgtattttaaattttattttatttcatattctcattctcattcattagtatctttaaagtcttaatctccataaaattaataataaattaacaattacaaatgttaatac

SEQ ID NO: 189033 - DNA, 2183 bp, Cannabis indica
tgtgttaattgtgcattctaattctaaatcatataattaattatttcaatgtatcagtaaagacttcataaagacaaccttcaaaaataaaaaaaaaaaaaatctgatagagcaggatttttattttacattgcgctccaccaaattatgcttaattagtggcaatcatgactttttgttatagctgagagatcttatcaaatgggttgaccaatcttaattgtggaccttaataacccatgttcctatgtacgaaacagtcgagtccagttcccctaacgggcccacaaaatcgaccacgttttgagttttgctaaaaagagtaggcccatgggcccatgagggcccaatctgagatagaggtagtggagtatgttggggtacacgtgaaagacgtatgggactactactgccacccaatttggtatgtatgctcttttcttgttttacacgtggcaatgatgaggaacagtcagcatgtctaatcagttgacacgtagcagtgtgggggtgtatctaacggtggaaaaagagtgagtggaggtttggtggggtctcatttgaattcacctaccgacaaagactcagaggattgttatgggaaggaattttagaaattaaggtggtggactatttattttactatttaataaattgttagtagtgttggactattaagtacttatctacaacaaaatcatttctctcgatttctacttgtatctttcattcaaacccttcttcagctcttctatttttatttttctaaaaaaagaaattaataaattaatttgttatgccattcctcttcatcatttactcttttgaaaaaaaaaacattttgaggatttgttgatattttgacctctgtaaaaggaggggtaggaagcatttataatgtttttaatgaaaaaaaaatattgaataggatggaaagtagaaaaatatattaattagattggcattctaaagtaaacaaaacaagagttgttaaaaaagagagtaatatgtacatatatacagtaaaaatgtacatgtaatgtgtatatttagaacaaaatatagggagctatagaatagaaattaaatgagcacataataataatagtaataataatgataatttatagtttataattttggatcacaactgccacatgcttctgtccctctcaaacactgtcatgttgggtcttcaatatacacttgttgtatatgcttcgaatggtggcaaccaaattaaagaaagaaaaaaaatccaacatttttatagtgtttcaatccaaatataaccttttgttttaccaaataattaagattcaaattctccttggtgtgcaaagttagggttaaaatgacaataattgttgaccttgctcttagataattaaactgggaaaaacgaatgataattgttaaataaattaagcaataagaacacagagatttatagaagtttgatcctataattatagtaatagtctacttcccttttttattgtattacttgtaagaaacgaaacaaaaagttattgatctctctcttgaaagcttataaaattagcataagagctctctttacgctcttgaataactgatttcagatccttaaatagtgaaataactccactatttatagaaacattcgttaggtttcccaaaacaaataagagataaatggaaaacttgtttactttcctaaaatagatcaaactaaaatggaaactaggaagttttactcttattcccactgaatcaggaatgtgatcgagatttgaatgcttgaatatttatggaaagtatctctgaagatatattctagtcgcttttgccctgaccagtgtagcgaactggctgcaaagttgatgttggtcaaacaatgtaatatatcatgttcgaatattccaacttattcttcaaacgatgtttgtgaatgataaatcagcttggacgacatatcatggagcttaccgctcatccagattataaaatgttctcaacttttactcatctaaataagtgtcacacgtcaccttgtataaaaattgcaattacaatgatgtatgtcatagttaaatacatatataaagacgactactttagtacgatatcttcctaatcatatatactgctttagtaaaaagaatattgtaaattttaggtattttttaagattattttta

SEQ ID NO: 189034 - DNA, 4998 bp, Cannabis indica
ccataaacccatgacctttccctctctctcacacccacccaggcccgccgttctctcctaggctccctcacgcccccaaccggagaacgcagaccacgacggatcgccggagcctcatattttgagctggtaatcacttatacccttcatgcctccatattgtatatatttttgtgctatatatgtatatatacatgtgtgtgtgtttattttctaaatacctcaccaaaaagaagttttgaactaaaaaacttgatgtattcgccaattcctttaatttaggcatataactaagttgttataggttcctaattttattcacttcggaattctttccaactcagacctctctttttccttgccttgagttcccagccgtccaccgccaacgccgcaggtttttccaacggcctcgtagcttctgaaaaacagtaagtgatgtttgataattttggccatattgatatattgaactattgtgctcaatttccctttgtagtttctaaaataataataataataataattttcccaaaggtttacactttgagttgtatatgttaaaaataggtggattttttattgaggaagtgtgttaagcagaatatgtataatttatttgtgcaattgtaaaataataaaaaaaaaaggttcttggataaacaaatgggttgtcttatttttgtttttaatatctgggtttgtttgtttgtgcttgttgaattgagaaaattctgaactagagagtgaaatcatcagtgggaactgtcgaaattgctgcatttatggtttcggagttcttttacaagttggagataatcctttcttttaatctaattgctctctttatatgaatggctttggtagattctaagggagcaaatgaagcacctaatctcggctttcaccccggacggtgattacattgcaattttgtcctctaatggaatagtgaaggcaagatctttttatccctttatgcacatcaatttattaaacatgtatattgcacgtgtgcatatgcttatttttatgtgtgctacatatgtaactagaagaaaaaaatgtttaaaatatatgctgattttttactttgaaataaatgcttagaaaatgggaggtttggagataaaaaattatgtatttcttatactttgaactggtggagaccatgaaagtgctttcgaagtgcatacaatcagaagtttgttgtttagaaatacgcacagaaaagctaatagtagacgtgtatgtctctggtttgttctttgctccaaggaattattgtgcattgccttgaacttaattttcctataatgatgggaagtgatcaataatttcagatttggagcacgagtgatgggagcttattctctgagtggaagcagttggatgaaaatcctggtagtaagttctcttgtatgggatgcagttttgttgggaaaaaggtagtttaagactcaaggaagccttttgtttattaaatttgttacttaattgaaactaaataatcccgaagtctgatttttttactttcaaatattagcgaagaaaagtgcgtggtaccttattgttagctctcggctcaagtgatggggatgtctttgttgttgatgtttcatctggagagaggaagtgggaaactactggctcctttcctgggtatgaaagctatttttttcaactaatttgtactattagcacctcctgagactttattaattggcacgaagttgttgtaactaataaattcaccttgactgtaattaggggactgaatttaaactaattttttgtactagatttttaggttgacaagtatctgttttctatattcattctaagttctagtttccaatggttgtgagttgttcgttataagcttacctatgctgactcaacttaatattgaaaactacatccttactgcagatgaagaataattcatttcatttattaatgtacacacaccaaacattaatgtatgaacaatatgcatgtatacaatagcaaatgtaaaatgtagcatacatacttcagatttcttttcttactcgtaatggtttgctacagtagtcgcgagggactcattctaacccaaaagggtagctcaaatggtcaggtatgtagtttgctcccataaggtttgaggctcaagttcctcctaggtacttacatagccaattgctatagttttcctcacatattgtaggggtaggggttgatcctaattttaaataaaaaatgagaaatgaggcctcattctaaaggtttaggcatgtaagtatcagaggccttctttgaagaaactgcttgttttgtttgtcatgaaagaatgcatgatttcatctgcacaataatttggtcaagatactaattcagatgaactgatagttttgtacatgtatttctatttattttttttacagtggagtggctggtttatcttttacaaataaaggtcgtagtctgcatgtggtcggaactaatggaatggtatctgaaatgaactcagaaactggaacgcctttactagagttcaaagcttcaagaaagcagatatctgctttagctttttctagtggttagtgatcaatgtattacgtgttagtttttccttcacatcactttgttatttgacttaatgatatttcatttatgtgccagatgggaattttttggctgtagctgatgataaaatatgtgtttaagtttggaagatgggaaaaaactttcaaagttttctaatgagatggtaagattactaaagcatatttgtaatgggtagtttcttcatctttaaagttcaaatactgatagttacacttatgctccatcagggccaggttcagtttgcttctatatctgatgatgctggtgccctaattacgtcaggctctcgagataaacatcttcaagtatggagtttggataaaaatagtggtaccgtgagtcgtggctctgttctttctatgaaacatactccattaacttttcaatgtaaagatggatgcaatggaaaacctggtttgactgtcttggcgatctcaaagtcaggtgtagcttatgtgtggcatttgaaatcactattagaagatgaggttaatccaattaaagtaacatgtaaagtaaatgaagatgaaaaggccctacaaaacggtgaaagtgtgaagaatagtcgcgtttctatttttgctgcaagattacaaagtttagatgctagcaaagatatgaaagcgctcgtagcttttggttcaattgatcacccccagttcagtcttgtggatattagtaaatcagggcaggatgttgtcataaatgcttcagaagagactacaaacattttcgaaaatggagttgcaaaaggtgtgataaacttttttgtttctgttgtcgtttgactttttctgacagcgctgaaaaacatgtattttccactctatttatcttttatgtttctaaaatttacttttctaatgttgacggtgctttgagagaaaaggttgccatagtatttttataattcgtgaaactttagagaaggttggcctgattctccctatattttttagattttttaagacattgataattctctttgtgaaaatagttgaccattcaggtagttgtaatttattttttctgagtaatctgagagaaagaaatgtgaagagtatttgtggagtaatttggttaatttcattgtagacaattttatgtggattgcaagtttggatcataagatcatcgttttagttatctgcatcgtacataagatcatagaatgtttgccatacttgcttagtctcttaaacattgtggaatgctttattacagatggtttgcagccagaagcaacggtttcaccaaagaaaaataaaaaagcaagtaagaagcgtccagcatctgaagcagatcagtcaactacaggagacatagttgatattggtaagaaataagaatttacttgataggatgaaacactttaggttgtaatacgggtgcaggcagtctttcatttgccatgccgtcattactatttttgtatacaattcccttaccaaggtggaatccgcatcttttgaagaggggtttcgggataacacacttttgttcacctcacacaggaaatctatttgtcataaagctgaatattttgatgtacaaatttgagttcttatcattcgtttatcatatatgccagaaacttgtgttcaaattgagaaaatgtgaataattgaggaacaaagtttcttgcttgtttgataattgtaggtcatggagaagctgccgacggagtccttgttgatgacgatacaaatgagccaaccatgggagaaaaacttgcgggtctaaatctagcagaagataatacagcaaagagcaatgaaattgacgagtcttctgctattgttaagcctcctagcgcagattctgttcatgttcttcttaagcaagctctacatgctgatgatcgcgctatattgttggattgcttatttacccaagatgagaaggtatctatctcttcatgtcttaggctaattaacattagtggttgttatcaaattattgccttgtaaatactcataacacaatctctgatttcaggttataacaaaatcaatctcacagttgaatccatcagatgttttgaagctattacaatctctcatatctattattcagtcgaagtaagaacttaacctacgttctactcttaaatgattttaaatataatggccgtctctcatattatcccttatcaagtatcacttgcacaatataacagcctatttggtcataataatttaactgcttttattactcaactcaggggtgcagtcttggtatgtgcacttccatggctgagaagcctacttcttcaccatgcaagtggaattatatcccaggaatcttctttacttgccttaaactcggtgtatcaggtaaattattatcagaaacacatgtgaagaggggtagctcaaatggtca

SEQ ID NO: 189035 - DNA, 1161 bp, Cannabis indica
agtgtccatacaaatacatacgtacttctttctctgtgtcctgtttggtgataaatataaacttattgtaccttcaacttcaacagctatctatatataataaatagatatatatatcaacaaaaaaaaaagaaaaaacagagatttgaggttattatttcgaaatagttgaatttatcaattacaactgtgtaatcacaaccgaaaccgatgcaatagatcgttccttgaacaaaatctaatactggctagtctgggatgtctgtttcggctaatcaaaatgtgacacgtatactctcagtgactgctggtaaatagttgttattttgtaattgagatgatcagagtcatggggatcgattcggtatcattgggaaagatatttatatatataaatcgaggagtgagttgacgtagtacgtactactactactactatactgcaaatataactgtgtgtgtttattaaaatgtacgaacaataattcttgtctttgtcgatcgctatagtgtatagtaggcgtagcggtagtactactgattatctttaaatttcaaaatataatattatctcctatatttgaattgaatggtatattattaattacatgacatatatatgtattttatatgtaactaagtccgtccgtgcatgatatctttcaatttaaatctctattcggtagtgtatcgtactttttccctagttcgaaaataaaatataggatatactaaaattatttatttaagaaaaaaaaatgaagatgataggatgtgtggtgtgtggagtataatattataggtagtagaagtttgtaatattgcgaaagctgtcaaaacagagccgcgccgtacgccgcttgtctggactgtgatgaccgtgcgggagacggtggagtagttaagtcagaataaagataattaatttagttttattttgtctattaacgtaagatattatatatactgacttcaattatatcagatattacatttaatatcactcttaaattaatgctctcataattttatgtattaattactatactttttaatcgaagtattaattggtaaattttaggtgattttgttgttttctgattgagggattggatctatagctagctagctcttcagctccaaatttaaaaaaaaaaaaaa

SEQ ID NO: 189036 - DNA, 4372 bp, Cannabis indica
attagaaggaatgggttgtaggagggatgcagatctcctttgtatataaaaaatattaggtgtgaagttaaagcgatggataagaaaaaatattaaataaaactaacaaaaactatccttgtgaatatatattgagtattactattagttatcagtggtgtttagcatcttctcgacgtgtcacgttgtgattggctagcgatacgccctaaaagctattatgttaaattatatgggacctgatacttagttgaaccaatagcgatattgacacataggagagtactaggcaccactggtaccctttaacatttctcatatatattagtcactttttagaaagattaattagttgtattattttttttttcttttgtctttttctaccatcttccaaaattaaatggattggaatttttttaagttaagagggagaatgtctctctccatccatctctcatcttcctcttaccaaacaaaagatttaatctctaccaaacatagcgttagggtttccattataatatttttgttacgtatatcaagaaagactcaaactttgaaataatcatagtaattacaaaacaataaccatgatttttaagatatacaaaagattataagaaaatatcacttttgcattaatttgaaaaaaagaaaaaaaaaaaagaccaaaacacctcaaaactgtgtagtgacctttaacatggtaattgcatgcaaagcaaactatatatacacaacccatatttaccattatatataaatatatagatacaattattatatagttatagcttgttttttattataatcattgttgtcgatatggtcaccttgccaagtccaaacaatgtctttcaacgccggtctaacgtcttcatcacaaaacttatcgtactccaaagtatcgccggccgatttcgagaactcaaccactgagacttccggcgccacttcaaaaacctcagctgtcacagaaagcttaccttttcttccctctgaagctccctgcaaccttatctggaaatctttaagcttagcaaccttaaagctcaaacctttagccacaaactcaagcttcgccattattgtagtcgcggaacactttgacgtgaacatcgaccctgttttcctcttgttctcaaacaagctcgaaaggtcgaaacccgaagacatcgatgaaataaactcgaacgcgttgaagaattttggtgaagaagatgacgaggaagacgacgtcgttttattaacccaatcttcttcttcttcttctgattcagaaaccagagtggactctgttcgggtcgaattagagaacgaaacggatcgggtaaatcctttatagaaccacgggacccgcataatacccggaatagttatccttctattcgggtcgggcaccaacagtttgaacaccaaccgctttgactcggccgtaaaccatggcggacattcaaattctcccctgaaaatcttccgatacatcttcatgatgttctcatcttgaaaaggaagaaacccagcgagaagaacgaatagaacaaccccacaagaccaaatatcagccttgggaccatcgtagccctttttccggagtacttcgggtgccacgtaagcaggggtcccacactgtgtgtggagtaacccatcgtttcggagctgttccggcaaagcagagagtccgaaatcagagatcttgagatctccattatcgtccaagagcaaattctcaggtttcaaatctcgatgggatacacctctgctgtgacagaaatcaacggctgagatcaattgctgaaaatatcgacgggcttgatcttctctgagctttcctctggcgactttagcgaagagttcaccaccacgaacgtattccataacgaagaagatcttagtctttgtagccataacttctctgagttgaacaacatttggatgacgaaccatacgcataacagagatttctctttggatctgatccatcataccttctctcttaacttgttcctttttaattactttaatcgctacactttcaccgctcgccatttctttcccgtagtaaaccttagcgaaggttcctttacccaataatcttcccatctcgtattttccgaacaacacatgtctttcttcttccatacttcaatttccctttttgtttaatatgattataaggtgtttggtagtgaagttacgatgatcaataataagggaatccaagataaaacagaggagatactgatttgaatggattccatgaaattaaagagactgacaggttagagaggataatcattaactgattcggatggagatataaaggtgatgaagaagagaaaggagggctggccagcagccattggagcacctggtttttttttttggctctgattagactctgaaagcacatagaatgtaaatggctatctttatatttatgcataaatatatcttattattatgaatattgttgtaattaaaattttagtcctatataatttaatataattattttttacaagataaaatatttagagatattaggtattactagtatccaataataatattttaataattaaacatatttaatgctgaaaaatattagatgtgataaattaagtaaatatagttacaaattctatgtatttaaatttaataattattataaaatattaatattaggtatcattatttaggcagtaatgctttaataataaattacgatatttatgtaaagaaatttctacttgacctatactatagtagtgtcatgcaactacaaccaataatacgaaaaattcaacttcactaatatacaaaaataaaataaataatgatagaaaaaaatatttttatatcaatggaaagagagaatgaaaaaacaatagtaagggaagtctttaatttttaagttaatattatcgtgattatataaatttaatttaattttctcaatatcacattaagttgtgtcatgattctcctactaaataatttctcatattataagaatatattcattaaataaaatatatgacgtattaatataattgaactcgttttaattagtttaatttagtttttatctaaattaatacaagtagccaggtacctcaaattaaaattataagaatattagcaaggctcttgatataattatattccctcatcaacatcactaacctatataattgacatgaaaaaggtaataaatatattattttgtttaatgtttttttttccaaagataatatactaattaagagcaactttaatagataaaactcaaacatggtgttggtttaatttcaaaaagtataattttaacactaatttttttataattttaaccataacaccaaaaattacactatatatttttaattattttattattttatcaaaatttaatacatatttattcaaccaaacttaattattgatctattatttaattattaaaacttaaaaaaaaaacttttatcgtgatctacaatgcttaccaaatttagtaaaatactgtagatatatttatatttggggtagtgtccttccgtttggattgaaattagtgttccacactatatatttaggaaattaagtttagagagtttttgataaaaaaaaattatagagtttttatagaaaaagaaacaagtaaaagtgttaaaaagttaatctagttcacaagttattatattttacttgaagagtgcttgtaaaatctcaaattcatttaagattgcaaaatagacaaagtttcgactatgattcaatatgttgtgtttacgcaatggctaatcccgtgattataattgtgcacatgtgattactctaattatatacttttattaatcaatttcattttaataaagaaaaattatgttttaaaacttataatgctcttaatagtgcattgcaaaaatcaaggaagaaaattaaaaaagaattataatatttatatatacatagataatggtgagtgggtgatctattatatcaactcaaagttgacactaatagttatattatttttaaaattcagacgtacaaatgcccataaattaattagtgaataatctaaattttacatttaatactgcatttttaactttatgtatttttgtaccaatcttatatatttaaaagtagggatttatatgtaaaaaaatataaaataaagttaataatattacctatttcagaaaaaaaaaaaaaagaagaagaaaaagaagaataaatacatagtaatttttttagaatttaatttatcgtaaacatcccaacaaaaagtaatagctaattgcttgattagtaaatatttattaatatacaaaatttagttttatattatacacgcaac

SEQ ID NO: 189037 - DNA, 3778 bp, Cannabis indica
gaccagcaactagtttattaaactgaaatgaaaagcaagcatggcatttgtaacctaatgataccaatactaaatggcctgttaggatgagagattttggtttgttgacagatttttactaattctgaaaggttgttcaagataagatataataaacgtggatactagttactgcaaatcatgtaggcaaacccctcaaaacccggaatccattataatcaagctctatgttagttgacaatccatatttgggttgggaagccaagcaacacaaacaggtaaatttactaataacgcaaacaatagatataatgatggaagcttaccagggttgattgtaaaagtcagaacgccgctccttctctgcatttcgactggcatctccagcaacaagctttaaatctttgctctgagaagctatcagagtgttaataaactctgctggagactgactgaaactaagaaagaaagcccgccgcctcctatgttcatgaatcttctttatagacgcagatatcagttcatcgcaagcatcaatttccttattattctcagtacgtgccaagaatgaagacatttctttatccagagaaagaggcacatcaaccagcacatcatagcaattagttccaactggacaagttcccgaaagcttaatcttatgttccagatgtatcggttgtggtggagttaaatgctgtgctagcttttgtgaaactgatgtaaacttcatcttctcatccccaaacactttttgaagaggcggatcacacatgaaagaagtagggtcactggggctctgtaattttctagatttaacataatgccaaattgcagctatgatccttatgcggctatctgcctcaattccaagaacttccttcagagctggggaaagtttaaatttttctggcgtgtaattcatttctagcctaattgctgcagtgaactctttattccctattcgcttcacttcaaagccgtcgtgtagagcaggcgaacgagcactatcccacgtaattacatggctatctggataaagattattgtccaagtatatagttattttcttgaaaaaggaagaaaactttggagtcaaatttggggtcatgccattgccagcaactacaggatctttcccatcttccaaaagcctcccaactatcttaagtgaccaagaaggaggttctgcattattgtgttctgcattattgttctcgggtataggctgcgtctgatttacataagtgttgaatacgtacattctgagtgttttctgaaaacgtggagatattttgaacgactcttggatgtcaattttctttcttgtcaaagcagcatccacacgagcctcgaattcaagcaactgagtataaagcgcagactcgggcaaaaggtctgccaccttctctggtatttgtttatcaggtagctttcgcttcttcctccgagcagctggggtcagctccattgttttaaatggtgaacttgtattagcatttgatgagtttgtgggtcttgaaggtggcttttgattagctcgcttggcacctccacctccagtacctggagttgccacagaaggtgttgatacaccagcattactattcatggaattgtgcaactgggcaagggcctgagcttgagcttccaagtctgctcgaattcgggcttgcttagcttgaccgagagcctgtgcctgtgcttgagtctgaccctgactctgtgcttgagcctgagcctgagcctgagcctgagcctgaccctgtgcctttccctgtgcttgaacattcacaaattgactctgaacaagtccctgggcttgaggctcagacagctgaaaatgacccggaaaatgagacacaccttgtgtttgatgttgtgcctgagacagaagatggggttgctgattcacagctatagactgaggcaccatccctgaatttccaaaatgaggaggtaaccctgcccccacacccttggcctgattattgttattcattgacattgttcactctatcatcactaatatttcctttaaaatcctcaaacccttcaaattttcgaaaccaaaacaaaaattcaatcttgggtttatcttgcttataaaacttatccacaatatgaaccaaaagagattccaattctagtaaaacgttaaaactccttttaccacaaaagtttccacaacaattcgaaattgtccaatataacagcaaacccaattctccaaatcacaaaattagcaatatatattccaacactacaaagaagagaaacaaaacaagtgtccaaaacttttaaccgtcagaattcaaaatcttgtgtaaaggaatttgagaaaacaaaacgaaaaaaataactataaacgcagaatctaaaaagggtaagcaaaggagagataaaagaatcattttttcttacaagtttgaatctttcttcctgctatttcttcttcttctttctctttctctctctctctagagatcggccatggacccaaatttgcttccctctcttcaccgctattttctatacagttactagaaaattacaatattgcccccatttacgttacagataaaatagctaaggcccagcccaactaagttaataacagggtaactatcttataaggcccaattaatcaaagcccagatttcggcccaataaaaactcagtccaaaacatctcgttaggccgtaaaccctacttctgaactcttcccaagaaaaccccatatatattggaaaccctaattttcgactagggatttgccacttcgccaggaaaatttttgaatcggaagcggaaggtcagaagaagccatggtaagttactctacgtttttcttcttcctattcttctctgatcagcttgtagtacgattacctcgttttgtctcgaaatcggtgtaaaatttagctgtgaaaatgcaaaagctcttgctttagattcttattccggatgtgtttctattgcattttcaggtgaagtattctaaggagcctgataatcccaccaaatgtaagattggattttctgttttaaggatctttcattttatttcaccgtatattgtttttaaagattgtgttgtttgggagctcagaaatggacgaaaattgtttaaatttaattattagagcttcatttcttaacacttggagttcgaaattttaaagatttataacattcgtagttaggttttgaaaggatcttctgatctgaccgaacctgctattccatttgcaactcctttggttttaaaaagtgaatttgaaatatttttgaggaattataatctagttttggtttattataaaacattaatgtttatcttgtttcttcgcaattcagcctgcaaagccagggggtcagatctcagagttcactttaaggtacatttcatcgcttgacgaactataatttggttctgtaaagttaattgtgttttattgattgagcttctgttaagataattagaaaagttgtaatttttaattaatcgagccttttttttaaacaaatgtgcccaattctactttttgttaaactacattacttgaagatttgcatagtatctcgaagctttgttaagattatacttggtgttactatgtttgtgtgttgctttatgttttaacgaaagtaaattatgaattattagtatgctgagtagtagaaatatgtttacagctatattattattactgtaaattttttaatcatcttttttctctctgctgctgtcgtttttctgcatatatttattcag

SEQ ID NO: 189038 - DNA, 1422 bp, Cannabis indica
atagagaaccatgggtgcaaattaaagtggagcaatagtaaagtatatattgattacaaaacactaacgatgatcactcgaaaaaaattagtaaagatatatagatagagatataaatattgataatcatgtgtctttttaaggtataaacatgaaactctctttattaattgcataaagattatatttggcttactatgatcttcaatcggattagaggaggggttttggggttcgaccgattcattatcaggaaaatggataatagtgtcatgcccattaatagccgtagcagtattaatttgtactattctctctgtctcttcgccattagtaggttgtatatgtaaaattgttgttgtagactccatctcttccattatttctaattaagagaaaaaaaaaatcacttaaaattaattttaaataataattttaaaagagtaataaaaagctataaaagaaatacttgattatttctctttatggtatatttctcggactgttaattatttgtatgtatttgttttaggttgtttctacaatacaatttttaaaaaacgttaactgatggagttttttctgttcggtatcttaaagaatgtttgatccaatttttttgatgattgtttatgatataattatttaaaacataaataaatttttaaggtgttaaattttgttaaactttttaaaattttgaaattttcataaataattataatataaatgattatatataaaaaaaattaaactaataaattctgcccaatgtcaaaaatagtacgtggtgcattaactacaagaaaatgttcgtttatatgaatatgttcattatgttgtcttatcgcgcgcctctacaacgttgttcgcttttgactgcataaaatcaaattatcacaaataatatttcataactttcgaaaggcaattgtacaccaattcatctaatttgtatttatatgtaaataaaatttgaatttttgtaatatactgtatctatcgtattttaaaatttgttaaaattttttggtatgtttttaagtatgtctcctaattgtttttgtaaccaatcgtagtactaaatggaattaaacttcttttaagggtctaatcgaattaaactattgtatgtaaccttttctcctcatatatataatttagaattactttaacaaagttaaacaactaaaaaactaacttttctgacagtaattgtacaccaaatctgacctactacgcaagtgtggaatgtaaaatagtattttaacataagctgatgaaataattctaaatttttaacttctgttcttacatcgtttcaactaattggtaactaatttgacaccagctactcttttcgaaaagaagctaccagtgtgaaaaaaaaagaaagaaagaagaaagaaagaactagtcaat

SEQ ID NO: 189039 - DNA, 2652 bp, Cannabis indica
ttgccaatttttttttatttttttcaaaaaaaaaatttgcttcagtttatgaccgaagcaaaaaataattagcttccgtgcactaattttttgcttaagttatgaaccgaagctatttttttttattttgaaccgaagcaaataattaattagtgtcggttcataactgaagcaaaaaagatcactatttgtgtctacggttataacgtcgggtacaccaaccgaagcaaattctttatatgtcacttaaaaatgaaagcaaaaagtcttttttgtagtagtgggcgtccagtgaagaggtaggacctgtggaggagcaggcatgccttcaaaaatgaaagtctcaagatggagtgctcgaggtctcagaagtgatcgagcattcttaaatctcccactgttagttaaattatataagtcttctttgctttttgttatggagtccaggttatgtaggggtgctattgacaatattacagttaagttgggttttgcccatggttttgaggtcccctgagtaagttttggtgggggccttctgttcttttagaattcagacattgatgtatttataactaactttgtaatcaatcatgttcattgctaagtctctagagtcaattttcttagttttaattttactggtttttatggtgcaccttgccccacaaattgccaccatacttggcagattcttaatagaattaggatttcttgttttcccttacctttgcttcttatgggagattttaatagttttttgacttgggatgataagagttatggcaatattagaaacggtccttcagatgcttttagagactttattgataagtttcatgtcgaagcccttaattttcaagggcctcatatgacttggaataataaccatgttggtcttagtaatgttcaggaaatattagattgggcccttgccaataatcactagtttgtgatttttcctaatgcctcctttagccatctttattttttggctctcgccatagagccatcatggtgaagtttgatgtcaaacttcccaatggtagccaacccctaaaaaataggtgtttcctatttgagaatatttggctttccgagccaaattagaatcgggtcatttttaaagcttgggatcactcaattagcagtgactcccccatccaaaaacttgcttctactcaagattcttgtgttgaacaattgtcctaatggaagcataagtctttcttgggattccctaagaaaattgcacaagcccaacaaaatcttgagcaggctagaacatcccttgaccattctgaggtttccatcctcaagattagaaggcttcaatctcatttggacaatcttcttgccaaggaggaaatgtactggaagcaacgttctagagttaattggctccatgctggtgataagaacacacatttcttccatatatttgcttccactaggagaaatactaatcacattaatcaccaactccttgatgatggctcaaaagttgtcaatattgatgacattctgtctgagattgaaaggtactttactgaggttttcacatcacaaaatacctacgatagtgctatggatcaggcctaatctggcatagctaattagctcaaccctgatcagtgtcagctccataattaagatttttcccctgatgaagttaggtaggccttattccaaatgcctcctgataaagcccctggagttgatggttttaataaccagttttaccaaaaaaattgggccattgtgggcaattctgtcacgaacactgttatgagtatcctcaacagtggtgctaatttttcctatttcaacacaaatgtcatcacccttatccctaaagttaaatcccctttaacccctttgttacttcagccctattagcctttgcaccactgtttccaaaattgtctcaaaaatcctagctaatcgaatgaaacaagttctcaatcccttaatctccctaaatcaaagtacctttctcaaagggagacttatctctgacaatatccttatggcttaagaggttctacacgccatcaaaggtcgaaaaactagtaagagtggttggatggcagttaagcttgacatgaccaaagcgtttgacagggtggaatggcctttccttaaaaaatcatgttgaaatttgattttccagtcaaatttacttcttaaatcatgaagtgcctcaccacagacacttacaaatttaacatcaatggccaagcactgggccaagctgttcctacttaaggtattagacaaggggatcctttatcccttacatctttctcctttgctctgaaggcctttccacaagaagatgctgaggaaagggcagtgggaataaaaatttcccgaactgtcccaaaaatatcccacctcctctttgctgatgacaatatcattttctataggtcccacattcaagcttataatgccatcaaagacactcttgcaacttatgagtcagtctcggggcaactcgtaaatttcaacaaatcctctgttttcttctcccccaacactatatttaaacatacctgccactaacaatttggttaagtacctcgacttgccaatattctttggtagaagtaagaaacattctttaactcaattaaggatagaatttgg

SEQ ID NO: 189040 - DNA, 2082 bp, Cannabis indica
ttttttaaaaaaaaaaaaaaatcgaagagctcttagattccaccttaaaattaattagtataagcggaatagttaaatattttaccatatatttcttagcattattaaaataaaaatagaatcatacaagaatttaatgagaaaaatatatggtagtattttcttaattaaaaaaaatgggagaactgcacgtgcagtggtagcgcgttgacgcctttccagcggacctagtcgccgcacaaaaagacaagccgagttattaaagttgtaaccacaaacaactctaaattaaataaaaattatttaatatttaaatagtggtccccaaaagacccactgccacgactacttaacattacgaaacacgtgggctcaagcagagatatcgcaacgatcaatgcacactcccgataccaccgtccatcacacataccacaatatgttactaatataagaaaagaatgcgatgcagaggataattatcacaaaaaaacactaattatatataaattttaagaaaaaaaagctgaaaaacattaactactaacactcacccccacaactgctaaaatgcgcggcaagctcacctcacacaattccataaataaaataaattaaattaaatcaacataactaagttttatctcaaaaacataaaaccaataaaaaaaaatgccaaaggcgtggaaattacgattttaggacaagaagattgagaaggtgacagtggcagagatagtgaaaagtgcagtcagcaatgcaggcgcgtgcatgtgaccagctccttttgcggtactgttttcagcatcagcttcgggagagttcgccggtgctcctccaggagtttccattggcggtgccggtggggaagcgccgagaggggttggggcttcggtcgctggtcccggagtcggagcaagtgccggtgacggagaaggagaactcactggttctggagctggtgcaggcgatggcgatttaccgaacaactctgctggaagtaggacattgtcgacagtgaatatgacaagtggggttgagtcagttaccgtgtcggcaagtctggaagagtcgactcctgtgtggagagtaacggcgtcaccggcagttgatacagtcagttcgtatttgccggcaccgttggtagccagggttttgatcgggctgctcgtggtcttcaacgttcccttgggagagtaaccagccagggaatgatatagtaagaccgaaactagctcagcgttggtgagtttgctcagatccggaactccagcagccttgaaagcctcatcgttcggtgcaaagagagtcaaacctttctcgaccgccgtcatataagtcttaatcacaccgcttgaaacgatcaacgaagcaaatgtcttacacccagctttctcaagcaatgccgttatattagcatctgaagccgatggagccggagccgtcaagatccctggcgcaatgattggcgcgctgatctcaaggatcgaaatgttgtacggaatctgcttgactggcttaacgtaggtggagtcgagcttggagccgggagctgcagaaccgaagccaactttgccgcccttaaggtcggtgatgttgacgaagccaagatttccaggggcatttccggaagtctggtaaagagtagtggataaggtgcttccctgagagatctggtggagctttttcgggtcgaagtagtccagaacgacgtgaaggctaagggctttcttgataacggagagagggtgtttggctgtaagggaggaaagagctccgttactcaggacaaggacagttagtgtttggcggctattgatttcatcgctgagctttgtttgggataaaaagttattgtaatcactgtactctgggaatccggagaggatttctgtgatgttgtgggctgaaacgacggcgtttagggcgaatagaagacagaagatgagataatggtttagtgcgaccattttggggtgtggaactgaaattgttgatcgaacggtgttttgtatactcgaataatggcagctaaagctttgcataaggcaaagaagataaataaatagagagagagggagt

SEQ ID NO: 189041 - DNA, 2516 bp, Cannabis indica
catagtgaccatcgaaacgtagaatcgccggttgaacaaaactgtcagccatattgctactgaaaaaaaaaaagtgaaataaaaacaaatataattactgttataaatatactatctcataatcactccttttttttttttatctcacaatcactctctcacgcctttttttattttatttatttatttattagctcagataccactgttattagtttattaatacatatacttatatatataataatggattcatagctcatgatcttaatctacaacctgaacaagtaaccatcttagaaattgaggagcctattagtctgacctttgccctgaggtatatgaattcattcactaaggcaacctcagtggcgaaccaagtgatgatcaacttgtcgtcgaatctaccggttgtagttgagtacaaagttgcagatatggattatgtaaagttctacttgactcccaagatagaagaagaggatattgaagctcagatggagttcacaccttaagtcgaaatcaagccaaaaaccaagctaaaaaaacagactgagcttatagaagtagaagatatcaggctggatatcaagttaaaattggagaataaaaaacctaagaaagaggataataacggtaaaagtaaccctgaaatagaagtaatggatgatgactgatgaatagtttgtttcatctataatctaggtataatcttagcaaaattagatgttcatatatcttgaactgattttgccattctttgatatgtgcaacccttagttcttccatttttttgtgctatatattgcttagtacttgaatggatctgtaattattatttttttcaaataggttagtttggttattctcacttctcaatgtctcaatttttgtatcacaacccacaagtcaagctaatatcattactttacttttcaagtggaatcaaattagaggatgctgcttttcttgaaacaaaagtgttttagtttgcatagccaactcagcagtaaacaaatttgtgggagataatagataaataataaaaacaatagacatgaaagattaaagtacgaaaatgtaaaattataattgttttcttcattaattaatcaatataagaaatgttaataacagagtgactgtgtggagacgaattctacaaccctgtgccaaaagaataaaagataaagaacatttttctccataaccctaagctgggaataacagagacaagagtgtcacttattaaatttgttcctatgatgactaaatcctgcgttgttgctgatacaagtcgaaaacactctctccgaggtttccagatgaaaaaatagaatgtagagggaaaaaagaaaaacctgataccaaaagataacatgtagaacttaactttgcctccaggctctgggtaggctgccgcgctttccttgcattaaaggaaaaaaacaaaatgttgggaaaatccattttttactgctttcccatgattctatcatttacttcttttcttggcttcactgtataggataactcccatgactgtaagagagtaacccagcattccagtcacagaaactggatttctgaaaattaaaattgaaaccaccactgccacagctccctttgcatttcctagcacctgtagagccagccatacaacttaatttagctttaatacaaacttcaaatgaaacattacattgttttagtagaaaagaaaagcaaatttggtaggcggaagtgaaaaaggtaatacaaagcatctacaatgttataaactttaagcctcaaggaagataattctgctggcctaccgctatatataatctacccaccctttctttgtttatctcaataattctaaattatccttctttccattctcaatctttttaaatagtcctctctcatttgaccctgatatttcctccaacaattgcaaatacaagacattcatctcaatccatgattttatcatgctgaagttttattcttaaaatgatacatgaataagctttcatttaaagttccttcaagtcttcaaccacccaatccttccatactcaaaaacagaagtttatatatatatatatatataaatatatatatatatttatatatgtgtgtgtatataaatatctgatgaatacaataatgcttctttgcccaaactgaatgattctatacacagctccaatttgaaccatcaactgctaaacttattaaatgtttagatacctattgttaacttagtaattagaaatttacttgattgattaacctttcttattccagaaaaataaataatgatcgtgagaggggcgcgaaaacactgatgtttctgacttttcaactactaaagaaagagccttcaaatcacttgaataggtccccaaatattttaacaggttttggcaacgcccacaggtatatggcacattccaataatctagaaattgaaaataccagaagaattgaaatttagataagaaaggaaatgtacctggagagtc

SEQ ID NO: 189042 - DNA, 3421 bp, Cannabis indica
tagcttattttagtctggtatgtgtatatgtttgttgttcaagtttatgcatacatacaataacaggctaggcgccaacacttaaatttcttggatttttgtttggtttatgcatgtatactaaaatccagtaggcatgtcttagttaatgcatttgtctggtgttccactatgcatgccagtttataaaatatgtcaacatctttgtttgttttgcttatctgctttttcattctgtactaagctctataaattccaatcacatggtgatttatttgagatgactatgaattttccttcaataaataaaaagaatttaaccagcctcccttagacctggttttaagatttttctccccactaatttcaataatctaaatgcagttggaactgaccaagtttattgcttcatataagcccctaatagctggtgctaaggtttctgaaaggattgatacaataatcaaaaacctcttgctttcttctatgcagcctcaggtttgattactaatatattctctttacgatatttacagatgagaagtttcctgtgtcttttcatgttttacaatactgctggtttattttttgttcatacttcttttcttatttcaaggaattagctgtcatggaaagcatgcaattggctctagaaaatgttgtgagtgcgatttttgatgggtcaaatgaggctgtgggagggagctctgaagttcaacttgctttgtgcaaaatatttgaaggtttttagctttctttctttactcttatattttccaacagtgaatttctaaaatatgccagttgcatttttattgaaggattacttcagcaccttctttctctgaagtggactgagcctgcctttgttgaagtacttggacattattttgatgccatggggccgtttttgaagtatttcccagatgcagttggtagtgttatcaataaattatttgagctcctaaattcacttcctttcattgttaaggtgcatctcaatctgatttttacatcataacttaacataacctaagtagacatgcctaaacatattttgttattgcttgtcaggatccttctacaaatagtgctcgtcatgcaaggttgcaaatttgtacatcatttattcgtattgccaaagctgctgacaaaagcgttctgcctcacatgaaggtgatcattttcccctaattttatgaaagtagaagagtcccagatttattatcagcaaggaagaaaatattgatgttgacagtactataaattcatggaaatatcaacaaaaatttaagaaaatttacggatatcacatatttgtcttaaaatataagaagtaatgataaaacttatagaataccaataaatttgaataatttaataataaatagaaatcttatttcgatattataacatcgtcttgacgcatcatataaatatgatagtatttgacactcacactcaataagaaagcatcaataccaaaagtaacttcttcaaaacttttgttaaatgatcttgatctagacaatattgataccaagatatagggtttgagtatgttttcatgtaattctaacacatgccatgaatattttttgatgatttctcctcacttcaatccacatgttgcttcctttttcttctttttttttttcataaaaaaatatggaatatctgtggatatttccatgaatatcgatatccatggatatttcggaaatatatcttcaatttttagcaggaaaaagatgtattacttaaaataattggtaccctaaaaatttggaaatataatggaaatatcgactgaaaatgtcaatatttcattcctttatcagagctatttttttttctgatacaatttctcatgtgatttcttatatagggcatagctgataccatgggatacttacaaagagaaggtcggttgcttcgtggggaacacaatcttctaggggaagcatttcttgtcatggcttctgctgcagggtaatcttgttcttatttgggttcattctgttttattttgtttcctggtactaattatttgtaagtttctatttatgatgaagggttcaacaacagcaagaagttttagtctggttattggaacctttgagccaacaatggatgcagctagagtggcaaaacaactatttgtcagatccttcaggtttagttcggttgtgctttgagacatcaaccatgtggtctctttttcatactgtgaccttctttgagaaggcactcaagaggagtggaacaagaaaatcccatttaaactcgcagaacaacgaaacaacttctatgttgcatccaatggcttctcatttatcatggatgctgcctcctcttttgaaagtaagtagcattttttttcttcctattaactttgttttagtgttctgctttatagaatattttagtcatgatacttttagtgtcatggatttatggataattttaatctgcagctgctccgtgctatacactccctttggtccccatcagtatttcaaaacctacctgttgaattgaaagctgccatggcaatgagtgatgttgagcgattcagtcttcttggggaaggaaaccctaaattatcaaaaactactgggttaacttatgctgatggatctcatatcagcatgggtaaagaaggattaacagagataaatgaaacagacatacgaaattggttgaaaggtatcagagatagtgggtatgtattgctttcaggtttttttgtttctttgcttattcataatagttagaacataactagtaaatgataatgtaaacaaagggaaaaattacaaacttaaaagatacaagctttgagcaattagaaatctgagtacatatattgttttaacagaaaccatgttcccttttcttctaaaaattttggaaaagtcttactcaatattaaagttctagcttgaagttttttaatgttcaaattttaattctaggtacaatgattgggcttgtccactaccattggggattccttttttaagtgtttggatgtgcattctgttgctttagctctggtggagaacataaactcgatggaattcaggcatgcaagacagcttatccattcagtttttatacctttggtcaagaattgtccttctgatatgtgggatatatggctggaaaagcttttgcaacctttgtttctacattctcagcagactcttagctgctcctggtctggtcttctaaatgaaggtagagcaaaggttccggatgcgcatggcatattagctgggtctgacttgaaagcagaagtgatggaggaaaaactactcagagatctaactcgggaagtttgttcgctcctctctgtcatggcttcacctcagttaaatacagggttgccttcattggagcactctggacatgtcag

SEQ ID NO: 189043 - DNA, 4336 bp, Cannabis indica
aaaatgaaatattcggactcgacccaataaaacccgaacccgaccaagcgaaacccgctatacccgacctgaaacctgacatacctgaccacccgaaaatcgagttcagttgtgcattttcaacacccaaaatttgaaaacccgaacttgaccacccgaaaactcgacctgtgtgcagccttaactggtaagaagatccttggaattgatattcaaagagcaaaatcaaatgtcattaatctatccaaaaagagttacttgcaaaaagtgttaggcaaatttagaatggacaatcccaaggtggtttcaacacctatagctcagcattttaaattgtctagctcacatgcaccaacaatagatgctgagaaagagaaaatgagtaagattccttatgcaagctgtgtaataagtttgatgtactctatggtttgtacaagacttgatttagcacatgccatgagcatgacaagcagatttgttgcaaattcagggaatgctcactggacagcactgaaatggataatacataaaaggcacatttaacattggtttaacctatgatggtactagcaaattcaaacaattggtaactggatatgttgattcagattgtgtttacagtttatggtggttgtgttaaatggaagtctaacctacaaaaggttgtagcactatcttctacagaagttgaatacatggctgctacaaaggctatcaaagaagttatatggcttaagagattaacaagtgaactcaacatcaactcagaagatatcacagttcactgtgataaccaaagtgtacttcatcgtgtgaaaaatctcatgcttcatgagaggactaaacatattgacattaagatgcactttattaaagatgtgattcaatccaaacttgtctctgtgaggaagatcaacactctagaaaaccctgctgatgcatttacaaagagcttgacaagagacaagtttagactttgtctagacttttactcaacatcaactctaactagagtctcaactaagattcacattcattggactttagattcagttatgttggttactgttatggcttggattactctactatcaaagtgtactaaaccatgtggaaattgtggggtttagaacacttagttaacattctctaactaccttgatagttggtagttaagtcgattggcttttgtcctaactaaccgagctatataaatagaaggtttctaattcacttgtgtaagagatcaacttagtgagggaacaacacaaagaaaattagattgtaatggagatgaattctcttagtgattagtgtgattgagggttgtaaaaggcattttcatgtatttgattggattgcctcaagtgagattatgattgtaattggtgtgtatcaccattcaccactagagttctttgagttcttggtccaagtgtttgtaattataattcttaccattcaatactaaaatcatcacagccaacaaagatgttttctactcggggattaggtcaaagttttaattaaaatttgtgattgaacctcgttataattgttgtctattttcatttctggtttactggtttgctagtgtatgtttcagtctttatttttctttgtgctcttgcattcttgttagtgcttaagtgcacagcatatacatacattaaattgatttgcataaataaactaatcatcaataaaatataattttagaaaaaccaacattaatttgccaaattcagttagcaaataaaaattgtcaaacgttatttctgttcacttcactcattcttacttcacagtaattcattaacattttttgagttaacaaaagtaactattgaaatttcatctccaatttatgaagaagaggtttatttaatcattcggaagattaatttttagataggacaattaaaaaaaaaaatagtgaagaaagaattatatcaagtggtgaaaacatcgttaattagttaattaaaggcatagcgattatcaagtcaagtgaggaactaaagggctaaaggctcgtctctacaattttctgacctacgatcaattcctgtaaattttatatatttttttaaaacagagcccagaagttccccgattttaattggtacacaagcaatgagaagtgtggaagacaaggaataattagaaatttttattagtacaaacgaatagtatttttagttttttgatgcacaaattgctttttcatttatttgtttattaattatgagttaattatacacaaatacctaattcgaacaagtgaaagacgattggtgtaaaagggtgtctaaagaactaaggccactttttgcaaatgatttatttacaaataagatatctatgatttacttttattaattattacaaaattagtaaattgaagacacctgtaagtggaattagtgttaaggtaaagtaaaataatggaagttagagaaggcagtgttatttaatgacaaaactcctggtgatgaagagaaggacgacaccattggaaaggaaataaaacaagcatgaattaataatggaatgagaatcagaaactaatgcacagcccacgtaaatttcaaaagcaaactaaaccaaatggaaaatcttaaaaacaagaataagaaagctccaaattgcaacgacctatagtgacagttgaataattatacaggtaaatgcaggttatatagctccaaatgattgactataagaaatacggaactcctgtcctaggtcctctcatctggttattctcctctgtttcggtaaaaaatttcacctctctctcctgaaatcaagcacaacaaaaaagaaccatcatcaacaccaatagaataccaaagcacccaatgactgttagtgtttgatctcatagaaaaacaatttttcataagacacaagagaagaacaaagcgataggatgaaatcttgtattaccatattctcattaaaactcaatatagatgccacgtttccgcatcggtaacagtaattgggcgcagaccagacctgacaagatcaagggcaaacgtactattattgttaaccgaacctatagaaaaatgtcaaaagcattgaaattattataaaattttgttttatgtacagaggctcaccgtaacaaggcctttgtcttggaacatgtacttcaacccttcttgtacaagctggtgcgctcgacagaccagatcaagattgtttatgtggttaaactacaggaaagaaagaaagaaaaggtaatgatgtgttatgctaatggtcagaattgtggggaagaattatgcctacattgagatcaaattatcacctcagaagtgactctggatccaaagagccaacctgctccacgtggactgactgcccacgtttcaatatcttcaggatcactccacataagatcacaaaatggtccctcatgaggaatttcacaatttcgctcaattactcttatctgtaagaaaaatgttgcatgaaattagatttttatcaaatcaggtaatctttaaaggctaaaggattattgatacaaagaggttcatggctataatgggtagatcgagccacgatgggtttgctgcccttaaagcattatgaaatacttccttctgttctgtaaatcaagctattcaaaggtattttaagattcttccctgaaaacttctacaaagagtccaagcatactgatttacttccctgggacgttagagctattttacatgcatgataatgactcgtaactgataagataccaaaaacagtgataccaattatatatatggaaattcaaatagagagatagatataaaattaataataataacaaaagggcattggcaaccatatacagaagggcaaaaatttatcattgttcaaaacagaatgctaaaccattaaacaagaaagaggtaaaggccatctgacaagaaaaaagaagaagaagaaaagatgagataaagacctgatcaatagttcgaatatcaggagaaagaccgccatgaacgcaaagtacctggaaagaataacaatatatattattataaaactaaagcagccatggatgcaaccaaataggaataagtgcatgtaaactatgcacaaatgtcaggtaatattagaatgtaaatgacaaatcatgtgtgtgtgtgtaaggcaagagaaccttacagtgccatctatgattgctgagagcgtcaaataatcaaaaacatctgtacaataccgccatgcattagcgtttccatacttcctctggcactcgtcataaaaaccatacacctagaagaaatgaaattatccatagaaaaaaaaaaaaacaaaa

SEQ ID NO: 189044 - DNA, 2980 bp, Cannabis indica
gtataaaaattggtcatatcatacacggaatttgctgagcccagctggacaaacggtttatgaaaatacaatgttaaaactacagtaatttgagttgctcatagtgctacaattagcttatgtatatcggggcaaacaatggtgttatcaccactagaaaagcctagtggaaaagtaggaaacatcactaaaatgagtgtaacagaaaaaagcacattcaagaagtacaggcacctcctagaaccatcacaatctctcaacaaaattagaattttcataattcagtgataaaaccctttaaaaaggaaagattcttaagagatccaacaaccggtggaacaaaattaaggcaattacaataatttattaagagtgtagtatatacaaaacaaacaacacataacagaggtggtttttccaagtgaatttctccggcaacctacaaagatgaaaaccccattgttcctaggtaccatatagttccaacactatttacagatcaagagtcatagcaaggttggtagcaccacgcacaataagtcacaagaaatccctatttccatttatggaatcgcctacttgaacaaaagctcatccttcagacactcaaagatgtaaaacccagcagcactttttcacagtgaggaagacgacgccagagcagatgggaatggaaagagagttgaaggatctccacaagagaaattcaaaatccagcagtatagccaaaactccaaaaacttggaggaagtcctacctatctgagatcaaaaagacctaactgtagttcgtgagctcctgtgcccacccctggatccactattggttgataggttcggttcgatcctgaatagccatcctctcagagacatcagctaatgatttgaggttgcacctgatcaaggcctcaacaaagaaacatgtctcgtccttggtatttccttcagggacatccacaacaaaggattcaataaccaatgttcctggtctcccttcaataatctcaggatggacagtaacaattgaagagtagttctgcaatgtgtggaaaagaaacatgattagaaggctttcacataaaatgttcaagcgaaatatatctaaaatctttagtaaggacatggacatcagtaaatttcatattccctcaaacaactcaaggaaacagtgcatgtaatgacagctatcaacagtccttggcttgtgtctagccattaaagatcattcatgaaaaagcatgatcaggaatcaggactacacatttattaggccacatcaacgagtaatgagtgaccatgaatatgatcagaggctacagcatcaaatactcattcacttccttattaagcctcagtttacttacactgcatatcaaatatataaaactatgcatgtcaaagatataaattatctactcccactgaaaaacttcaatttataagttgaagagcaatccccacaacaaaacatcatcagagaaaagttattacacaagaaaaatagtgaagaaaggatgaagcgtcaagtagagaaacagaggaaagtagtgtatacctttagcctgtgatcaccaccaacaatcttgattccaagaatgtgttcctcatcgtcaagtaactccaacctctcggtgcttgtcgtagcaggaagcccagatttaacgttcacttctctaacacttccaatacccaggtcccctttcacgatgcatctactaacaaacggcttatacttctggggttgatcaaatctcctaacaagcgaccatacctgatatgagaaaaaggcaatcatttagatcccaaccacaacaatttcaatttgtttgtttcattgagagataaagtaacaaattagctcaaataaactctttttgtttttcttccgatcacacaaaaaggtatatcaaacttaagaaagaagaaaattaaaaaggaaaaaaatccatgttttgtagaaaacaaaataaaccaaaaaaggaaaaataaaaatcattacttagtgacgaagaactcattttgagaaagcctcaaagatcgaatactcgaataattcacaaaattcaaagcttctggatccagattaaaccaaaaacaagaaaacccagttagaaaatcgaaagaaacgttcgaaaaccattctaaatggagctaaattatccagatcttcaaagcacaaaaacaaagtcaaatacccctttttgaaatcccccaaaaacagaaagaaaccagatgactcaaaaccaatcctaatacacgaaaaccaaaaaagaaaaatcatagaccaatcgatcgtacggttcagaaaaaacgtacgagttgaacaggagctttgatgtgcttgaccagagcagatgtacactggttatctctgggttgatgcttgtggtgcctacgtatgtactgaacctccattgctccgtatgaatcactggggttcattttcttattcttctctcaatatctctctagactcagagctcgctttctctctctataaaaaaaattgaggatcagagtagttgagacagagaattccagagacgagataaaagcctttgtttcacattacagcgagaccctttgcctttgtttttctgagataatgataataataataataaataataataaataatataaaatggataaatttaattaaaaatgaaagcttagcttagcttagcttggcttggcaggctatccaaacttttgtacaccgacactgtaaggttttattaatatttttattttttaatattaatattacgcgtgaaagtccaaacttcgaaccacatttctctccacttgcactatattttataaataaaataattatattttcaccaataacttaacagtaccagttgttattttgattaattattaattaaaaaattagcatagctatcaaaaaataaaaatagaaatagcaggtcaaatatttatgtcaaccgcaaattttgtaatttttttttaaa

SEQ ID NO: 189045 - DNA, 3685 bp, Cannabis indica
ataaaatagtagtaatgcatactagttttacatatagctaaagcataacattgaaatattattctattattttcaatacttatatataattactttaaatttagataattaataatgaattaagtaaatgatattatttatttaatttaatttgaattgatttgagtagtgattaattgagtgggttgagaaattaacctttattccatgaagctggattaaattttagggaatggccattagtgtccactatgaaaggaccaatctcttgtgttgctccataccccacagaagagcacccaggacctaatcataattaaactattaattaatttaatttgttgcacctaaagaatatttaattaaaaaaaattaatatttgtatggtaatcatgatatataatattccattatgaaaatttatttatttatttttgtatttaatagtaatatgtaggatgcatgcatgactgtctaaagataaggcaacatgaaaattaattataataccaaaaaaaattatgattaatatattaagttaagttgccttttctctttcatatatttattatatatatatagtaattaattttaggattaatattaaaatacataatgacatgacaattatttttgtaaacccaagctaatcttgcaaaagagaagatcataaaaaaccaacgaataaatttgtaaaatttccaaaaataaattataaatttctaccgaaagcaaaatgaataatcatttgctttgaagcatgacacacgttgtgtcatgtgtcatgcttcataaaaagttatagaacaaagaaaaaaaacataggctattgtgaatatttaattagatcagaaattaattttctaatataaaattaatagcatatataaattaagatcatcatgatcatgaaaaaagaaacccagttgagagtacatattaattataattagaacatgcatgcatggaaattaagatattatatacatagatatatagatataaatatagatatagatatagatatatatacctccattgagccaaagtaccaaaggtttttggtgaggaagagaagaagcctcatagaaccaataaaaaagagctctcccatgaattttgtggacagtgataaatccagcatagtgtctaaaattattatactcattattattattattatcatcatcataattctgaggttgtccaggtaacttagtcacaagatcgtcttcataattattattaatattattctctaataatttctcatgatgaagatgatctctagaccataatttccaatccctaaaccctaaattaacactctcaacaaattgcaaataataagtactaagcaccaaagttaacacaaccaactttgacaccaaattgatcatcatcatcatcatatattttttggagttataaatatatatatatggctatttatatatactcatcgcttggtatatatagtggatatccacccaaccatgtcactattaaaaaaaaatatttttagtcacattgtgtaggacttttagtcataataaaaagttacttataactaaaatatcatatttagatataagttatcactaatttatttttagttacaccaaatattgtgcgactgaaactataaattgtaatttttgtaactaatacctttagttatagattttttgatcacagtataagaatgatgatttataattataacttttttacttttaattacaaattttgttatgactaaaagttaaaaaaattataatgagttatacaaaatatatatttattaaatgatgcttttttattatacttttttttcatggatttaggtagcttattaggtaggtaggtatatatatagtcatgagtttatagagtagtactattattgcatgaacaatcaaggtttagtggtatatctcctttttagtcatgtgggggttcgttgaatcatatctatgactaatatcaatgtctaccatacaaaaatataataagaaaaaataaaaaataagaaaaaaatgtaggtacttttagtatttttgatatatagataagtttaattcaatttttttatatgacggtgcatataatattttaaaaaatcaaatagtttctatgacataatgtatttcaagtaatttgaatcataaatagacaaacgtgaaagtagaagggctttcagcaacactaaatatttaattagggtctagatgaatattatttgacattattttatggttggaatataattttatttttgcttaatttttatgtattctatttaattcgtacttaattgcttttaattgtctgatcaccaattaaatgtctatgattttgatgcgagattttagaagtgagtgtcaattatatatgctatagtgaaataaaactgaatttcgatataagacgagaatatctgtatggtttagatagcttataagtttatgtgtttaatgtctgttgcatgtttaacttattacgagagtagaaaattagcatgtaattgatgagatttatatatctgagaaaactataaattaccttagtaaatctgcttttgcatagaaatcggtaataggaagacaattatattaggtcataatcaataaatacaattgaaatcgaaactctaataactttaatcatggttaatttttctgttgaattacttgctttttaatttcattgtccttttagtgtttttaaatttaattttttcttaattttgaattcaccaaatagaagtaaagatttgattttaaagtacttatataactacaattcttgtgggatcgacctcactcctggtgagtctattacttattactatacgtacacttgcatgttaaaaataccacaacatttatctatctgaaaaatattaaatttaggaaaagagtctgaatatatgctttagttacccataagaatgttattaagggtactttaaggttcattactgtataagttggtataccatattgtagtcagtgcaatttaatattaaatctcgtatgttttaaatttattttatatattgtaatatattataatatatgattaattagctagggtttgtgagtcaattgtttattatgtatttggttagtagaagttaggtcttataaccacttgaataatcccaaaataataatatgtggaaacataataccataagatgtatgggttactcttcacatagttaattagtttttcgatggaatttcatgtaccttactatacagtcaccctattctgctttctctactgcctttctacattctgacatgatatcagaactaaataaaactctgatgagtatctagtctaaattcaataaccaattcaaaaagaagaaccaaaaaagtttcttgtgattctggaatagtgagctaaaaaagatcattgtaaaataactaaaataatcgtgtgtaattcggagatattgagcaaaaaacattatttgtgattaaactgtcaaaaattagtgagcaaaaataataatcactatctttaaagagatatcaaaaaatctgaaattaataatgtgtaaaaatataatattataaataacatatgtgagttaattttcttacgaattaattttaaaatataacaccatatcataaactcactttattatactttctcgagcattgtt

SEQ ID NO: 189046 - DNA, 2794 bp, Cannabis indica
gattgggattggtcgaggttttaccatgaggggttgtcgatattttgagagagaggctgatgctcttagctattgttccgactatttttggtgctatgtttttgttgaagatctaggcatttttctcttctccatcatggttctccttggtagttttggcaatttattctcgtttgatctagtctggtgaggagtagagtaggatgccatccaatttgcatctctccctgatagatctaggtgcaagacagagatgggagttggagttgagccgatcggttctagtttacggtcgttggtaacttttagggcagtggagatttaggggaatttgtgactttgtctttcatgtttaagtttattgttccacttgttgctttttattttttatgtgttattttttattttcaataatggtgttgtaacaccatcctactattgcttttatagtatatggtttagttttatttacggtgaaggataatagtcttagttatcgttcggtcattgttatgctctcaaatagctcaaggaacttttgtgtggatgagataactacctctctccgtatttagatttgtaggattcctagttttttattgtccctgtattttgcgagtccatttttctctaggattgtcctagacatggttggtcttttttgttattttttttagttattcgagtctttgttattacttaatttttattagaggatatttacttgatagtcattattgatatatttgatttgttatttgttgatctggattgaaaatttagaattcttcacactcttttgatgcttcacagttgacgatttattggtgcatcgtgtactcaaacgagtccgagggtggaaggccaagttattgtcaaatgcggggaaaacatgtctggttaaggtcgtgggatcaacgttgtcaatctatgttgcatcctctaatgtcattcctacctcgacagcaaacaaagttgacaaagctctcagagatttctggtggggtgatacgtatgacaagagagtggtacacactattgcttgggagaggttgtgccttcctaaagtgcatggggtcttggatttctctttatggaggacattaacaaggcttttcttatgaagtgggcatggaaaattttgatggataaggatagcatgtggagtcatcatatggaagctaaatacatcaaagatcgaaatttccttgacatggaagcaaaatctttggactctctcctttggaaggcaatcctccgttcttgaagctacctctctaagggcctttgtcacaaaattggtaatagagcttccacttccgtttggtctagcccttgggtccttgggaatatccttcaaccaacactccgtctcgacgcgtcggaagggatgagtctggttagcaacttcatcgtccaaaaccaatggaatgaggagttgataagacactgcttttttgatgaagatgccaagaggattcttaatatatcacccttcccaaccaagcttctgaggattcttggctttaattactggaacccaatggtgtgttcaccattaaattggactatagagttataaagaatttaagaaatggagacactatcgacagaaagtggagagtaatatgggaagctaaaatccattatagactcaagatattttggtagaaaatactttccaactgcctgcttatgagggagaaattaatttccttcctccccttacccgactataggtgcactctttgctctttggatttggaaagctctctttatttattttgggattgttcttttgcaagagctatttggttcggctgctcctggaatgtgagaacaagtgaagctaactgtcataattgggatagttggctgacttggttcgctgtggaagatcatcggcccggccgtatcaattaccacctgttcttgggggggcttttggtctttgagagtatatggaaagaaagaaacaacctagttcatggtggaaattcgactccacttggggttatactcactcacatcaacagacgattaattgagcttgttgatgcccatctaccagctggttcagttcaccccaactggttgctgcctcctgttgggtggctaatgtgcaacacgaatgttgcaattgggaactctcaatcagcagggacaatagtgtttagaaatgaagttggtgctatcataaaaatttatacttttcgaattgggtattatgatcctttggtaggggaaatcacaactctatggtatggtgcaatgatggcacataagctcgaatttaagaatgtgatatttcaatgtgattcatcgaatgcggtatctgcggtgaaaaggaagtgccttgagatccaatctttacaccacaacatccaagacttagtccacaacttcctttttgcagttggtattcttaatctctgggaggccgtttggataccgagattgtgcaatggtgtggcccatttcatggctcaatgggaaaaccgtaaaattcctttggtttgtttgatttggccaataattttgacagctccttgcttgttgatgttgcagacggctgtgcttctttttcggatgtagtttagtgtttttttttttttcgtttccagttaacttagtttttttctggtgcgatctgttggtaatttagttttattctgttcagttcatgtagctgttctagggtatcccctggtgttgttttcgtgttttgatttctctttgtctgtactctttgtgtatgttactgctcttggtggctctttaaggttccaattat

SEQ ID NO: 189047 - DNA, 1730 bp, Cannabis indica
tgagtgtggaaaaaaatggtttcaattttttatcatactgaagagtctttttttttcctgttatttgttatgtttttcattgagtgattgaggttgagacatgagagatcatttgcttagtctctctgagaaattataaactctaaaaaatggaaacattaatcataggaatgcctgcttattatgctacattatattgtagaaaaaatgtttatggaaatggaatatctctgttacactaacatcaaatgatggatttaagtggaaattctctgtttttgttgcagcagaatgaagtgaattttagatttttccaacccaagtaatttgtctattagcgaatcttggcagacttgtttgtaaaaatataaaacttagtgatttccggacaaattttggcactgacactgacctaataatccttgtatttcatttgggaaattactaagcaatttccatttattgtttatgtaagttcatttggggaccacagtcaatgtcactaatgcttgagcctataatgaaatagttttttacttttaaagtggaagacttgttcttattagcttgctccacttgtctaattgacttatttatttatttatgttggcgcatatgaggaatagtgaaaaattgctcacttttgtttaattacttgtttgttatggaaccataatttcttttctcattttctctaatcaagttttttttttcttaatctttttctcttgcagcctggtccgagggattgtcttgtcaaatgctttataaaacgaatccgttctacccaaacttatctcctttttctcagtctgactaatggtgatcatttgctatcttaatttctgaattttgaagctcataatgtgtataggctatgtatcggatatactattttgtcgtttgaaccatgaagatattaacttctttcttggcttgctttcatggcagcactagctgatgatggaaaatttctccttgccgcccgcaagtgtaggcgtgccacttgcacagattatgtcatctcgctgcatggtgatgacatgtcaaagggaagcagtgcatacattgggaaactaaggtgtgcaataagcatagatatatcactctttttgattcatagtaccatttgcagctattatttgatgttttctcatttgcctttatataggtcaaattttctggggaccaagtttacaatctttgatgggcagcctcctcatgcaggagctaagatttcaaagagtcgctccactaggctggtgaatttgaaacaagtgtcacctcgagttcctgcaggcaactaccctgtggctcacatatcatacgagttaaatgtgttgggttctaggtaagagttaaagttttgcaactatatactactatcttaaacaagatgttaaagtagcttctctacattgatttaggggtccaaggagaatgcagtgtatcatgaacgccattccttcctctgcaatcgagcctggtggtgtcgcccccacgcagagtgatttttccgttagcagttcagattcctttccttcactctcatttttccgttcaaaatccaatcacgtagaaaatttcacatcagggcctatcgccagtcaaaaagatggagttatggtattaaaaaataagtctcctagatggcacgagcagctccagtgttggtgcttgaactttcacggacgagtaacagttgcttcagtgaaaaactttcaattggt

SEQ ID NO: 189048 - DNA, 1931 bp, Cannabis indica
acaatttttatgcttaatatataagaatattctaatgaaaacaactcaattctcactttgtttgttacaatattacatatagttctgtttgtttagctttttataagttttttttttagacttttaaaattaaaaaaaaaataaattattttataagtatttgaataaaaaaaatattttttaatttaaaagtcattttgaattaagctaggatttagagcttcttccaaaagaatttttgagaagctatttttaatattaaaataatttacacaattttttatttacttgacaaattttttatttttttaataatatccaaatattttaaaaaatattttattaaaaaaataattatttaaatagtaaaaataaatcaaaatttttatatttatatacttttagctataagtaaaaaattaataaaaaaaaaaaataatcatattttttatatattgaatttgtagaacttataaaaaacataaatataataaaataaaataaaaattgcaggcctattacccaacatgtgggccatatttatctatatgtacaatatgtacttagtgttttttatacaatttctttattatatgtatagataatatataatggattttatagaatcagttcctcgttggttaaggatagtttcatatatagtcaaatactttacctttaatactaatttagcaatgacacatataaattttttgctgaattttagaaatgatatattattactttgatatctctctatttgtacatagtaaccaccaattaaaataagattgtgatactttggaataattacatgattaattaattacctagaaattaaagccagtgctatctagtaatattgtaaaaaaagagaaaaatagaaaaatgaaaaagaggaaagggattgcttaacaatagtactctatcccttgacctccaattcaagcaaaatgacacaggaattctttggtaaatgagaggatagcttaaagtttctcaacaaggattgtttagctagaaattaatttttatataattgagtttgcttaccttataaatttttaacctcatggtctagaaagataagaaaagtgccccaacttgactaattttataattaccacttagtttacttaattagtatgtatttttcttcacaaacgtagatagaaggacagaggtgggttagcttagctttatatataccgtatgtacataaaagagattatttatatgtcactattgtaacatactttaaatattagtagaagtgaaagagggataacctctaactacaaaaactcactgtctaactaattaaaaaatatgcaaatgtgatcttgaaaaaaaagatacaaaaattgaacaactttatcaatttgatctattttcactttatcaatttaaattattattatcatttaaatttagacagaaatacacctattcgtgctattaatttttctaatgagcatgcactcttcaataaattaatgttacgaaattgctatgcaagattatattttagttttaaaaaattataccttaaaagttgaaatttggtgaatattgtttaattatattattgtcattaattatttaatttattatttaatcatgttttatattaatttacattgtgctaattaaatataacatatttcattttttatgtcatatttaacatcaaaataatataataaaaatgcaggtaaaaaaggttgtaatttttattttaaaaaataataaaaaaaaattgaaggttgcaatttataataaaattaaattagggatatttcttaaatataagaaaaaaaaaaatttaaaattttacgtgtttttcttgaaaaaattagtattcaatcttttggtcgtagttagaaatgggtcggggtggtttattgatttacagtcattacgaagtggct

SEQ ID NO: 189049 - DNA, 5140 bp, Cannabis indica
cattattcttttgcttgatatgatgatatgttaatgtggccatgatgtcagaaagattgaaaagctaaaggaagagtgagcaagtcttttgctatgaaggacttaggataggtgaaataaatacttggaatgaagatttcttgtgacaggaagaatggaaaactttggctatctcaagaagcttatgttgaaaaaagttgttgaaagatttaacatgagcagagctaaagcagtttgttctccacttcagctactaaacaagatagcaaatcagttggaacaaactctaaattgaaacgatgactagggtataacatagcagcctttgcgaaattatgagtcactatattaacagatcatttaacaaatgaaacaataacaccctttaaacttaaacttgctaacaagtttttagaatcattaataacaataccaaataacaatactatagacaagagactctgcaaagcttgaacaacacacatgcagtcggtttccaccttaacccattatacgtttagtatgtttagttgcttgtggtactttagttgatatttaatttattaattagagagataggctttccccaacaacacctaccataaaaaaaagagaattttgttgttaattgtggcccatttcatttatagttgcacaaccaaaaccagtataggtaatcagtggtagcagttgaaagtactatataatatccattcattctcttccataatccatccccacttcagtctctaaattcaacacttttcttttattttttcattaaataaaatcataaatatataaatatatatatagctcaactcattattattacaccgacgtcggaatttagatcctcctctttcctcagatctcatctacacagacagagactcagagagagagagagagagagtgtgttactttatgtcgttttgcttttgtgctcatacaacttgatacccaaaactctttttcattttcagattggttaaaaagattcttggcttacaaggtctctcttctccaatggcggtggccgttcgaggaagccgtggtggaggaggtggattgggttttggtggcttcagtttccggagcttcttctcctatcggatctttgtttctgctatgttttcgcttctcttcattgccacgctctctgttcttcttaccacaaatccttcaactccacaccaccgtgattctgtaagttttattctgttttttttttctttaatgatgggaaaaacccattttggaaaattgcgaaattggttatttgaggaaaacccaattgaggatttgaagaatgtagcataacccagattttagttttgaacaattttttttttttttggacagacacttccgagtaatggtatacatagaacgtttcttgctttgcaatctgatcctttaaagactagattagatttgatttataagcaagcaagtgatcatatgactttggtgaatgcttatgcggcttatgcaagaaagcttaagcttgatatatctaaacatttgagattgttcaatgatttggcttcggatatttcggatcttcaaatgaaacccacttaccgaacgtccttgtttgaatctgatggtccggttgatgaggatgttttaagacagtttgagaaggaggtcaaagataaggttaaaactgcaagatcaatggttgcggaatcgaaagagaattatgatactcagctaaagattcagaagttgaaggacaccatttttgcagttaatgagttgcttatgaaggcgaaaaagaacggtgctttcgcgagcttgattgctgcaaaatcagtgccgaagagtttgcattgtcttgctatgaggcttgttggggaaagaatttcgaatccagagaagtatagggatgaagggcctaaacctgaatttgaagatccaagtttgtatcattatgcaattttctcagataatgtgattgcagtatcggttgtagttagatctgttgttaagaatgctgcagaaccttggaaacatgtttttcatgtcgttacagacaggatgaaccttgcagcaatgaaagtttggtttaagatgcggccagcggaaggaggtgcctatgtggaggtgaaggcagtggaggactatactttcttgaattcttcttacgtgccggttttgaggcagcttgagtcagcaaatctgcagaagttttactttcagaatcagcaggagaatgcaacaaaggatacaagcaacatgaagttcaggaacccaaagtacttgtcaatgttgaatcaccttcgattttatttgccggagatgtatccaaagctgcacaaaattctttttttggatgatgatgttgttgtgcagaaagacttgactgggttgtggaagattgatttggatggaaaagtgaatggggctgttgaaacttgctttggttctttccatcgatacgcccaatatttgaatttcacacaccctctaatcagagataagtttaatcccaaggcttgtgcttgggcttatgggatgaatatatttgatcttgatgcttggaggcgtgagaaatccacagagcaataccattactggcagaacttggtaagtatatttatgctgtttccataatacttttatgagttttgtttcgaaaatttgacttgcatacgactttagatttccaattttctctcaaaagttgaaatattgttgccttttctttcaatcagaatgcagatcgttcattatggaaacttgggactcttccaccaggcctgatcactttctactcgacaacaaagtcattggacaaatcttggcatgtgcttggacttggatacaatcctagtataagcatggacgaaatcaacaaagctgcagtcattcactacaatggaaacatgaaaccttggctcgacattgctatgaaccagtataagaatctttggaccaaatatgtggataacgacatggagttcgtgcaaatgtgcaattttggcttatagacaacactactagcttggttgctctgaatcgttcttcaggtgacataaaatacagtagtagtatcagtagttatctctcatgttttccagtaattacctctcatgtttacttgttctcacatgtttttggacctctttccgagttgcaaccctcagagcgaagctcagtgattctttgtttttggtggaaaacagtgtccgataattctttcttttattgttcattcagtaattcatgtcaactatggatttgtaaacaatgagatcgagtaatgtatacggtgcaatgaatttttggttatttttaccatattgtaatattaagatacagattgcagggtgtgataagacttatcatatctaatttagtgtacttctatattcttttcccatactttgtgtttgatgatattaagttcaactgtaaaatcaagttcttgattcatgcctatctttttcagattcagagtccttgcatgggttgaagatgcctttaatcttatctttcttccctttcttgagtttcttttagatcaaggctttgctgctaattgagatcagaaaagttagctgcattaaattttctttttggtggttgaattcaatattacccctctagcttcttaataagagattgcaaaatttatggatagagaagagagccattggatgaatttcaatgtaggtctgaaattaatgtttcgagtctgatatgcgattgcgaccccgtattcttctgatgaggggtccatttatagcctcagatttctcttcatacccccataccccattggattgattggtcttggttctcctcatcaactaagacttgatggaattttaaaatgggtgaaacgctgcaattattccaggtttcgaaggaaccaaaatgtacatatgatttatatagttgtaaagaatatcaaaaagagttgatagagattggttgtgtcaaattatgacagataggttgtaattgtaaatagcctgatgttttgtaacagttttgttgtgcaataaaatcatcttacttaccaccaaaaaaaaaaaatgtcgcctaaagcacttttacaaactccaagttgcgtttttgcataccctatgcaatgtccttttggacatttccaaacaattccaaactttttgagtaaccttatacactctataaagtcattttaaacataattaaaaattatattttatactttattaaagtttacataattataatgtgaagctatcgaagatataaaataccataattgtgcttaccttttattatatttatccaaaatattcattcaccaagctcttcttaaggttatccagtcatgaataacgatgcctcctcaaagagttgatttgtgtgtggattcttgtacagttttggtgttcattcattcattcatttcatacagtttccaacccaacttgattgctctcaactgaagaattatcaattataatatgtttcaagtcttcttttatcatctatattaccattgtttcatgataatatatgtatgtttttcgttcaaacaaattattatcagtataaaaaaaatcattactgctagtttttctacttgtgattctcctatttccatctagctagcaagatctctctagaacacactcctcaaccaccaaattcttcaatattgtgttgattccagaaagtcaggcggcgttcaccgcctgatcaaaatcaaagaatttcacagcttagcaacaatcgttactgaactgaccttagattcaatcagtacttaaagagcttcacagtcagtcttcttcctccgccctcgatatggtgtgaaaatcttagatcagtattattagctgccaatccaattccacatgttcctacaaagcataccgaaattgacttgtattttgttctggataaagtactcaacaaacaaattcttgttcaacaaagcccatagttagttctcattttccttttcttagagaaaacaatgtgttgcttcttcaaacaaacttaggttactatgagctgtagtttacttattcaagttagttaggattgtaactaatcttattagttgttaatgctgttattttttttttatctctacactatgaacaacatttttattcaatacttgatttacctt

SEQ ID NO: 189050 - DNA, 3475 bp, Cannabis indica
atttgttctatgatacctattcctttttccatgtttgtgtttttcagctagctcaatttctcaaggacattctctttggttaataatcacaatggtgttcgtttcaatgattatgtcgaatcagtactagtaatgcactgaggattctggagcctattctgcatagcttatgtacaaatttcttataggtgcatcagtgcatacttttgattatccactccacacaatcacatctttatgattgatttttggttagctattacaacttaatgataaattatcagtattttataaataagtggatacagaaggagaggttatgtttggctgagccctttttttcctgagatattcagtcaaatatgttatttgttaatatgaaaatgaagatatcttgctctactgaaactattgatttttatattgtttttgggttaactttttctcctaataattatcatcatctgttgtgatttatatttattttttattaaactactaacgattttattttatgttaaaaataccacattttaaaactcaatttgagtattgggcaatttgggcatttgtgtattattaagaatgttaaggtgttgtgtattagagcttgatagttagttaagtgagctgtaatgggttgtcattttctgttgagagattgttatataactacttttttggttctggtccgatccattgttttagcttgtatataaatgctctgatctcattcaatgaaatattaatgaacattttcactcattcattccatcttcgaattctatattctgttatggtattagagccacgtgatctgtgagctccttgttcatcgttctccttcttcttcttctttgttttgcttctctattcttccatggtgagaggagtaagcactcaaactcgaagcattgttcaagtaaattctgacaactcaaatcaattctctgcactcgatcaagatcacaaattatcctctaacatagatccacgtagtccatatttcttatccaatgttaataacccatcagctactctagttccaaaaatccttataggagctgagaattacagctcgtggagacgattgatgatggtggctctcttggcaagaaatatagtgaagttcatcaatggtaaacttctagctcctgaggaagatgatgaagactatgatgcgtggagtcgttgcagtgatatccttgattctgcattcagtgtctcccacgatagtagatagcatcatgtatatggaggatgcatcatgcatctggtctgaattgcaggaacgttttcatcagaaaaatgtactaagaattttcgaagttaagcgatcgatgcagaccgtgacttaaagtatgaatgttacttcatactacaccagacttaaaagcctttgggatctgttgcaagaatataggccacaaacaatttgcacttgtggtgctatgacgactatacaagaatatcttgatgaagataaggtgcttggatttttaattggattgaatgagtcttatataaatgtttgtttgtagatcttacttcaagatccccttccaaatgtcaacaaagtttatgcagctgtgattcaagaagagaagcaaagaggaataatcatacttctgactgaaaattctagcaactcaaatgagaatgctagacaatttgttgggcaattttctggacatggacctggaaataggaacaacaacagtaataaacctgtttgtacacaatgtggagtacctggtcgtattgttgctaagtgctacaaaattcatggctttccaccaggttataggttacatggaaggttccctaaagaaattcctaacaagcttggaaatcaacaaaatcaatcttcagcaaacttttatgcaggaagtgattggccagaaagtaattctgatgatcatgatttggcttctcaatgtcaaaggctgatggctatgctaacacagaggtttcaatcccaatctcaagctcaggcttcctcatctcattcacgtaatcctcccacacaaactgatcagtgtcaaactgatcataaccaccaacaaccaacagtgtcaagcatcactggtaatgtcaattctatccctaaaaatagctggattatagacacaggtgctacacaccatgattgttctaatccctcattttttatttctatttagaaaaattctagaaataattcggttggaatgccaaatgttgttagttccaaagtcttgtttgttgaaactgttaaaattgcataatattgtgctgcataatgccccttatgtgcccaattttcagttcaatctcctctcagtatgtgccctatctgactcatctaattactcatttcttttcttgccaaacaaatgtgttgttcaggacattatcaagaatcaagtgattaggatgggtgaaaagattggcaaccttaactaccttcatgaccaacttgtttcttcaattttttctgttgttaattctgaaatcagtgatgaaaccttatggcattataggcttggtcatgcctcatccgtaaaaaatcattctatcaataaaattttacggttccaatactctccttgtcaaaattttcattgctccatttgtcattttgctaagtaaagaaaactacattttgtgtctaatcataacatctccaaacatggttttgatttgatacacagatatttggggaccctatcacacacaaaccactgaaagtttcaaatatttcatcaccatagttgatgattgctctaggtacacttattcacctcattaaaaacaaattgtgataccagctttcattcaacttgtaaaaactcagtatggagctcaagttcaatggattagacctgataatgctaaagagctctaattccctgagttgttctcatctttggggatcatacattatcattcatatgttcaaagaccacaacagaattttgttgtggaaagaaaacatcaacatctgttgaatgttgctaaagcactattatttcaatcccatatacctttgatttattggggggagtgtgtgactactgccacttacttgattaacagaacatctaccccaatttaaaacataagtcaccctttgaaattctaaactcgaaagttctcaactatagccatcttaaaaattttgggtgtcttgcctatgtgtctactctaggaactgctagatttatattctgtcctaaaactgttgcttgtgtttttctagggtatcctgtaggcatgaaagcttacaagcttcttgatctcaatacaaatcacatattttgttctagagatgttgtgttccatgaacacattttcccatttgtgtctactgaatatttgccacctcacatctcagattttttccccactaccattgagtctctgaatactgatttcacacaagaaacacctcagtttcactcatcaccttatgttgtacatactaatctcaata

SEQ ID NO: 189051 - DNA, 1204 bp, Cannabis indica
tttattttaataatattttttattataattataaagttatttaattatgtatttatatgagtctatagtataatttaaatggataatttacaggttgattttgatcattcatgttatttgcaataaaaaagaagtgtaaaatttcacattatttgatcagtgtgtactagtacagaacagttatatatctaggattgtaggatctaatttatttgactaatcaacaaatgagaaataaagaaaacaaagaaagtgtgtattcaaacacgatgtttaacaaaataattacttgccaaaagtatagataaagcaggaataagaaactcgcatgtataagtatttaactaaactttacaaaaggcaaaaggaattgctaataatgagatgcagtcttaaagggattaataacagcaaaagtgcatccaaagttaattattgcatgtattcataaattgttttattatattatattatattatattattatgtatatatgcatggtgtttctttaagattttcctttctccacttttacaatctaatggaatgttttgccaataataatatgcatattagtacttaaagaagaagatcacgagatagaaaaagtaacaataaactaattaggaagttcttactactttagactagctaactttagtattacatctcttggagtacctcatcagaattcatatatagcacgaacacctcaaatctgaatccatattagcataaatggattagacaagaataatatcaatatatcatatccaacactagaccacccaaacccagtttgatacctaatatactaagtagcagaaaccaatgttattttaatataagtaccaacgaaaacccagataaaaatagacacaaaaagagtgacaaaaatgacaaaaggtacagtgtgaaacaaaaaaaaaaaaaagtaaaaactaacttaagaacaaactaaaaataaaagaagaagaagaagaagaagatcgaatatataggagagctagagaaaagagttcatttcgatcttggttcctttttaattaggcaggtggaggatttttctttgctagattatgcttgttgttgtgcatccaaaccttgagaactctcctcttgactccaatctcctggcagaactgttggaccacagattcttcttgcttctgaattttccatccaactttttcagcaaagttaa

SEQ ID NO: 189052 - DNA, 3273 bp, Cannabis indica
cctgataaaataagttctaacaagacttggggatagcaaagaagatacttggaataaacattaaaagagaaaggtctcactagatcacattatcttagattaattaccggaagaaggtactagacaagtttgtgttaagcaactccaaagttgtgtcaactcccttagcacaacacttcaaaccatccatggctcaatcaccaacaactaaagttaaaagaaaacacatgagccaagtgccttaagccagttgtgtgggaagcttaatgtagtcaatggtatgcacaagacctgatattgcacatgccatgagtgttactagaaggtacatggccaatctaggggaagaacactgatctgcacttaagtggacaacaaggcacattaaaggaacactgaatacaggattggtgttcaatagcaaagatcatttacatggagatgtaactgggtatgtggactctaattatgttggtaacatacacactagaagatctctaactagttttgtgttcactgtctatggaggatgtgttagctgaaaatcaaacttgcagaaagcggtggattcatcatcaatagaggcagaatagatggcagccacaaaagacgtcattaaagaagctatctggcttaaaggaatgccaagagaaatgggaatatactctaaagatatcacagttttctgtgacaagaaaagtgctctgcatgggattttttatgagagatcaaagcacatgcattgacataaaactgcatttcattcaagacataaccagttcaaagcaagttcaagtcaagaagataggcacaaatgacaatcatgcagatatctatactaagagcaccgctagtgacaatcatgtagatatctatatttatggcataactagtgataagtttagacattgtctaaattttctgaaagtcaaagaagcctaatgtctctttacaaagacaacctaaattggaattagaaagcagctcagctctttatatgctagacaaagtgttcaaatgatcaaactaggtagaattattgaggtatgactatcatgtgccacaactattagttagaatagtttgtaattgacctcaacagactttactaatccgatagttaagttaattaagtcttcagccttttaggaggtctgaatgacactataaagagggatcacatgtaatatgtttaattgagaattgaaagaagaaaagaagagtgttggagggttgtgaaagatactctcatgtgtttgattaagagatctcaagtgaggtttatgtaaggagcaagtctccatcgagtgaagggtatttttgtccttgtgttgtacctctgttctagcattaataaagtttcatatacaacaattaaaagaattccttctctcgtggattaaactcatgatctccctgattgtgtagtccaatcacgtaagtttttgtgttcaatgtatgctttcaagttcgagtttgtttcgttcaatttgattcattctttgatctattattacttgattcggtgttgtgtttggttcttgttgggggtttgagactctacaactatcaaactttaatttttgtaatcgaataaatattatgtgtgatcgaaaataatttaaaaaaaattataaattaaatattaaaatattctatttatataaaaattagtcaaagttattaccattaaaaataatgacattttcttaataaaattaacaggaaaaatattacatttttaattaatatgtaaagatgtataaaaataattgtggccgacacaaggatgcattaaaaggagagaatataaattgattgatagaagttaattttgggaatttagaaataataaaagaaaaatctgtggggggagttttgtcacattatactactttttctatggtagaataaattaagtaaaattctgatatcacatgggtatttatgatggctattatattattactatatatatattattctaagagatccttattatcacggacttaacagtcactagatgctaaaactcattctccatttccaaaccgcgtgttcttagatgggttcattttgtcgcaagagaattaaagttgaagaaaactgtagctactaaaaacctaaaaagatttattgtttagtacccagttgccgcaagttgtgtaattatccatctctatatcaacaatttgaagaattgactcttatataatatataaaaaaattatgtgagtcggaggatcaatcatgcatgtgtggcctgtggcgtcccttttaagtcaatatttcccgacaagttataataaataatgacaaaatataattattgatcgattatatatagtacgtatacatgcatgtatcaaatgctacaattttacctcacataatcatacaattaccatttgcgcataataatgacagtagtggtagtactgtagctgccaacacattattaattaatcattcatcgtaaattttagtaattgtactttgctctatcatttatcaaaatccaaattccctaggtccataaatcattataagtgatgcgtacgatccattatattgttacccaaacgtacgtattaaataaaagagatatgaaccgcaaaattatttaaacttatgattagtgatatcgaatttcccatttccttgttccttcttcttcttttgcgacgaacccaaggatgaactagcgaactccttcaactgcggtggtatcggcgaagagttacgggagagggcgaattcagttctggcgagaaagagaaacttcgaagaagagttgggtctcgaggcttagagggaggttgaaggattgggtttgtgaggttaagaagtcagttttggggttcgtttagtttgaaggtggccgaaggtgatttctggaactgtgcaagaaggagaacgaaagagagagggagtgcgagtggaaattagggttacagtgagagaaacgtaaaagaaaaaataaaagaggaaaaaagagaaaaaagaaaaagaaaaaaataatattttaattattttataatttaaatatctaataataaatagtgaactaataaattagcacgtgtatacttgtgtacactgtggcatgtctaccatggcacttaacagagtcttttggtccgaaaggggtaaagtaagctaacaaaatagaggtttggtaggagttttactaaccaaaactaatcggtttaattgtcattaattaagtagtcactaatcatagagttcaggtaagtttttaattcgttaata

SEQ ID NO: 189053 - DNA, 2528 bp, Cannabis indica
atatggggtttacttcaacaatatatttaattaattaaaagtgtgatataataatattaatgggccttttaattattgttaattgctatatctcttgtgtgtagaggagaggtagaagcaaagtgtaaagagaattaaaaaaagaattagggcaagaaaacaagccacattgtcttggccatgaaaactaaaacctaattggttatggaataaaagattacatttgagatgaccttaatgtatcctactcaattggcccattaattgctagttgggaacataagcacatggtttcttcatgagttaaatcacaacaaaacttaattatcttgtcacacacaaagcaatgagtgataatagatgatggaaacatgagcatatcatgacattttgcttactatatgtggaagcttaagatctcaataacaatcattaataggttaaacaatcctattcatacccttctaatcccttcaaaagcattaatttattttaatgggttttttagcaagacatatataaattatacataaaaaaaaaatagctaatgtaactctctttgatttatgtgttaagtttcaaaagagagtaattaagaatatgttgtaaattgagagagataaagagagagggaattgactttaacaagaaggcaacattataagaaaggtgtgtttgaaaccccatttaacccatcaattatcaaaaggtttgtctggttgaaatgctgctcttatttgtaccccatctttgaaataattacatattattaacttttgctttatagtgggaaatgatagtcaactttcttgcctcatttacatcattacttttaattttgggagagagcctctgcccttaaatgaactgtttgagattctaataagggtttctcttaacagattttgattagaggtgtctaatcagattcacaaaagaggagcacatacatatatacaaagagaaggaaaaaaaaaaagctaagtctaaagcaaaaatattttcaaattataattaaagcattgttattagatgctagtggtgtctggtaccatcataaaataatattcacgatatcatgtaattttaattgttaaataaaaatatgtgagactcaatatttaattattattacactaataattatatatcaccttgtagtagtgttggaccttactagtgtcttttatattttttttttgatgtacattgctatagcaccatttagaggcagtgtcttataaatagttagcgatattttatgataattatttaattaaattatatgagctatcctggtttgaggagatttctacgctgtttgcagattttcgcatcataaattcatgagtgattctaatcactacgtcaaaaaaaatattatatgagattcgatgcttaattatatcaatagcaatatcacttcagatggtactaaacaccactgatatcttttactattaatcttttactataattaattaacaccaaataaactcattctttagagcatctcaaccaccaccaccccctctagaggcccgagctaaattataaatgaagttcatttggggggcttgagtaggaccctaactttttgttacttttgtaattttttatattaaatcagtcaacaaaaaaattaattcatgccccattaacccagttgaaaagattattttatttttggctcaatcactgtccccctcctccaaaaacaaataaaaaataaatgcccttaattaattgttccccaaatactaatttaccccatcatggcatcatatcagcttctttaattaacaaaaataaataaatcattttacacattaaaagcagaggtaaaatatagttgacaaggattattttaatcacacacatttttgttttcttggttaaaaaaattctaaaaagtagaaaaaggcagtatttactaaacaatatgcaaaatcaacagttttattaaaacaataaaaaaaagttataaccttatcactagtgggaaaaccattcttgggattaagtgtactttcactctgtttagcagactatcataaaagctcatgattatatgtcagaaccatatcctattaactcatttgtttattggtattttctttttctttatttattttttaatcttttgggtttttgttgggaattaaaaaaaaaaacttgaccatgctatacttctaataacaaggttactcattcctgcagaggaatcagaagccttaatgtgattgataacaataaatgtttgaattctaacatgtgtaaataaggttaattatgctgtatatatggtttatttattcatttatccaaaaaaaaaaaaaaagaatgaatttcaagttggtaaatttagtaagacttttgggttcccctaccataagagaaaaaacggctatgtctaatatgagaattagtttagataagattgttgaactgagtttgtgagatgatatattagctaggtcataaagtgtctgctattacttaataaataatatttaaagaaactaatt

SEQ ID NO: 189054 - DNA, 2022 bp, Cannabis indica
tattgaaaaatggaaacaatttagcatcaaaatggaaacaactagtatttaacaacacagaaaataaaaaatgaaaacaagtcaaaaagaaaatggaaacaactagagtttaagttcatatatatatatatatatttaaaccagaaagtatttagtttggaaatattttatatggtgatctatgttttattagtaagaaagcacttatgaaaatacacattttccttcattaaaaatttaacaaaatttagaggataaatatggaatattaagatattggcatagaaataaaaaaaatcctaaaaccctttaaccttacattcctttctctatcaacctctctctctctctctcattccattgctctgtctccctctctctctgataaggcaaaagccgatataccaccaccaccaccgcaaagatactctcctacactctccatcactctcttccaacattctctccgttttgctttcgaagctagtgccaccgtccaaagctttcacatcgacagtaagtattttttaaattttttacatatctaagaaatttgatagctctgctagggctagaggtactaaccaacctttctaatggtagaactaattattgtggaagctattcagtctttaaggggtttcattgtgggcatttttatctccaatgaataactgatgagctcatttgctcattaaccttttgacaaaatcttctgattagtttgtttaagctctttaaatgacatttttgtctgtgagttcattttatgactagtgatagtttttttagtgacagacctagtctttgtattgatgtatatccatatttgctggtacaatgtggagtccacttggtacaatgtggagttttgtatgtacaagttttcaaaagcttttgtgtgtaataagagtaacaacagtacatttatatgatttgaatgatctataatagtagtaatagtcattttaaacatgtatttccttgacagacctaatatctatgttcttggtgaaaactctagccgctaatccatatttgcttgcattagctcttctaattacttcatcaatcttcctggggttgaacaaagtaaacttagaggaaattcaaagaagcttttatttctgaaatagactcagtaaattttcttaactttaacttaaattttttatgctgtagaaaatgacgaataagccaaagttcaatataaaaaccaaaaaaagcaaatcttcttcaagttcgtacaagaagaaatatacaaggtttaaagagtgtgctaaaaaaactttcagcaaaaaactaaaagagaagatattatcattttaaaggtacttaaataattgtttattaagtttttctcataaactcttataaaccatttaaaattataattaattattttttgtataactcttttgatgcaaattttgacaggatataaaacaagagaacacagaattgaaaaatataatagctgaacttaaggaagaatttattggctttagcaaagcattagaagatgtgactgaaattaaggagcaacttagtcacatgaattgcacaatcaacaaatttgggcaacttttgcaaacatttttgaacaaggtatctgcggagaaaggcaaagaaaagaggaaaaagacaaagaaaaaaacaaaaaaggcaaggaaaaagagaaagaaaacaacaaaaaagtcaaggaaaaagagaaccaaacaacaaaaaaggcaagaaaaaagagaaagaaaacaacaaaaaaggcaacgaaaaagaagaaaaagattagaccgaaaacaacaaaaaagctgaaggaacaatcaaagttaatgaacaaggcaaaaaaggagaagaggacgaaagaaaaaaacagctgacaaaagaagaagtgtaataactaaaatatttgtttattatatttctattatgctagtctaaaaatctcgatgtcgaaatagtgattgcatagaataagttagtttcttgaatagaggattacttttatgtaagatttgtgttagt

SEQ ID NO: 189055 - DNA, 1403 bp, Cannabis indica
tgaggactgtgcaaaattttctttaacacataagcatgatttaatatgaaaacaaaaacagaatgatacgaggatattaacacacttcataagatcagagttactccaatcattgtcaacttgtggttgaaatctcgcaatagtaacaaagtaatagagcttaatagcgcgatacacgtatttgcttcacaagaatagtgagctaaaaaagccattagagaattagttcaaaatttgtgctgaaaaaagccaccatcttggatagacatataaagtgtctagcattgaaattgaatgtgaggatattaacatatttataaggccataaattgactcttaaccatgatagggctagaatttatagtgaagggagcataatgtggctccatgcttttatgtatgtactatatattggaaactacatcacaaacacacaccttcactagtataatcttaatataccttagcgaaattagctaatactacattatcatgattatccaaacatataattagaagactacaatttcaacgttatatatattcttcatgggagtctctctaacctgttcaatactatagcttttgttttctcagtaaaagatctcttaagtgtttccggattcaatgtccagtggggtgggtcaagagccacatatacctgtgaaagtataactatgaatacaaaatattttatttaacaaaagtagctcttattatataattccatgttagtagtagttggtaataaaggcacttacaggaacccctccagccatggtaatacatgcttcatatgtttcaaaacaaggatcaaacagtataacttcatcatctttgtctattactgtagcaaagtccaaagcacaacaaaagtaaaaaaaaaatagctataaccttgaatttttttgttgaaaaaataaataaataaagattgaaaaattttacttgcaaatacagctgctgcaaacgcctcagtctggccacaacaaatagctacatcagtttgtgggttgacatctaaattatgcttctcattcactatctttgccaggtagtcacatactccttgaacatgcctttaaataatatatattacatacactatgtaaataatgttactcctaattatgattgtccccatttacaaaaaaaaaaaaaaaaaaaaatactcatgattatcctgcttaagtgacatttataatcttcatttttgacatgctttatagggaggggctgatattaattttcagaacaatttctttttattttcgattgcttcactctttctgaccctccaccttctcgttctcttttttttctaggcacaacaaattgtgaaatcactttctcccctctctatttcttctacgcatgtttgggaatgtcgttttactcctttg

SEQ ID NO: 189056 - DNA, 4269 bp, Cannabis indica
cttcgaactctctcgccatagtgggaaattcgttgatctatcgagcttctctagctcgaaccttgacattgacattctccttcaatttatgttcttgtagaattccttgttgaattcttgatgagttcttggtgcagaagcaagtgatctttaaatcttccttgatgatcgaagaaccaagctctgatttgtgggaaatttagctttgatacataataatcaacctctgtaatttagattcaagatcacacttaaacaaacaaaaattaaatcaaaataaacaaatcaagaacaaaaaaccaagcaaacacataaagcaaaaaaatatacacagatgaatctaaatggcagtcagacacaataacacagagatttatactggttaagttcaatgtgaacctggtcatactccagtttgaaagttttatcaccaatctttattgataatgagaacaagagatatcaatctcaggagctacaaggaaataatcacagtaagtcatccatggtgtaatccctcaacacagattaactcactaactcgagccaacataatcaacaatattgctcaatacaatttctcaatcctagccctctgtttctcagatatctctctccatttcccactctaacaactctctctttctgtattgtgtctctatcttgtgtttgacttcactccttcttcttgcatccttgaaatgagaggagtagttctctttatataggctaatggacgaatatgcaagttgtcctatttaatagttaggttagttaaagactaactaactaattgaaacgttgttgggggtttaagcaataataccacaatttatttatatatagagtgtatataatttttacaaaacattatcatgtgctttgtaccctcttcaatacatataatatatggaatatgctcaaagttttcattatatttgtgattagtgaaatgattatatacttcatatgttgtgaccacaatactttcatctttgcaaaggagtttcgcttataatattataattacttatgaaaattagaatcattacaataacaactcattatgactacctattattcaaacttgtgcctgtccaagcttgatctctgaaggatcaagtacccccaaatgtttttcataggtatagccatttctgttatatctctaatatgtcaatatattgcctttgataggaaaagatcacgggcaccaatacagaaacattgttgcttttataagatgctccactatactaaattgtcgtttttgtaattgttaccattgttcatttgtagatcaaatttaaccccttattcttaattatcttctttcataattactattatgatcacagtactgagtactttttgtagttgctgccaattttagggttctataactagagaaaaaaatgaaggtggtgcttattcaaaatcaaatcaagccctcaaaaaacagcctcttaaacatcaaagagaggaaccgttaatttcacctatcccacttaattcgcttagttgacattttacagattttgcttaaaatgttctaaccatctttatttacttttcatttcaatttattattatatttcttctaagacttatattaaacatttaatttttttaacataacattatttctttcattaaattacatattataataattaaaattattttaaaaaaaataaccatacacctattcaaaaccttagtaccttacattagtgattagtccatacttagagtcaaatttcaaacaaaaaaaaaactaaaagtaataacgtacaaatattttactattctctcaattaaagtgacaaatcatcttaaattataaataacaacttagtatttaatttttaaaattttagatagtctttaattttcttttcaaactgttattatatattatttctcaaaattacattaggcaggttaggcccgcgcctaaggcccactcattttaagagtcaaaataaaaaaaaatacattttaaaaaatatacgtttttaataatttttaaaaataccatttatctttattataataagggccaaacaattttttttttgtctatggcccatttaaactcagggccggctgaacgaacgtgcattgcacgtaacttcaacctaataattatataattacgtaattggaggtaattagaggtcttagttgcagtctttaattgggtataatcatatacaatgtaattgctcgaaactttttgttttaaatattttgctaactaagatattaggaattcataattaattactatttcatattccaacatgtattgttttttaaaataatgtaattactatattgtacaattattaccctaataatacttagtaattacacaattacttctaaatgcatccttagtattttttgttgacgttgaaaagcaatcaactctgaactgtttgataagcggtagcggccaaacaatttatgaatagaaagtaaatgagaacaccacaattatagtagttcagtcctcttatcgcgaaggtaatagagcaatgtctacttagagattttattatcacaaaaagttaattgtcttactttagaattcaaagaaaaatgactaatctagttttgcttcacaatttctagagaaagaaactgtgaagagtgagaaattctgaccttgtagagaggaagtaaagtgtggaaaatgagcttgggaagctctttataaggaaggaggactaactacattacaataaaataataggaaaatttgcacaaaatttgctaggaaattctacactacctcgcgagtcaattttgaggtccaaaaatttggaattgctgtgagagtatgagacacttaaatgcgccttgaaaatagctttaattttccactggaatcacgttatttggacaaaaattgagagagttatgaccattttgttgagcggtgtgcactgctgaaaagtgattgcaagattagcttgcttttaggttgacataaacatcaacctgggcactcaagactctatttcttgggctctaggcatattttgagatgcttgaatgatgcgttatctatccttagttcattctttgaccttggggaagttctcttagcaattttacttgatatgcacaggtgatttccagtgtttcactagagaggactaggcgacacctgggtgatcactagtgcacagtggacttgcgcatgacatatgtacatgagatattgacttgcaaaagtttccaaatgttattttgggggaaatataagattgatgctcatagtgaaactgttgtttgaaggatagaacaccgagcctagggccaatgtcaacctaggtgcttagtgtgcttgtacaccggtgcctagtgatgcctgggggctaactcactacttgaaaaatatgttctcctttacaagtctcatatatcttttttggagcataacaagatgaatgatcaagatagaatcccaatcgaatcgacagaaccaccaacggggtggttatgtcaacctaggcgcccagtgactagggtgatgtcaacctaggcgcttaactctccaactagggcctagatgtctttttttctttcccgaaagcaattgtatctttcttgtggatgaaaataagggaaattcccagacaacttagtcctggagtgcccccggttgagatacgtcaacttgggtgccccttgggccatgcactgggtgcccaggtaggggtcaacatctttgaaactagtttaattgatgttcaatcttctttttcgttaatagtgctccacggatttcagttttgtcaaattttcatgagcagaacttggtgaaacaaaattagagcccaagtttaaatgttaacatgggcgtccatagttttgtataggctctttcaagatgtttttgatgaaatatcatatccttgtattgttccttgatggatttaaggaattggggtccaaggatatccccagaaacctaaaccctaaccacggttcgcccaaatcgactatatgtcaacctgggctttcattaaggcttcttggttcaatttcatgttgactcatctccaaagtttgaaacttggatggggtatgtctctcatgtatcttaggaaagtagctaagaagatttcccataagaagttgatgggaaccaaagctgatgcaagacggcgcatatcatgtcaacttgggcgcccaacactgatgctggacccaggttgagccctgagatgctcacgtgacatcctcaacttcatg

SEQ ID NO: 189057 - DNA, 2326 bp, Cannabis indica
tttactttctcatttaaagagaaaaaaaacacctgtttagatttcagtatatttggtaggaaaattagaggttggaataatttagaattatagatcaagataatgttcctatatcttgtggtatatatagatatggtctactcatttttctctctcttttggatgaaaattcccaagccacatctttactctaaacatttacagaaggggtgatattttttgatctttattatgaaaaaaaataaaatatgtgagaaggtataaatgttaaccaaattgcatttttggtggatccatttacacataaatataatttatagtagtttgattgatcaatcattccatacaggaatgattccttgtgctgccaaacgcttttcaacccagaaaaccacatgtcttgctgttattttcttctcatcaataagaaatggctcaacagtgcttacttcccctccataagaggacaatgaaaaaccttttggacctgttaagtatttaaacatacaccaaaataattaattagtagaatgttaattttaattttattttatttgttaaattatataaaaataatattgaattataaatgttgatcaattaattgttacctgtgaggaccccatcaggaaaaaatgcccaaaatgaatatggattgcctttcttagcaaaggagccttccaactgagtaaatattataaggttaggtacgtataacatttgtttttttaattaagcaataataattattataagaaaattttgcaaattactttaaagggaactaccgatgtattttcgaaataatttttcaattaaattctttcttatgtttatgtacattatagttatttaagatatcctgtaaaattttaagaaattcgaaaatatttaacacgccaaaaacaggattcaaatattgtattgcacgcgtgactattttattttatacgcgtgtaaaatagacttttgagcactgttttctatattgtaaattattccaaatttatcaaaattttgtatcttaaataactataacgtatatgaatattaaaaaaattagacaaaaattcttttagatgccaaaataggtagttggtgcatcactgcattcaggtgcattttagaagacccattattatatgaactaaaatgtgtaccttattatcttggaaagaaagctcaatgtcagtaacatcatcttgagcctcaagaatggattttagtgaagggattacttcttctttcatcatctccggcagcgccttcaccggtgctttagctttcggcttcgctggagctgctttcttagccggcttagcttccttattttcatcagtagctactgaagattaaaaaaattaaaattaagtggaacaaatcttatattaatgtagcacaaggattaatgcatataattaaaaaagaaaattcagatattgttagagcataaggatttaatttaagaaaatttgtaatgtaaatttctatgaatattaattaacaaaatgacttgtaataatcacctgtagaagtagaagattcttgtacggcaaaacaggcataattacttgtgcgaattgttaattgtttacataccatctcctaatttaaaaaagtagcttaattaatttataaaataacttggacaaaataattaatgtacataattatttatagaaaataattgagaaagaaagagaaactattattttgtgaagaagagagtgtacataccaagtggaatattgttggtgagattacagagggttttgcattttgatttaaataagatgaagatgaagacgatgatgatgatgatggaaagcttgaaaatccaatagcagcacttccatggcctctaagcatcattgccatgttactttgttctgtcaaaaactacaaattgttacacttttttcttttttacttaattatgaattgtatatttgaggaagaaataatgaaaaacaaaagtgaaaagagagtggaagaaacagagaagcaataaggaccaattagtaagagaagtatatatctttgtaatagccacaagttgtttggagaaatatgtgccactcattgcttttttctattataataattttaatatatgtacgtgtgtatttacagtacctagctagggagattatttcaatggaatataaaatctaagatattacagcaaagtagtaagaaattacaaggacaaattgattgaataaataaaagttacattttattctcttttatgaaaattgagtaataacttcattaagaattagcattccaaaccaactccctactgttagactttttatttggg

SEQ ID NO: 189058 - DNA, 1357 bp, Cannabis indica
aaaacagaacaaaacaaaacaagctggacaaaaccagcagcacaagattattctccatatctagcacaataaagtttgtttgcaatattaatccaaccaacctttagaagcgcctcctcaagaacaccccttggataaagcagattgatctgccaattaaagtgtgatagaaattggttgtatttccccaaaccctagcttctcatatatcgaataaggtgtcaaatttatattcctccatagttacataaagctctatcaaaagattgatttttttattgtgccaggaatgacaagtccttggatatttaagctctagaggaagcttctatgtagaattgcgtcgcatggctcattctatatcatcatttcattctccgcccacttatttttttttttgcttaaatgatcttcatgaactgtacataacttggcatttgagctaaagcattgataaacgggaagttgatatgtggcttcttaaacacttccaagaagttggagtattattgccacgatttcttctttgtaagccatgaggaaaggtggtggtggtaattagggctctgtttaggcttgggtgtcatattgtggtatccctcacttggtctttcttcatttttcccttgttcatgttcaatattctttttctagcttgttgcaattattgcccactactccttgagattgcattacatttctttgttccaatagtcttttgattagcctcagtgttacttggcaaataattttgagcccttgtattcaacaaactatatcaatttggccaacttgattctttaatgttctcaaggatggagcttgactttgaaaaattgtgactttgatctgcatatgggcatctgttttcatgtgttgcatgacattaaaagttatctttcacgttgaggaggggggaatctaggtggtttttgtggtcttaaagactagccaaggttgttttcccatgagagatttcaattattcccaaatctggttaggtgggtcaacccaaaagtgattcgtttattaaacgagtgagtcatttcaataacccaaattcaaactagtttattttgtgtgagtttcgagtcgtgctattgtgtttaatccattttttgtcttaagggcacaacatactctcttagttatattgtattctccacctgatggtgttcaaccattttgttgtagttgatttctttcttgccaaaatcctcgatttggtggagccactaaaaagaagaaatgataattcttttttcaagttatacttgggttagcattataagccaagttcttttgagatttggatccaagacagactttattttaaatatttgtttgttaaagcgac

SEQ ID NO: 189059 - DNA, 2265 bp, Cannabis indica
ccttggatctgcttgaagaaaaaacgcactgagacacaaataaccaatgctgcttatcaacaccgtatcgctatatactttaatgaaagagttcgaaaaagactctttaaagtaggagatttggtgttaagatgtgtatttgcaaatacgcgaaatccagcagctagagtgtttaacccatactgggaaggcctgtacattatcaaagctgtagttggaaccaaagtttataaattagcttggcttaatggctcactaataaaaaacactaaaacaacgaacatttacagccatattaccagtttattatcttgtaatgttgaagttaatctttgtaattattgttctttaactttaataaagatttgaatatttcaattaatcataaagttttgtttctttaaaattacttgggggcatttacgtgtaaaataactagattctacctagaaattaatttttttcacaaataaaaggatgattgattaaaaactgtcctaggacagcataaaatcaaatatcttcaaatctttatttaagtggaaattaaaatagcagttgtaattgagatttttttctcataaaacaacataaaactaagtgcgatctgaataaataacgattcacatattatagcatgtattataaacgagatactagcgtgtcttgaaaaataatgcctaagctaaagtataaataaaggattaactactcatacaagcaatcaaaaaatattcaaaaatagttttagaaaaaactgttcaaaatatttaaaatttgctcttaatatggcagaatattatctggtcgcaaaaagcatggtagaatattacctgctcgcagaaagaatagcagaaaattaactgttcgcatgtgaaataaaaggattcatgaacaaacatgcacttaattaagtgaacatgtaaacctaaaaaatatcccaggctaaatcgagaaaagtgtgttgttgtgaataaaaacgcaataaacaaacattaataactcgagaaaatcaggataaaatggcatgaaaaaagtaaatatatataaataagctatgttgaccatccaacaaagcatttaattaatattacaaaatgccacaaggggcaaaatattgtctcgatctaaaggccattatttgtaaattaaagcaataaaaactaaatctacatggttagagatttagtgggcacttcttcttcttcttctttagctttaacctttttgacatcctcaacttcatcctttttttgtctgctcgcaaaaagtaagcatcttaacggctctatcacccaaaaagcttatatccatacctagatttgccatccaagctcgataaataaatttattctagccttggcattagcctcggtctcttcgagtttcttattggcttcatcaagcgcttcctgggtcttttggttagtttcaatgaggtccttggcctttttttgggcagcctcgagctcagtcttgagagttttccgctatccttcaacctttttttttaatcgagaaatctctgactgagagtcattccattacttcacaacggctttgcgttgttcattagacctacgaagtttagtgcccagctggttgacactctaaaaagccctttagttgagccacatgagacgaaagatgcctgacaaagaacaaggtcagaagaggatatataaaaaaagaatatatgaaagaagatgtataaactctatttaaaagaaaaataggctaactaatcgaaagtaaaagatcagcactcctcgctgtcagactttggaagtcacctctattgatcagatcctaatcgtcttattgaaaagacttataatgatgctaacaggtttatagcatactacgagtaaacttgcgaaccttcaatacctgtaaaaattagtaggggcaagaaagatctaagagcaccatctcgggttgagatcccgagaatttgacctgatgaacaaaccctaaaacctattcaccagtgctcgcagcagcaggtgctgaggaagacacatgggtcttctcttgctcaattgtaagttgggtcgaggcaggtttcttgttggcaaacttttttactcttttcaagggttttgggtttgacccagaggcagcctccgacgcagcaggtcattttttgcttttcttgttggaacttgaagggctggataaaagattttcaaagtccatatctacaagtaagggtgtgtagaaagccattcaatccaattaaaaccgaccgatccaatcccaacc

SEQ ID NO: 189060 - DNA, 3484 bp, Cannabis indica
cccacttaataacatgattcaaaatttgatcgatcttaattaatttatatctgtttctcatacaagttgagatgaagcttctcaaatattattggacaattaagttgaccttattaattgccagtgaaattattattaataactatgaagcagcgggaatagctctggtggctggcttcgcaattatataatagtatatatgattctattcccatgttgatggtgatgtttgttttgaccaaaaagagaacgactccgctaaggaatcagctcttatgctagtaattggtgttaatcatttgatttgtggttataatgagtttgttacattggttttagcattgacttttctgttagcgatggtctcctctttaccaacattaggatcccttgatatttttttttattagagcttgtatttctctttgagaatataaataaaatatgttgtactcggcctccttaagctaagaaaatcattttatcaaaactgtgcaaagtttaacttggtatcagagtctagaaagcctgctcaatgtcgtcccattctaaaactcctcaggccaccaccacatctgcagtagatgctgcaagctcatcagtctctactcctcaatatacactcagccgtttaatacgctgaaccaaccatttcctctaaagcttgattgtaagaactatgttctctggaaaacaatggtgtaacctgtgatacgaggacatcatcttgatggctttgtaaatggaacttgaccctgtctaatagagttcatccttgccccaactactacagaaggagaacctagtttttgtgtcaccattaatccagagtttgagaattggattgtgagtgatcaactattaatgggctggttatatagctcaatgagtgaaggaattgccactgaagtaatgggttgtgaatctgcagcaccattatggaaagctcttgagaatctttatggagctcactcaaaatcaagaatggatgatactcatactctgatttagaccactcgcaagggctcaacctccatgaaagaccttgaaacagaagaagacctgggcagattctcttgcttggcaggggaaccatatcctgagaatcaactcatatctaatgtcacctccgatcgacttggatactgagtactttctgattatttagcaaatcgaagctcgctcatcaaaagcatggcaagagttgtaggggatactactcacctttgataataagatggaacgccttcaaaatctgagtctcaacaacaatactaaacctactcattcccctatctcacctaatgaaaactttgtaaatcgcccaaacacaaacaacagaggtcgaggaaacaactaccagaatcaaggaggaggtggtcgaggaaattatgctcgtggtggttgaagaaactctggaagaggtcgacatgggtgctcacagatatgatgaagcatacatgggatctgatcccaaaattggtggccaaaccaatcacaaagttaatcagggagctggattctacactgttacacctaaagttgtcgacaatgaggcttggtttgtgaatagtgatgctagacatgtgactgcagatgagaataacatgatgcagaagaatgagtatggtggtgaagaaaaactcatcataggtgatggtaatagccttaacatttatcatcttgattatggaaaattatagacaaacaatgtgtctaagtccctgatattaaataatagttccaaatattgcaacgaatttgctaagtgtatcgagtttaacatcataaaatggtttatttgttgaatttcaccctaattattattttgtgaaggacaaactcaaaacgaaggtattgctggaaggagtgcttagagatggtctctaccaaggctacaaatgtttaagcaccacaggtaaaatttatatctctcgaaatgtagtgttcgatgaaggagaacttcctttacaagctagtttcttaaatactcgtacacctaagaagcatcttgtttttcaaaatgaatcatggtcccagttgccaaatgttcattttaaacagtacaatacaacctcacaaaacaataccattcatgtaccatctcaagctgcataaactcctactccaccagcagtgcccacatcacatcaagttattaaatcaaactcaccttgctccagttttaatacccttgatcatggcattgttttcctaaatctaaatatgaggcaccctatattattgagaaaaatgtatcccaggaattcttacggtaggacattgtcgatcactgccataatgacacagttccaagtgtcacagaccagacactagttgctcctccttctcaccttgtttccttgcatcccatgattaccaaagcaagggctggaattttcaaactaaaaacctatcttagtcaagctagatgggtgccagtttgtacttaaccaagcagtgttatagaggcaccgaaacacaaagggttgaatagatctatggatgataaagtaatatctctcaaagctagcaaaacttcgaccttagtaacttggtccaaagattgcaacctgattggttgtaaatgggtataaagagagaaaatgaatgttgatggatcctttcaaatgtttaaagcttgacttgtttccaaggttaatcaaagggcaggtctagactatggtgaaacatttaggccagttgtaaaagcatccacaatattatcaaacaacttcacataaacaatgccttcttgaatggccatctagaggaagttgtgtacatgtgtcaacctgaaggctttatagatccaaaaaaactagaccatgtatgcaaattgcacaagtctctatatgagcttaagcaagctccaagagcctggtttgacagactaaagaatactcttcttgaatggaaatttcaaaaatctaaagcagatacatctctatttttctacatcaacaacaatattatcatccttgtactgatttatgcggatgacattattgttacatgcaacaacaatactcatctcaatagatgtgttcagcaactagacaagtgcttcactctaaaagaccttggagctctccacttcttccttggcattgaagtgtttcgagatgagacatgtatttatctcacttagactaaatacattgaggatctattgaggaaacacaatatgcttcatctgaaacccagtccaacaccagtcacaactagaaagtctttgtctatctctaatggcaaagaaatggaaaatataatagtgtatagaagcctcattggagccctgcagtacttgtgtcacactcgaccagatatcacttttgtagtaaattctctcagacaattccttaaagcaacaactactaccaagtagaatgttgccaaaagaatcctaagatatttgaagggaagtagcactcaaggcctccatattttctgtattgacagtttgaacattattggtttttca

SEQ ID NO: 189061 - DNA, 4300 bp, Cannabis indica
tggattaaaaaaataaagtatgtattaagtttcatataagagcaaatctttaattaattttctctctctccctcattattgtaaattaattctactatattatatatatgtatttatttaatcatatattttcacaacaaaaactcaacttttatgagataatttattttttcatttgaccaaaaaaacaattattttcactagcaatatttatctttaacattatcttttattttttttataagatattataaattttatttggcttggtgtatgatggcgaaaatcaacaatgccaatagaaaaaataataataattaactctaatttaagtattaattattgttattattttagtataataaattaagtaataagaataagaataaaactattaagagtgagtgagtgagtaagggagcgcgttatgtgagagagagagagtagtgtagtagaagaaggtagttgaggatgagaattgagaggttaattggtaatacaatcacccccacatgcccacatataaataaaatatataatattagtgggaatcctctcatcattaatatataataaataaataaataaaaagagaacaaagtttctctggttttgatctctcaccctggatcgaacgaaacaacacacaccctattctatggattcctctcttaatcttttttttttaatattctattaatgttaattacttattaattggtcacctcactctgtataaggtaatattttgtaaatagttaataattgaaacattaaaatatataaaacttaatattttgtaattgaaatattaatagggtaattacttaatattagtaaaattataatttttatactgttagttcttaaattgtaattacaaacttaatttaaatttattaaaagaattaaaacgtttttttggacgaaaattatatcataaatattttatttaattatatcaataatattatatatatagtggtgttgctggcactactaatgctatttagtaatttttaaatttgaatggtggtactaatagtagtattagtgctatactcctagtactagtactatggtggtgatggtgataataatataataataatattgttattataattattatagtacaatagagaaaagtaccaaaaactaagcataaagtcttcttctccaccagattggggtgtgagtgagtgtgtgtgttttgttcctctgcttcttaatagtatcatcatatcataacatatatatatatatataataccaccattggtatatgatatgatatatttgtgtattgtttgaaattgaatggccttggtttcattcctcctcctccttcatcttcctggttattttattctttggttaccaccctcattcaaacctttacattcatcaccaccacctttactttgacttttacttccgggtacctctctctctctctctctatatgtatatatgtatatatagaaaggagaggtagtaatttgcacacaaatgattccacaactacttcttgtagattcagttccccaacaatggttcatggaaatatcaataacaacaacaacaacaacagaaacaagtgttcttcccatgaaagaagaagacttattactggctcatcatcatcatcatcatcatcatcttcatcttcatcttcattttcatcctcctctggtttaaaacctcaggatgcagattatccacagcctcaactcattgaagaagtagaggctctgatcttagcaagagtaccaagatcagattatggaacaatctctcttgttaataagagattcttatcacttatcaagacaggagagatttacaacataagaaaacagatcaagtttaaagaaccaactgttttcatgcttgcttcaggtgagcagagatggtgggcttttgatggtcaccatttcaacacacttcgccaacttcccattttaccagctgagtttccctttcacaatggtgataaagagaccctttgtgccggaacccatctcttagtttcgggcaatgaacacgaagctggaccaactgtttggatttacaacttggttaccaaccaatggtttagaggccctcctatgattaactcaaggaacatgtttgctgcagctacttgtggaacctttggttatgttgcaggaggtgttgtcaagaccgggattggttatgaatccgaaaagaagtacacaagctcagctgagagatacaatcctgagtctaaatcatgggaagctcttccaaacatgcatagaaaaagagggtcttgctcaggtttttacatggatgacaggttttttgtcattggtggtgagaacatggaagggaatcttacatgtgctgaggcttttgatgagaaaagaaggaaatgggatttgattcctaacatgttagctgacatgccagtgttgaatcccaggtctccgccgcttgttgcagtggctaataatgaactctattcacttgagccttcaacaaaccagctgatggtttatgtgaaaaaaactcagtcatggaagagacttggacctgttcctgttagagctgatgccatggggggatggggtgtggcttttaagtcacttggggttgagcttcttgtcattggtggtaatgctaatgcctttgctggtcctatgttgatatacacttgttgtcctgaccccaatgctagggagctgaactggaggcgcgttgaggtaccccgaaacaggctgcagcccttcattttcaattgctctgtcatgttagtttgaatgaagctttcttactttgcttttatcatggtgtgtgattttttgtttttgtttttgtttttggttgaggctataaataagagagagaggtacattacatacaaggagtttaaaaagagagttgtcaaatgacatcttcttcttcttttttctactagctttgatgataagttcttgtgttttgttgtgtaccataccatattggcctttggttttaagatgaaatttttgtaatttgctgatgatttcaactgttgtctgctctgtaatttttctctcttttgttaagacacaagaggaagcttcttaagaattttttggccattttcatcatttggaaactcaagtgatattgataaaaaacctgtcttgtcttacacttcatgtgtaaattaatgtcctttgatattgtaccttcacaaccctgttgttctaagctttcatagataaacaaattattactcctaagaaagtgttttaaacttggtcaactcaacaacgacccaacatttttttttctttgtttttttaatggacaaaattgatatcaaacttcaatgttggtgtaaacatttagctattagtccaataagattgtttttcaataaagcaaaaaagattgacccaaaaaccaatatgttattttgttgcaaagttgaaccttttctttttctttttctttcttttcacaaagagaatgattcaatgaagcattattagggaaccacacacataattagtggtggctagaatagaagatggtaggaatttaaaaaagaaaacaaagtgattatgacaacatataataaggattaagaagttgttaactaataattactatctaagagtgttttgatcaaattcatggaactattgttggtgtcatcttgggaaagggttgacggtggagatttatgaacaattggttgaattgatagtggtgtgacgtgaaaagcacatgcccaattttgatcgaaaggggggtgttgtgttagcatggcaaagaaagaaacatattgtttgtatttgatgtgatcttcaagagtgacacaattggtacaacattttttcttttttcactaagaaaatagagatcatttttgtgctgatttcgaactcggatcccactagtgagtgagggatttgatccaatttatctaattataagttctcatctaggtaatgatagaatattatgacataaatttgaaatttgagacggtaagggttgtttcggaacttttgaaatttaaaaaaaaaaaaatgaattatgagtcccctataattggaacataggttcctaaaattgtttaagatagaaaaagtatgaaagggatgaacactacattttgcttattaagaaaagatgaatgatatttacaatcttctattataattttttagttaatatttacgcatgaaattttatgagagtaattttttttttattaaaaaaaaaattaatagtgatattgttatagatacaatatcatccatgtaattttttaaaaaaa

SEQ ID NO: 189062 - DNA, 1759 bp, Cannabis indica
tgaaaaatgaaattgctataattctgtaaactgttttttatgttgtattgaaagcaatcctgagagaaatcaggtttgtttgacaattttatgtaaaccagctttatatcattgagataaaatcagctgaaatattccatctccaatataaggaagccaaactacttattgttcgagtcggagggaacacctatggtgttcaactaaattcaggatccaaccaaacctttgtgccgagcatacgaaattattaatacgaacataaaggcacaaactattcctgtcacaatgacaacctgcagataccagaaagcttgttcaattatgaagaaaaattcgcaaccgaaagtagtagcagaaagaaacaggttgcatacccatttgaacatgtatccatggttgtcattccacgtgtatggaatattcatgccaaatattccagccacaagagaatatatagacaagcatacagttccagaactaaggaggagttctaactgcatttacataaaatgtagattttatgaaacacaatataatattaaacaagcacattgataaaaacaagcattattacagagaagaatagaaaacctgaataagctgatttctatgattatcgagctgcaaaaggcaaaacacaagtttgattagaaataggaaatgtatttacagtctgtttcaggaaatttgtctaagtttctcacctgaatgttaatgtagtcctctgtatcatcgatatattctcgcagctgcaaaatgtaagcatttagtagactgagcaaaagcagtagcacatccaaacttgaaaacaactaccacatcacatacagaaggataactacagcagaaactagtattcatcaaacttgaaaaaaataaaaaatgatgtctctgttcagatacgcgtgtaatgactcgtaatctaactgtataagttgatttttctcaatgcatccatcattttcatcctggttatggattagtccagtaggaacactgtacaaatcataaactatcaattctatgatttctgggtaaaaaataaatgctttatctatgagacaatggaactcattatacaggacaagaataaaagtttattgttcataaagcacaaaccgtggttaatttgttcaatgtcccatcaatttgcataaaataagcctgcaagattactactacaaatttagaataagtcgtggaacaaaaaacataaataaaataaatcgcaaatcaaccttacaacctcaagtaacatttcaagttcctcaacatcattttcatctccacgaattgttgcaatacttgctctactagctcttgatatctttgagcctatagtaggagaggtaggataccaattggcaggacctgagccactaataggtgaagatgcaccagccactatctttcttgacaagtaaagatcagccatatcatcatcatcgtcaagtagttgttcaagctcatcccttacctgcaattgcgaaaaaaacactggattatgtgacatgccttatctatcttcgcaactgtgaagaagcaagttaatggatgcttttgcaattattaccaacaatcacgattgccaccaaataacaaagtccttgatgatattgttattgctcctacttaatctcaacagtatgctttcaaactggagaaaaaatataatttctctaaaaacataaatcgtcatatacgataggctgtcacatgtctggtacacttagctcaattgtcacatgtttggaca

SEQ ID NO: 189063 - DNA, 3251 bp, Cannabis indica
gggttaggtgggaatcacagttgaaaaaaaatctgcttgcaatttaattttttgcgaacatattctccttgaacctttgttgtagtttctcatttcttataaaaagaaaatttgaaacaattttttttgttaaataaataatattcatcttaatttgaacatgtgttctgcaactgtaaaacattgcattgtttttccagaatgtaaaaacatttaaggatgttaaaggttgtgacgatgcaaagcaagagctggaggaggtggtggagtatctcaagaacccaacaaaatttactcgccttgggggcaagttgccaaaggtgctttatgttgtttaattaatttctattttatttttctttttaagtttttgtttcttcttgtattgcatctaagcctaatacgtgtataaatttcagggaattcttttaacaggagcaccgggaactggaaagactctacttgccaaggtaatttctccatctttcttattttgccttttacttcaggcattctatttgaacccaagtctttcctgcttcatgtttcagattttattgcaaattatatctggtgaataaaattaaagaatttagagtttaccctgatattggttttatttatgttggattatgaaggcaatagctggagaagctggagtgccttttttctatagggccgggtctgaatttgaggaaatgtaagtcaaacttttaagttcataaataaaaatgttatatatatactttaagacctgtgatcttgcgttacaatggaataagcagcttcaaattatgctttgttttggtggattgataataaaacttatagttttgttgattgttactgtagattcatatactttagatattcttttgtgcttatttgaagtgacatctatttaactgtaattggtcataacgatttatgcttgtacaaatttaatgtcgctgttcatattttatctatatacaacaagaactggttcgatcaaagaatttattgtgattgcctaaaactgaagctagtgacactgcaaccaagactgtcctttaaaattcagatttacttttcaaatttcaacaaaattaatttatcagatctgtttggtattttatactatcaatggtccagtgataatggtccactgttactacttttatcacaggtttgtcggagttggtgctaggcgtgtgagatctttattccaagcagcaaagaaaaaggtttgttgttcatttacacaatatctggcggaaaaatgttgaatgctaggccatttctttttttttaagataattttaacatacaatttcaaggttttctgttttccttttgcatgttgattactctaatatttacgcacagttgcacactagacaaactttgagcagatatttctttagtttttttctctttaacaaaaccacagaacactgccagtgtagatagtgtaaaacactgaatggaacccagatttttctttattatcaatatactcttgtttttctacaaatactaaatgaatgaagggaacaattaaaaagggttaacggtagtcctacaggctagagactattatttatagttggcttgcactagataaaatgagcaatgatgatgagatgacatacaagttcagatcaaattatgtagaaaatcagctatatatggcatgcgtgtatttaatgtggatttctatcattggcactcatggaaggtgtatatttccatatttggtaggcaccttgcatcatattcattgatgaaatagatgctgttggttctacacggaaacaatgggaagggcatacaaagaaaacgttgcatcaacttcttgtggaaatggatggtttcgagcagaatgaggtatttattttgatatagtggtatttatgttttttgttaagggaaaaattgtgctattttaatgggttatattgaagcttagtttctttctaactctttaaatccttctacagggaataattttaatggctgcaacaaacttgcctgatattcttgatccagctttaacaaggcctggtagatttgacaggcatgtaagttgttttctcctgtgtaactaatgtcattgtttaactttcttttttgactattataatgtacaaataagagattgttagactctggttgaggtgtatgttaacttcatgctacaaatactttatgatttaaagtaaagctttttttggttgaaaaactgtaaaagctggtttcgctataacctttgcttgcagtaatttttttttcttaagttccaatgttcaaatttgttatcattatgaagcacttgcaagactgaaaggtgcatctggtctttacctaagaaaatttactttgctgggaacttacaatttcatgtcttttccgattgttattccaataaatttttagctcaggactttgcttaaagtacatattctattattctccggtttgtaagttaggttaaagtagatattctattattcttcggtttgtaagttaggttaaagtacgtaattagctttcattaatttatgccaccacttattctctttgcaggctatatctactgctgttataatgaaaattttcacagtttctgcttcctttttactgcatctgttttttcatcaaactgttctattgttttccttttaatgctaaatattgtgatctgataacaattttgtagattgttgttccaaatcctgatgttcgaggccgccaagagatattggagctttatctacaggataaaccattggctgaagacatagatgttaaagcaattgctcgtggtacaccaggatttaatggggctggtcagtttgattttactatacgaataatgctcctttcatgcaacgaatattcctctattattctttttaaagaattgattggatttgctgacatgtttttctacctccttttattcactacaagatcttgcaaacttagtaaacattgctgccattaaagcggctgttgaaggtgctgacaagctgactgcttcacagttggagtttgcaaaggacaggataataatgggtacagagcggaaaacaatgtttttatctgaagagggaaagaaggtatgggtattctttatgaagcaatctagaatggagtatgaacaattggatcagttaatttaaatttgctatctactattttacaagaaacaaaacatttttaaatgtataaggaaaaattacttgaaagaggatcattttatcgaa

SEQ ID NO: 189064 - DNA, 1501 bp, Cannabis indica
agtgtacataagcccataaagtgtactactatcattccctataataaacccctcactcagtctatcattcttctccttcttcgttccttatcctcactctcttcttctgctctccactctaaaaccccttctctctctagacatgaattctgcaactctatctctctccaaaaccgtagctttatcagactcatgtcgtctctctctcccatccctcttcaccactaaaactccgtacccatttctctcaatcccttccaaacccccaaagctccatttcgcatgctcttcttcttcgctcttatccaacaagaagaagcctcaattctcttccttggtcacattcgtagcccagacctccgattgggctcaacaagaaggagacaacgccacagctaccattgacgaactaagcgccgacgagactgaagcgcgcgtttcggattgggagggagaagacgcctcagtcgaaagcgatggaggtgaggaagctggggtttttaaggagagggaggaagaagagtcttttgttgaaccccctgaggaagccaagctttttgttgggaatttgtctttcaatgtcgacagtcaaaacttggctatgctctttgaaaaagctggagttgtggagatttgtgaggtgaattttcattaatttcaatgttttggaaggtattcttatcatttttttaaaaaaaataatttttaattttgctgttctttgttacaggttatctacaacagggaaactgatcagagtcgtgggtttggatttgtgacgatgagtacggttgaagaagctgagaatgctgttaaaatgttcaatcaatatgtaagttgtttttggaagatttttgtatttttctcttggatacttgagtttcatgtatattgttcaatgatttttaggaagagataaaaataatagtataattggataaactaactgaagagaaacaaaacagaaaattgagagggataagtggattatgagtagaaaagatttgtctacactccacatgaacattgactttagtcaaattgaaatgccactgaaaaaatttatgccgcttacaaattcaaaactaactttgggtatctatgacacaatttactctttttttttattattattattatttgaaatgcaaacaacggagtaagaagttgatgaaggcaatgatcttacatgcttgatatgttaaccaatttttttaggtaacaggttaataagaaatgtatggaaatgagcttcttgtttatatttagctttggttttggtaggcaattgttaaagctagtacattagttcagaactttatatgatctgtcaaagcatcgtatgtgttgctagcattgcaagataagatgattgcaatgttcattaactactaaagcaaagcaatcaagttaaagcttttaatttttttgcttgacacattactcttatttgtgttaccttctggctaagacaataccaaccccaaattattttattttg

SEQ ID NO: 189065 - DNA, 2372 bp, Cannabis indica
tttgactcatgctctgaaggttggtcttcttcccagggaggctaagaattcggtggatcataagtttgaacattttcctgaattgtgctataactggtattattggtcatccattacgtgaatgtagagctaaattctttatcattaatggtaaaagtcagatgaaatatggagattggatcaaggctactcctcaaaagtttcttgctcggtctaagcattaatgtgtttagtttggttctgttcatgaaagtactactatggcatgcattcctaaggtcgttggtactccaacatggaagaaaaaagagacctccgatgaaggtgttattaaatggaaaatgtgatttgagaaatcataattcatcaaaatgaaaggttgtagaaaatttggtggccccttctgagggttacccaatttcctatagcaaaagttggggagcataaataaacaaagttaatgttgattctatttctaatgatgatcttgtttctcaaaatattcaagtcaccacttctttggatattggtattcaagctcttaagattagtgggaccaattaggtggtttgtaaaaagcaattgggcggtcttaattcatgttgatgttgagggtctctttgaagtgaataatgaggcacgtgttctaggggtctgattctccttctttcaaggtttttctgcatgataatagtgtggtatttacttctaagccttctctattttttgtgtgattcgtccatgcatgatccttcactggaggtccttattacaaaatagaacagtaaacactaaactagaaattgaggcaatgaaatgattgtattgaatgaattgtaattacaagtgagtgagccttttatagctcaagctccagtacatgattagtagctgaaaacaattactggtctgaccactaactgagctaaaccagttagcacaagtaactaaaataaacttccctaactaccaactaactcttgatactccccctcaagatggagagctagtgctcatcaatcctatcttgtctttgaaattatttaactgagtagggaagagtgctttagtaaaacatcagctaaatgatcttcggatgaaacatgacaagtctttataactccctactgcaccttttcccaaaccaagtgacaatctatttcaatgtgcttggttctttcataaaaaagggttagcaactatatgttgtgctgctttgttatcacaatatagcatggcaagtccttggtgttcaatgttgagctccttgagaatagacaacaactaaacaagctcacgtgttgtatttgcatggccctgtattcagcctctgcagaagacatggaaatggtttgttgtttcttgcttttccaagatattagagagtctccaaggaaaatgcagaaacctgtggtggatattctggtgtcaggggatgcagcctaatctgcatttgtgtatgctttgagctttacttcagattttgcagggaaaaataacccttgtccagggcagtgtttcacatattgtaacactctttgtgcagccttaaggtgcttggcttgaggtatagaaaggaactgacttaatttgttaaaagagaatgatatgtcaggtctagtaatagtcaagtattggagcttatcaacaatccttctgtacaacttaggatcagccaatttgtctttcttatcttggctcaatttcagattggcttccataggagtattgaaaggtttgcagcctaagtaactaagatcttcaagaaactgcaaagcatatggtctttgggatatgaaaatccctttttctgatcttgccacttccaaacctaagaaatatttcaattttcctaggtctttgagctggaatctcctattcaatttgaccttcagatcttctaattgagccaagttattgcttgtcattatgacatcatccacatatatgaaaagggtgatgaaactctccccatcttacctcataaacaaagaatgatatgtggttgagtgatggaaaccttcttcaactagagcacttgaaaacttttcaaaccattacttgaggcttgtttcaagccatacaatgatttgttaagtttgcacactgcattgggggaagctcccccttaggactatacccatatacgtctcttcatgtaagtcaccatgcaaaaaagcattgttgacatcaagttgatgaaggtgccatccatttatggttgcaagagctagaataagtttgacaataaccaacttagttactggagtaaaagtatctgtataatcgatgccctcttgctgattgtatcccttggccacaagtctggccttaaatctctctattgaaccatcagcattgtattttatctt

SEQ ID NO: 189066 - DNA, 1691 bp, Cannabis indica
gtgcaaaaaaattaattgctaaatgatgattgttttttagtaacaaattgtaaataattaattttattttaaaataaaattaatcttaattaaaattttataaagaaataaagtattaggttatgatcatgttataagttatttattatttatttttattgaatttctaaattaatcacaaccatttaaatgtgatctaatgactaagaataaatataagcatcatggttacaattcgatgtaaccattgaagcttcctctatatatataaatatagataaaaagtgtattcttaatgaatattacctattgctaggtattatttttcgatcggttgaagaaataaaaaaaaaaatagagtacttacatattttttatataaatatatttttgatacagtttaaaaaaagatattttttttatatatatatttgaattaactagttaaataaagtatagaaactaaaatttcaattttgttattcgtacatataaatctagtaatttaatatttttaaaattaatatttatagtattaaatttgacttatagatatattttatataaatatatttttaatatagtttaagaatatatattttttattaattaagtagttaaattaagtataaaaactaattaatatttataattaaattattttagtaatgatacttattaaaaaagtgttctacaaatatatatatatataatattatcatatacattttatattattatcaattcttaaataagaataatatataatgtttttcctaccaaatatattgaatgtgaaacatactctttagctgattttaaaagacaaattcggaagagaagtaaaggaattaagcatatagaactaaaaattgaaaatgattgctgatatgtgtgaatcttagacaacaaggtgcgtgggagtaaaatcattgtattcgaaggctttattagattattctagtcaaaaaattcatttggcttataattaaataagtaaataaaaacatgcaaaacacatggtgttccccctcaaaaatcaaatgtatatataaataaaaaataaaaacatgcttcaatattgaattgaattgaattgctttcaccatcatggtttccactacatttttctgtttgcctgtttatttagtaattatagtattaattcctcaaactattgagagtgaattttctttctaaagaataattaaggctaatctctagattaaatattatatattttttgaaatggtcatataaactttctttcttttttttttttttttgggaaagaaaatggtcgaataaaatttcaagtatcttaattttgttataaattaactgagaggtggtctgtccacgataataaattaagctctacactaaatattgtcaccatgtagccactttgtagttgaccttaataatatacatatacatagttgattgtttatatatttatcatgtgctctggttgaatttttatttattttattcaaagggagagattttctctttataattacaccactagttcaataattaaagtagtattagcattcccaacttaatgatttagaaagaaaggagtgttatgagcactcatataatatatggacatggagtgttgttataattaggtaccttaaggtgtttagtgtctaatattatactgatatggcactattata

SEQ ID NO: 189067 - DNA, 3221 bp, Cannabis indica
gtctgtacatctggaggctacttcaagtattgcttcaacagtttctgcgtctgcgtctttgcacctattgtccacaatgtcctccaatcgattttctttcaagagtgtgttcatctaaaatgatcacattatttgatttagttgaattatgcatggttggttagttccaaacacgagaatacttatagagaatgtgttgaaaaagcttacccaaccaacaacatttaagcccctcttgacaaaagatggatcagttggtctctttccagttacaagctcaagcaaaaggactccaaagctatacacgtctgacttctcagtggctctaccactttgaagatactctaaaatgtagtcgaaaattgaattcagttttcaaaatgcagtcgaaagataatagtaatgagagtataatatctattagggaaaacaaacaagtacaaacctggtgccaaataaccaaatgtgccagcaacaacagtggtaacatgagcatcctcatcaaccaaaagctttgcaagaccgaagtcagaaacacggggctctaagttttcatcaagaagaatgttgctcgattttatatcacgatgcacaatctttggagaacagtcatgatgcaagtaagctagtcctctagctgaaccaagagctattttcaagcgattgctccagtttagagatcgatcttctaccccatgttctggaccaaacaaagaaagactctaaataataatgttgcccccaaagaaaacataacaaattgttatgatgccaaattatagtcttaccatgcaagaaaccatccaaactgcccatagccagataatcatagataagaagtttcgaagcagggagtctgcagtaacctcgcaaattcaccaagtttatgtgttttatgctgcccaaaatctctagctctctctcaaaaacttgatctgaaccttgacgacttctatcaatccttttaacagcaaatgttccacaatcattcatgaccatccggtacacagtaccaaacccaccagagcccacaatgtcctcttcatcaagtgcctccagcttttcaatgagttcacatgaggggtatggaaggtcaccatgaaaagtaataagttttgtgcctgtttgaaagaataagttagaaatagtagcagtagctataaaaagatagaaaagataatagtatacagttgaggaagcattagcttacttgcttcatgaaccttttgctttcttacttctgagtatctctttgcagctctttcctttttagatagcaaacgagtccaaaggaacaaaaggagtactaccagagtaaggcccataatagacattgcaccaatcatcactcctttgatgtcatgtgaagatttcttagagggaactgcagataacaaattgaaaatacacatcattttgtggaagtagatacaatttcaaaagctaaagaatggaccaaaacttgcctgacgcttcatcacttgcagcagtatgaggcagcactgcaggaaatcctagtgaagtccgacatggtttacgcatttgctgtccacaaagatctagattacccgtgaacctggagaaacaaaatgaattttttaaaagtcaaaattcattgtatgacaaatactacaacaagctctgaggcctctctaaatgtatcgtcacaggttgcagttatgttgtacagttgcactagccaaaccaacatgcttgttctactgtgattgatatggtactaattgaacaacatgattgaaagctttaattttcttctagccaagtgtcccagaaattgtctccaaatattcaaagaaaaaggccagtatgccacaacaaatttcaaagggcaaattgtaactgccaactaacaatcataggcagaagttattgacacaaggatagactactcacgaactgctcccaaaagtgcttaaaactccaatgtctgggatttcacccgaaaaaaagttggtagacaggttcctgacacatacgcatactagcacagtcaagaaataatccttttatcaacaacagcgtacactggagataaatatagctttgaactcacagattgcgtagtcgactaaggcgacctatagatgaaggtatagctcctttcagcaaattgcttgataaatccctgcattcaaaagtttactattagaaaacaaagaccattcattgttaaaaactttattttgaatgttaataacaatattagtacctaaattgaatcaatacccatattagcaacttgtttaaaaaaaaattctttgcaacttctcacagtacagtacagttaattaacaatggatcactacaatcaaaagctagaaactacaaaggttagtccaccaaacccaccaaaaatgaaaaacttacaggatggtaagatgggaaaggtttccaatatttgctggtatgccaccttggagataattagctctcaaatatctgcatagagaaatagtcaaagaaagtatgtttcatactaagttctgatggcataactatattattctattgacattcagcgtatgagaatgcaaagaacccaggcaataattttcacttacaaggctcggagctcgctacagtttgtgatttcaataggaatgtttccatgcaagctgttctggtgaagtgccctgtctcatattgaaaatcaaaatatcaataaaaataataatactgtagaaacaaaaatgggaaaagtgagagatggacatctgagcttacagtctctgtagtttactcagcctcccaatgcttggagatataatccctccaagttgcatgtatggtaagttactgaaaaacccaagtagaaatctttaagcttaaaatggaaaatattaatcaaataacaatggtacaaatgaagaacgggttaaacttacattgtacggactctctggtcctcaggattgcaagagataccagtccattggcaaggagattcatcagttggaaaccaattgttgaggaagtttttactgtcatttaaagtggtttttatttccagcaaagtgagacctgaaaattagaacaaatattccaactttaaaccccagatgcttgatttagatatgcagaaaacaacacagagactttttttactaataaataactaaaaaaagttacaaacttctctgttccagattttttttctcccccactttgattttctcagcaaccaaacagtgagtgagaaa

SEQ ID NO: 189068 - DNA, 4333 bp, Cannabis indica
tataaattaaagtttaacatatagtattagataaaaatatgatatataatccaattcaatataatataatacaatacaatacgatctaatataacgtttcaaaggaaccctaaaagaattataataattattgaactaaaactatttttgtgtcaatattatgatacaattaacaataattttgacataacatcattaatttgagtctggtagcggtagtgggttgatcacctccgcttagcttacctttatgcttttaacttttgggaatgaataatctttgttctgctttaccgtgggagccactcgacacgagtcacaagtcacaactcccgacatgaaagggtaataagatctaataatagagcgacacatttgatttttctagacccaaaatgtaatagaagtgtattactcaattacattagttagattacaataatattgacgtttttcatgctccgagggccaacaaaaataaatgaagcaaaaccttcatatcataaccaccctactatcaaaggctttcttttctttcttccactttacgttcaaagaatacttaatttattagtcaagtaagttgcctaccgcaaaccaagtgacacaatacaaagtaaaactctattggttcatttggttgccgtattacaccatattgtattgtatagtattatattaaattgtattttatacaatatttttatataaaattatgtgtagtattaagttctatggatacttaaatatataatattttaatataaattaaaatttaacatactattatataaaagtataacgtataatctaattcaatacaatatataatacgacgttccaaataagccctatatgtatagttaactaatccatttctccaatataaagtaagactatatctatatgtatggttaattaattagctaatctataatggcaaaagttgatatctgctagccactaacttcatagaataacagttcatgatatattcggttcgttcacactcatttcatattattactacaataaatgaatcattttacttgttttctaatttaagctgtgataagtcggagatataatcaaataaaaaaaaaaacgaaacaaagaagccataagcctcaaatattgtagctgtataatatgggatacaagactgatacaagtagaacaggtaatgcacaatgataaaacattataatgaaactggatggccaccaccaccacagtacttatgccactagtcatgacgcaacttttaacacccaaaagaattgggtgcagaaactggattttgagatcttatttcctcaatttttgacttgaattcgctgtgaaaagacacaagtgatgtctttctatgagcaaaagcggcactgaactgtttgatcttctcttgaaggtctttccttctttggaattcaatattcaaatccttcaaaagattttccttctggtcagtaacaactccaagtttttgagacgattcagaggccattttgcacaaactgtctctttctttagccagatgatgaaactcagtttccaaactactgtatctctgctttgattcctccagaagcttgctattaagactcaattctttcagcaggccatggtacctttcagtgatagtgttgagttcattgctcaacttctccttcaaagaagcagtttctccatccagagtgcagccctttatcacacaaattaaatcctaaagatgagatgcaaaacaaacgaaataacagttctacagtcaaccatgtatggaccttcctaataacctaaatattttggccttttatgctaatttagaagtaacttgacaatatctacagctcacttgcagatataaatggctaccagatgttcaagttttgaattcaacaagttaataaaaaatctcaagttaatcaaatcatttcactccaatcacttccgctgatcacatcataaatttagttgtgatggctgttttcattgagcccatgtccaatactttatgtatacttttcctaatatatctcttaacttactatcaactattaaggttttccataaaaggtcattgtgttgaaccagaagtacaaacatgttcttgaagtccatgtaaaacaaggcatgtcttgagtgaaagtcaagcatgtcaaaaatcaaataaaaattaagctaacaaaatagtgtaaaggaaaactaacaaagcagacataaaacatgagattatgaaacaaaataacttatgatatgtgataatagtttgaatgttgcctatgttctactactttctgttgaaacatcagcaaacatttgtgtacaaattgtaatgaaagatgtaaaccacaatacatttagagctttccaagttttattaattattaataatattataaaaattatgtagtgttcaattgttgtaagacataaactaatccccagtatgtttattgtataaaggaacacatatagggaaatctaacatttagcaacttattggacatgtaagagatatttgacacataatttatggaaaacaggtaccataagagaaaataaagcatcctagcaatattgaagaaaataaaatcataaatgaacgatatcttgataattgtgaccaagcagctaccttgtgttcacatctgcagagtgaattcagcttgttttcatcctgaaggcgtagtgtttctgatgaaaccaatagtttgacagtgctcttcactctctcacacaatattttctgctgttctttgatcattttatcaacccccaaaggggtgtcacagtccgttgccattgaaaaatgtgtttccagaattgtaaataggcttgtgccaatttcacgcatgcttgaaagcaattttgcagtagatgatttcccatcagttacaaaactctgtaaagatacataaagcataagaaatagtaagttaaatgaagaaaaatccattaatagtcaccaaaagatgcataaattgaccaggaaatatatgacctgtgtcattgacagaacatcaacgtaaacatctttgcaatttgctgcacattcgcaaagtttccgagggatttcttgaataagccgcgcttcttgtcgaagctcagataattcacccattaattgattgctcaataccatttcatccatgtgcttcctctaaattgtaagcacaggacaacatcaatatgcaaagcaaaacacataaagcaaaatcataaagacaattttggagcaggaatatgaaagatcaagactttcatgataggcacatgtagttggtactagtgtctcatagtgtgagaaacggaggaaagaggatttttagattacaatatcaaagaaacgacaagtaaattgacatatactaaccttgagctcttctctttcttgaatggtaaacactaattgtcttttaagattctcaatctcctgcctgtaattctcgtttgaactctgataacatttgaatggaacaaccaaaaacttgtataagcttttttgtactaaaataattgacatgtaagagtatttatgcaacagtccttagtccatttatatttcagaaacctagcatttgagtttaatgtatgctataagttcaagtaattgttctaaatgaacaaacaaattgaaagatattattcataagcgtcaacttttactgaaatacaattcatgaaaatgtaattgaacacagactcacaggtgtcatctcaattggtggaaaagattgaacttttcgtccaggagtaatttgaagggaatcgaggtcagttatgtagcctctattcatttttaaccatgtatcttcatctgccacattattgcttaatgtatctggaagaggactataatccggtaacattgaataactagatcgtcttgcaacaaaggcattgggagcagccttgaaacaaggggtcgaaaaggcatctccttgagatatactgttgctgtcattacgttcttccttatggttcccgcttcgagaatcgtgtccctacgagtgggattaataaaaattgctaaaacaccaaaacaggcatctataccacgtaagcttataataatgttgccacgttaatcaatgacgcagtattcaaaactataggcatgctttgcaggttcaactttcttattttcctagctatctcaagtcccaacacaatgttaaaacataaaacattcagaaacacttctcacaacacctataaataggactaggcgactagcaattcgtcacacgacatgacgacacaattcaaaaacaacataacaagacaatacaattcaaaaacgatgcaacacaaaataaataaatttgggtga

SEQ ID NO: 189069 - DNA, 871 bp, Cannabis indica
aaaaaaaaacaaaaaaatattacatgttagatacacataacacataacatatcaatgaacaacttgaatatatttaaattccaaaccccacatcataggtaacaaatttttggttagagagtcatattaataatgtgtagaaaattttaaaatgaatgagttattttactcattgttaattaattttaaaatgaaatttcatacattttaccataatctcattctactttctcaattttattatctaattcaaatttaattattgagccaaaaaaaaaaatcacttataattcaaaattaatacatacaaaataacttaacttatgatgagaccgttaaaaattatcttttatttatttaatttgctactataaaataaactatattttgtaatcttatacttttgatcttttaattcataagttgataaaatgtccctttttctttttcaaagtgttttgttcaaaaagtgaaagattttattggcgttttgttttcattcttattaagacatttgggttgaaataatgttctaaatgcagtcttaattttgacataaaaagttaaaaaaaaaacattttttttaatttttattttttaagtttattattattatttgttaggtgtcttaaattgacctggtattttggaaatggaccaccaaaaacctaatttatgttatataaacaaaaacaacattaaaattaaaataagatagacaccaaacaaacagccccactttcttttattattattattattatttaataataataacttatttataaattttttataatgagttaaagagatcggaaatgatgcaaaggtcttccctttttcttttgtagaataatgagttttttttttt

SEQ ID NO: 189070 - DNA, 3269 bp, Cannabis indica
gtggatgttttgactaatgagaggattataattcagagacaaaaaaagaaaatggatgataactattcatgtagtgaaaagggtaaagctttttaagcatatcaagtaccactgaggcactgactaatcaggtttatgctcatagagttctctcgtacaacactctggtatgaaatttagtgaaatgaacgctaaactactccagaaagagattaagatatacgaagaaagaatgaataaatgtatcaatacattaccttgacttctttgagccacaatttcttcaagtctggatcatcaagaatgattgagactacgagtgctccatgcacaggcgggttactatacatgggtctagcaagctgctgcaattggctttttacagccacggcttgcttttcatcgtcacatagtaaactacaagtttagtagaaaaaaaatagaaataaaaaattagatacttaaacaagcatgagcagtcctccaagactaaagacaataataccctaaagtattcattcaaaatttagtactgaaaatctaacccagttgattgtctaatcttggttctttctttttgtacccaataataacaacatacgacattaagcaaaaagttgacattccaaaatgtggtagggtggcctaagcgtatgccgaggccactattggttgcctaaaactaattttctatgaattattttctctaattttaagcagctatttaaaaaaatactgtataatgtaaacttatttagaagtggacagtactaataatgtgaacatttattatacagagatgaaagtctaattatatttcagtaaacatttttgaagaaagctgaaacactggagtttgaacaagtgtttcagctgctctttggagaaacccgaaataaaatgcaaacaatgtaaaacttaaccattttagctattttaaccacaaagatgaatatggaacttcagaaatataatgtagttatcttgcaacgtatttatatacatacctaaggcatcctactctctgaccatagagacccatattttttgcatatgactgggcaaggccgagaagatggccatcttcaagaaaaatcctgatggactttgcatctctctctgggtcaccactagcaaaaccttgatatgccatgtcaaaaaaggggaaatgaccttttacctgaaatcattaacttgtcaagggaatagtgaaacaattcaagggtacaatatggagaaaagaaaatcaaaagattttaccttgaactgatatgagatttctctccattgttcttctgtaggatccactcctgttgggttgtgagcacaagcatgaagtagaaagaatgaaccatttggagcattctatatcacaaagaaacgtttatataaaattagctgatagaagaaacatgggtttaacttggaaacggtagcagttcaaccaaccaataccttaatgtcatccatcagtccagcaaagtctaaccccttagattctgggtgatagtaatggaaagtcctctcaggaacctgggcatctctccaaatgttatgatggctgtaaattattagaaccataaatcagaaataaatccaaatgttcaaatgttattaaaagataagagcatcagtggtaatttttaaatacaactcacttggaccatgttggaattggtatatagatttgggaatcaggatgaaaccgtttctggaagtctgcaaaaatcctgcatgcacctgttccagagagagattgcacagcagctatccttttgtctttgatgaactcagagttctctccataggccagctttagtgtctcttccaccatcttcatgctccctcccattggaagatactccctaacagcaagaaattaatgaagtgagcacattatatcagctaaattacaactgaacattaaccaaaagaaaaatcaacaataacagttctcagttgtaactattaagtatccactcaagccaacacactcttgtggaaagggagttctacgtatttgacgaggaagtttttgttggtttcttactctgccaaaaatttggcacagtttaaatcctagatagaaaatcccccaaacataaagcacagtggctaagcggccccaccttttcatttgaaacaaaattgttgattcatttagaggaaacagagcccgaatcttgtacttaacgaatcatgtaaattactgatcaagatgatgtacttttacatttcttatataattgatatgtttttttatatatatatataaattttataagatttaactgaatgatagagttctgtaggaaggaatattagtataattcccgtatacacatgcaaaatcagatagctacatctaatgttcacactatacaaatagttagcagacttcagccttctgtcacacacaagaaaaaaagaaagttcgcaaagttctgccttctgtcatgatccgcacatttagaatctaagcagtaaacttttgcagttttattcttgcatatttgttattcgaaaccttatgcaagatacatgtatacaatatatatatcatcatacgtatgcacgaatgaatataaaatggaatactagatacaaaaagaaaccacaacggacagcaatctctagagaacattttttcaaacacattgtcaaaggaaagaaaaaaaaagtacgcacttatcaatccaagtaaagtatggatagttgaatgtgacaaaagaataaaagcatgtagcggccaagaaagatgagggaccactgtaaaagttgctgtaagtagtgccaagaaaagccaaaacagaacatttttcatgggcaaggtatacattacacaaaactaaaaaagtggcatgtttgtttgagttttagcaatcttggttttcagcaaaaaagaaagtagcatatataattttaggcaatgttaaaaattgatcaaattaattcaataaacaatctaacgatacaacaattatattacgaagaagcttacatgttcaagttacccgcaatccgacgctctgcttctctaacgcaatcaagaacaacaggcttcccgttatcatcacggtaagcgccctaattattgaagtatttgaaaaaaaatatatcagccataaacgaagaaaaggagccagataataagagtgttgtgataccagaaaattcaaagaacattgcacaaaatcaaaatgttgactccaattataaccatacagtaaattaagtaatagaattaagaaagagagagaaaaaaaaaa

SEQ ID NO: 189071 - DNA, 871 bp, Cannabis indica
gcaaattgttatatagaagtcttatccaccgtttcaaaagcggataaaatcatgaaatgatcaaggcatgaaagcaagacacctattcattgcattcaagtgattttcttagttactaactcaaaagtttggatcaacccaaaataagatccttactcttctacgtgtcatatccttgccatgcaacacctccacacaccaccttcttcttccttcttctactacttcttcacttatatataccaacaccaacattcactacacaacctttttccaacgaaaataataataaatattaataggtttagccatggttgaactaattcacaagcttttgaacttgtcagcaccaacattcaccttcttttcactcctctgtttctacccaccttttatgttcttcaagttctttcagtcaattttcaactctattttcagtgagaacatttctggaaaagttgttctaattactggggcttcttcaggaatcggtgaggtacataaaaattctctctttatttcttctccaattattttgattatgtaaatatatatacatggttttttatttttttttatttttcctctgttttaataaaatttgtagcatttggcttatgagtatgcgagtaaaggggcttgtttggctcttgtggccagaagacaaaatcagcttcgagaggttgttgaacaagctcgagagattggttcacctgatgtgcttatgattgttgctgatgtttctaaagtggaagattgtaaaagacttgttgatgacactatcgatcactttggtagatgtatgtcataataatttctatatcaaatttcacctttctttattaatgtataatttcatgtattaatgttt

SEQ ID NO: 189072 - DNA, 2149 bp, Cannabis indica
tatgccttcataatttgtgttttgtaaaacgatctgcaaataagttgactcattgcttagcaagagactcttgtttctctacaggtcgtgtgcttcagttagaggattgttcctctgaaatacgttctattattttgaacgaatttataaattaatagatcatgacataacattaacctaatatatatatatatatatatatatatatatgaattttcgtattacatcgaaaatgtcgacaatttttgcataaattatagttccattaatagacatattttcatccaggacccaactacctgagctagcctatgtgatcgtttctttaaatcactttgccacttaaatgacaataaaagctagatgaaaataaagttatttaaataatggcattggccaaagtctacagtgagagatgtacaattgagaaacaacatacatataactgaacattattgagatgctactgtacagtgttgctaaatatttctattttacaactgagtttctatgaatgacaagagtgccaaaccagatgcccaaacatcatcatccaatacatgctctgcgggtgagtgacttactcctccacgacagcggacaaataacataccaatctgttcatgtattacgaccaaaatgttataatgagggacaatttacactatcaaaactagttttatggtgaagcaaaaaagagtaagcaaacctttgttaaatgagaaattgccattgcatcgtgtcctgctccactcattaagactggcaattcactctggatctcgcctctcattctcttgaccgcggcaaatgctgaagacctgagctgtgaactcagctcagaatcacacattactgcattggcatcatgctgaaatgaacaatagaacatgtattaaattattactcattgctcttctaataaaattaacaattttttacataaatattgttctgcaccttgcggtcaattgtgcatgacactgatcgtgtatcacatatctggtatatccgatccgataattcgtaaatcacagcttcgcgtcccatgtcatttatggtacgtaaatccactgtgaatgtaacctgaaattaatattccatattcaatgtgcacgttaaattttgacaatacacaaaggcatcttcagtgctactctactatcagcaattgcacgagctcaagttcttgcctggcctgggataacattacttgcacttggccatgtcgatatttctccaacagtgcagacaagagagcttgaaagagattctaatgtggaactattgcagttactatcagatggcatgaacttctcaggatgtttacaaagactttccaaaaatacaatcatctcagctgcagcagccatagggtcccgacgcattgacattggaacagttccagcatgaccttgagaacctctgacagtaacctgcaatggtgtgcacatattttcgtcaaagtcattactagtcttatatgcttgctaatgtgcatacaagttcttcgcatgaatgaactacaaattatgagaatgctaagagtaaatttttctgtcctccatttatcctttaaccacatatattacatgcttacacaagctatgtattgaacaggtagaactaatacagttgacatacaaaggaaatattaaacaggaaaaaagagaaataaagaaaaagtttgaagacggagtttaacctgagtaaaatgactaccaaggtctaatggaaagatcacaagcaactagctatcgtaataagtgggacgtgtctttattattagctatggtaatcaattaaagcgtgtataaggttatggaggaaagaacagaagataaaaaagaagcttttaaacatttcttctaacaagtagctgtaaaagaatcatacttgattttggaaatagaaatggaaaacataaatcagagctggatttgactaaacagcaactgaaagtatgagactgattgcatggcacgctcatatgaatatgtcagtcagtggaaaacgatttctaggaagctgcatgtttataaatgtcaccacactaaaatgtaaactgataattgacgaagatgcatataatcctaatttaatgctcatgtagcaagttcaacagagtcatgataggccttaggatatt

SEQ ID NO: 189073 - DNA, 1968 bp, Cannabis indica
accgacataaaaaactgactagtcgatgaccccatcactccattacaaattatcgatgatgatgatgatgatgatgatgatgataatggcaatgctaaaagagttcgcagacccttaaatgaggatataacctcaaagttagaagggtcatatggacatcctttaatatatgtcaaataacgaatctttctttggtaatcagataagttcaaatcattcatgcttaaacaaaacccaccacttacaaaactagctaattcatgcatcaaaatcatgcatcacaaaagccgatccatcatcacttgttggttgaagaaaataccttgattttaaactttcaaagtactggtctccatcatcttcattatctttatcatctccaccatcttccttcttagttaaaagaccttccgccatccataacaagattatcttttgtttttcaaacctcgtaccctttggaaacatagctaagtaagcaaaacattgcttcaatggtgaagacatataataatagcttaaccataagccccgatgaataccatacaaactttcttcagacaattctttttcaacttctgtccaaatcttgtcatctttttcgtcacgtagtaggccagcaactgactttatcgccaaaggaatagcacacttgctaacaatctttttcccaatctcagtgaactgattcgagggggtggcatgtttctcaaataaactcaagctatcttctggtgttataatgtctaggttgtgagttgatacagatttcataacctctgcaacagacttgttcttcgttgtcacaataactttgcttccatgcaatccacccgtttcgaaacaacttgttaaaattctccacatgttctcatccatgttgcgaacatcatcaaaaattaaaagaaacttctttgtactcagagccttgataagcttaagctcgatctcatatcggttctcctcttcttcctcctcttcctcctcttcctcttcatcatcaatttcacacttgtcagaagtgagcctctcaatgattagcttcatcactgtcacagcatcaatgttgtaatcgccaatcccaatccatgccttgatttgaaattctttgtttactttctcatcattggacaccagataagccagagtagtctttccaaaaccgcttttcccaactatggaaatcacagacactttctttccatcttcatcaaaagactttagtaactcttcaatgatatcatttttatgaccattccatacacaatcagattcttctacatgagctactgatctctctgtaagaaaatcaaggtaataataattataattattattattatcattatcattccttgtctttctagtgtcataatcagatgatgatgatgatgatgatgatgatggtggtggtaactttgtaatgatctcatttatctcagtcgatattgtgtcagatgaaatagatggacgagttatatgcattttcagcaccccaatttttgatttgcctttctgattctctcccgattttaaaattctcatcttataaaccaagtcatctgcatcaaacaatgcttctttaagctcctgaagccacttctcctttccatctttgatttgctccctctcagcttcatcaaggctacttttaagagttcgcaaatttgttaccaagtccttcagagacttagcaacaggtcctttgccttcgaataagctccacatcaatcctttattaggatcaagactcttaatcaacgagttgagcaaagcagagagacatgcttgatcaccattaacagccatggttttttctcaaacttgattcgaaaagtaaaatgacaggctaaactcttctctagctaatggagtacaaatgactcaatatttttaaatgaataaataactgcaatgtttttttttaaaaaaataaataattacagttattcaaaataaaagtaaggg

SEQ ID NO: 189074 - DNA, 2246 bp, Cannabis indica
tataatttaatatttacacctctaaggatgatgattgagttccatatgcctgaaaagacgaaagatggctccaactgggatagcaatatatacaggttagttacaaacatctttttcttcattgattgctatgttgcctacattaatagttatttcacgagtaatttttagtgtaaatacttaaattttatttacctaagtctaatttttgactgaatcgtaagtacatttccattaattatcaagtctacgtgttatttttttattggtatatttaattaaattttttaataaaataaaaatataataacttggatcaatcaagaaatgttatgtggtttttaacttgatactaaacaatcaagtaattacaaaagttataaaaatgtaacttagttattattattacagttaaaaattaaatataagtatttatctaaaattgatagttaaatttaagtatttatgttgtaaattacattatttcttttacatatacatattgtttttgaatgatctctacttttgatttttaaagctaaggagttgggatacaaatcagtggcacatcttgtaatggataagcttaaaggaacaatcaagggctaaggaggagaaggagttagtactctagttgatataggcatagaaagtagacaaattaagtgtttttttttgttaggttaggttaatgtgaatgtgaaggaaaagatttgaacacaaaatgtttaggaaagattactatctaatctacttgatgggaaagtgtacttttctttgattattaatttagagcatatatctatttaatctctacttttgttgtgatgattataagaattcaagatgaagaaagtgatttttcaattgttatcaacaatattattagactattttgaatgaaagatgtaaaaattatgttatatttagcataaaaaataattttatactttattagattttagtttgcttcggtaaattcggtaaaacttgatgagaaattgaaattttatccttttttctatgaataattcacaatttaatgatataattaaatatatattgataaaatttttgcagtaaatgttttgataaattttacacaacaaataattaagtgcagaaaaattaaaacatgaagtattttttatcgtagattaacttattgcataaatatttaagtttaatttttggttacatgtaaatacttaagtttaaatcttgatggtaataatactcgtaagtacctattttttaagtgtcaagttaatggtcacgtgacagttcttgattggttaaagttataaaaattaatttaaatataccgataagaaaatgacatgtggataatgacttcacacttagcgtctaagtatttacgggagttccaaaaatattacttagatattattactgtaaaaaattaaacttagctatttatctgcaatcgagaattaaatttaagtatttacgttgtaaattactcaataataaataagattaattaagatttttatttctaaactttgacatgtaccaaattatactccttaaccttttttgactgttaaaaattctcttaaactttattaagtatgtattctgcaaattactctaaataaaaagtgttggaaaatatggtcaaaatataaagcagcttgaaattcatgatatgtttatttaaagggcaatcagaatcaatagtatgatattgaataaaaggaaatattctctcccactattataaggaatataaaagataaatatgtactttaaaaatttataaacaaaaattaattacatgttctaataattttgttattcaaatttaaatcataaataaaataatataattttatattttttcgaaacaatttaataaaaaataatataataaaatattattttcgattattttctcaattttaaagtttattattcaaattctaattacatattagtaaaagatgttagaataatatatgttgttgtgtatgttctcttacagcaaaacccacctaaaatcttaattcctccatatccacaaaacctcaaaacctcaaagctcaaacctttgattgacaacacaacacaactcatcccattcccaaatcatgcaaatccttcctaaccctaatccttacttctaccctcttccatttcccacctctgcaactacttcctcttccctcacttcccgcgcttccaatttcttctccgccaacctcacaatctcataccctaat

SEQ ID NO: 189075 - DNA, 2106 bp, Cannabis indica
attttatttaagtcaggtctagagtttggggccggggccgttgtcgagttcggaactggggctgggataggagaccgagtcccaaggtccaagttagggtcaaagtccaaaatattgatttaagaaaagaaatatttaaaaaagttgtgaaagtaatttttttttcaaaattcttaattgaaaaattgaaaagtaaaatttttaaaatatttttacttttttaattaaaaaataaaaatttattaaaaagtattacgaaaaactttagtattctaaaaattcccatatgttttgttatatataaaaaaaaaagataattataaaaactcccatactttttgtaagcatttgaaaaaaaaaatgtaaaattatgtaattttcacttaattatataaaaaaatatatttttaataattaattaccttacttggaattcttcttttgtagaaaacagaatcttgagtagttgaatccacgaaagaaggatgtgtgtgaacataaatactataaagctctttgtgacccttaaagaatatctcccaaattggagcaaaaggtaaatttccctttgtcaagaacatgaaagccactttaggtactcggctgttgggatattctctagttcttgaaacaaatgaagcccgccacaacaactcattatcatcaagatcatgcacaaaatttgagctctctctattattaatggcttcaaaaacgctgttgtagggagtcggtggcggtggcggtggtggctggggcaacgatggcagtggtggtggcagtagtgcaaataaattcgatgacaaaagaatatcggaagttgtactaatttgtgacattatatcgaagctttggaagcaaaatacggctgttattccaagggtcaaaccaatgagaaaaaatgaaaagttgaaaatataacttaggtgaccgtaggatgtagatctactaagaaatttggctattggcagaggtttgtgttgctcttttgcatttcccattgtggcgttgagtgagaagacaatgtttttggtatacatatagtgaatgtataggactatataagaagatgatatcatatatgacagctaaacaaacctatgcattgcatgtgtttaaatgttatgacctttaattcaaaacatagaaagctaaatgggagacttgttatgttagcaaaagattcattttcaaagccagaaaagatcgttgtgaaaattgagcaataagggtatgacatgtttttatactcaaattaaaaaaaaagtttttgttgtttgaaagttaattttctttatgagaaactttatagggtattacttttaggacatttcaatattaagttacatttattttattttaataaatattatagaaaatgactcacaaatgatgacatttgatggtggtgagtgcatcatttcaaaaaaaaaaaaaaaacacacacaattagtcaaactaatttttcctaattttcaaaaagagaatcataattatacaattaactatagtaatagtaaagatataatatgtatatggccactaagtactatgtctatgaactttgatttaaattcatttaaaaaacaaacttgtgtattttgtacttgtgtgagttatttatgaaatttataattatactcatagctataatctcaatcctatgataaaaattttgtaattagatataaatattcgctgtgcaatcaaatttatacaaaaaaaaaaaaaaaaaaaaaaagaaaatacgtatggtgacacccacaatgtataataacataatgataatatattgtgatttgtaaaaaagaaagtgaaaaaaaaaatgtagaaattacacaaagtttagaaaaaaaaattaatgatttacttttttatagtatatttttttaatgcatttggattatacattttatgggttacgcgccgtatttttgtaaaataattttgaaaaaccatattttatagcttctctcttctctttgtcttcttcctcgttaggtcaatctgagttttctttttcaacgatgatgacaactctagtgactttttcggcaacgatgagacttttctactaatgacggcttctgttagcccaagatatgt

SEQ ID NO: 189076 - DNA, 4686 bp, Cannabis indica
aaaaaaaaaagaaaaaaaaaccttttcgtctctatcgtatatatactcggccacttcaatcggagccgattctcggcgattaatcccccgaaaaacccgcttcattcaaaccatttaccttctttctttccattactgtccgtacgcaaaaacttacgcgcgactttcttagaacacgaatgaggtgagaagaaattccaaatctgggattgggtttgggttccatggtggtggatctctgaccgaattcacacgatcggagttggtttaagagagattgaggaggaggaggagaagatgggaaatgccaacggtcgagaggatggaatcgacggagagaacgacgatcatgttaataatcaacatccttctgtgggaagatccaacggcgaattggcggtgcgtgataacaacgcgccccgtacgggacgtgtggcttcctccgagttcatggccaacaccactcctcctgggagtcccaggcgttccgtatccccgatcttattcgcttctcaggttttaaaagctctcctttttctttctccttaatttttgatctctcttgtcttttctttctgcttttgactttcatatatctcaaacttcattcggtaattttgattttaactgtaaaatttgtgatattatacttgtgtgtatgtacatacgtatcaatgcgtaagtacatttgtataagcttctatatataataactaattttcatttgtcactttaaaattcaaagtagggctattattatttttattctttcctgggatttttttgtgcatagaaactgatgcaatttcggttaaaaaattattcaaatgagttagtggtgtgaatggtttgatctttgaaattaagtaatctataagccatgtgtagcaatggctgattgatgatttctgttatgttgtgtttttactaaagattaatgactttcattgcgattatataatttttgattgagaaattagggaaaatgtagctaaaatttaattttttcacaggtttttaagaagggtttgtgatattatgcaatagtaccagtggggagatgaaaataggaggaggtattataagtttcactgtaatttatttagaacccagactaaatattcaggtataataaatcctatttattggcagtgcaaagaatatgtgagagaatatgcaaataggcacgtgcaacaaagtaagggaaacttagatttattggatttcttgtctaagtttgaatggatgaggaaattaaattacaatccaaaagtaaaacgtaattgaataaaacagaaaaattatttggtgaaaattactctttatcaacataatgatatcatcttcctattgactgcatatttatagagtgaaaataaaattataaacattatgggtagggttagtaaggtttttttctttttttctgacagtttattattgagctttgtatatggtaactgtatatcatttttaaatattaaataataacatttagggcatgtttggaagtgtaattattagagtagtaactaacattttagtaaatatattctattttgtttggatgtgaaatagtaattacatatggcaatagagttattaattacagtgtaattacatctaattctctctaattacatggttcacgtataattatataatgagacaaacacggtaaattgagtaattaccttgaattacacctaaattctgtaatggctttccaaacgtactaatgtttactataatttagacttgttttatactaaaggatattatattaggcaagagcagggggtaggtgtttgagtaaggtgtctctggggttggatcccctgctaggactaaaggctatttttttctttttctttgttaactaagaaaaggaaaaataatctatttgtgagtttgtaatatcagattatggtgaagtgtgttatgtttttccatttccaagttccacgtagctaagttatgtttgttgttttgtgaccataccaataatcatttgctggtataatttattaacttgaaacatgcttgcgagatttgttgttttctattgaaatgaagctatattttgcaaaatggatgtctagtggaaaattgctggccttcttatatattatatgtttttcttgccatttgattgagatggatttctattttactgctttgcatgcacagagagtctgaatgagattgttcaggatctctattcttttgtatcattttttctcatgtcagtttttagtatattttatagttgaaaaagaaagaaattaacttaatgctggcctggtagaccagcactagcttagtttattacttaaaaaggtgataagatatgtcatcaagtagtataagcccgtaagtgtgaaacttttatgcatgatggaaaaaggacaaaaaaacctgtagtctcatattcaaagctatagatatgtaggtcatgtaatttttttctctttggttcaatgattgttatctttaggatgaaaacaaagagattaacatttaagtggcctggtacgctaacactagcttattacttaataaaacatttgtggatatagaattagcccgtttaacttttcgaaactatgtggcactagcgtttccatatatggattatctttacgatgtttagaagttggatgttctcctatttaccttactaggaaaacacaaactgccactaactaggaaattactctgagacaaaggaatgaaaccgcatactaactcccatcagatttgataaggaagctcaccatttgaatggtggaatatttataatagattctcaaaacactcaccttgaggacaaggtaaaagtttgggcagctggtaatgttacgccttgatattagtctcattagtataattgattatgattttagaggtcgagttgtcaagtctttaggtgctgagattaaatgtcttttagtgagctgcctaataatcctaaggtgttagttaaagaaacagttaggggtgtgttagtataaatagaggggctgattaattgtaagagaggaattgatttgtgctgttaagagtaaaattcactcagggagatatccaagtgtcttgaaaagcttggaaaaattgtaattctttctttgatatcaataagagcttggaaaaattgtaattctttctttgatatcaataagattcctattttctaattctttctatattggaatggaacaatagtgtatcaggtagagcgtgtttattttatcagttcattgccttaccagcatccagaaattggtgggttatagatactagggtttctctcgttctatgagtaggcaagaaatggagattcactaaactggccttatttctaagttctgtttgtttatactaacctgagcagctgtttatttatctgatatactatattctactttagtttttaattagctatataaatattaaaaagaattcgcagacacataacataaatttaagacatctgccttgtatatataagtgagggcaactaaagggagaactatgaaatttcacagattaaaatcactagcattttggatttagctagtttttcttttcttgtttcacttgactgttgaagagggaaaaataggtcttaaactgaaatgtcatttaaaattttttaacgagtatgttactcacagtgttttttttttctgctggaaactcagtgcttattttttattttttgtttttagtgctggctaatataactaaaatatttgataccaataaaggacagtgtatattaaccattaagtttgtgtattcagttaacgaaaaaataaaagttggtgtatgctttctttttttattcttttgtctattccattgtagtagaaattggagagcttatgtgtaggatatgtatatagctaatgtactgtctcttgaatagctcgaatgtcgtgaataatatttgtcttttctgaatagctttaaacggtaggtgttgtatactatttcatcctaaaataaagcttttctttactatttttttaaatactaagtttttgttattaaatagataaacgtgaataattcacatgttatctttctgttgagtactaataggtataaaacattaagtttttcattagatagatgtccacaaatgggtcacatgccttttaatatctactttagcttcttataaaagggagttctatgtctcttcccttatcttgttttacttcatatactcaattattgaagaacaaagaatctataagtttctctatatagatcatgtattaactcatatattagcatttctccatctttatgagtgcatattacgttacacttgaattaacatcttccatgaatgagaaaattagtaattgaagaaaacgagcaagggaattatatgctacaaaagaaagcgagaagaaagacttgagaaaaaaaaaagaaaaataatatacagcaagaacagcacgcaaataacatcaaaatgaattagtaaacacaaaaaccacatcaagtaaacaaaagaaatagtctctgtaactatgttcataccacttgaaataggtaggcaaaacaagttacttttatgcattattattaaatttttttttttgtcgaattcattttcacatgtacagtaagtaaataatatatcacctatgtatttataaactactcttc

SEQ ID NO: 189077 - DNA, 892 bp, Cannabis indica
atatatatatatatattactggtgggatatttttaataacgaataagttatatctaatatgcaactataagaacatcttaaacggttaaattttgaaaaatgcttgaaatgtttatttagcaaaatataagaatactatatataactgaagataaattggtactataataaaatattatgttgatgctattatatatatagcattaatgctattttttaaaaaaaaaataaaaaattaaaagtaaataaattgtgtgataatatttataattaaaataaataatatattaaataataatatttgagatcataattatttttaaaggtactgtatatttttgaaaataaaagtatttaaaataatatgtgaaagagagaaaataaaatattatattttaaataatgtaaaaatttataacacttaaaaaatactaccatttctaagtcacgaaaataatccaattaattatgaattttataacatgcatatgtttcttcgtcatgatctttttataacacttttgtttgtttacatcttgcctttccaaaaagaaaaggcattaattacacacaaacgctttaaaacattaataaatatattaatatgttcatgaatatgtagaaagttttatttatttatttatgtattttgagggaaaattcttttgataattaattaaaagatacaaatgttcttaatataaaatttaatttaatgataatatccaaatgggtctacactcgtgcgcattactgagctatatatattacatcttcatttaaaaatcactgaactacataaaaataaaaactttgggaatgattttcactcaatatttgtaaaaatatattcattcataattttatcaatattatgtaaatttttctgata

SEQ ID NO: 189078 - DNA, 1357 bp, Cannabis indica
cacacttcatatattcaatattaacaccttaggattctacaagtcattgtttttctactttctttttttttttttttttttttgctgaaactcctaaagatgagaaatagatggtaacacgtgagcaacgcaaactaagtatgaaggaatggattttcaatgttttttctattctacatatgaaaatcagtcatagatggtaacaaatctctacttataaataacagattctattaactttgatgaccacttaatccatgataagctcaaaaggtcagagacacaaggccccagcaaatctaagtacaatagtatacgatatgggcagccatacaagagtttgtaggtaaccaaaaaacagagcaacacaaattatcataagcatcaaccaacattcaatatcagatgttaacacagcatagataacagtggcaatgccactacaagatcaatgtttgctttgattaagtatacagaaatgctagaagtgaccttcaattgtcaagtattacaggagtggcataccattaccagtggctgcaacattggtgttggtgtgggatgttgggcaccgtcaaatagcaatgctcttagtaattttatgataccaattgataaaagctatgtattatcattccctcgagaaagattaacaacagttataaacaattccaagacatcaaacatatcaacaaagagtgcaaaaggactaatgatatttttactaactcaccaaatataaaattttgccaaaatccaatgataacaaaattgtatgaaatacaaaaatttccattagatgaaaagcagaataaataatcccaaaagaagtacataaacgacaactggtatgcaaagttcagactagataaaaggaaaaaagctcgtccagactaaagattagaagaaatcaagcttgaacagcagcatcaatgaatgctctcccaggttgacggttggccaaaggtccatggcatccaagaagctgcaggagaaatacaataaaacttattcagttttagaaataaaagaacattttgattcaaccaacaatatattattcattgcatttctattctactgccaactccaaataaagaatcaagtttattggatagaaactaaccttagcattgacaccatcgggttgaatacggttctctgccttcaacttgacgtagtcactgcggctaaacttggtgaatcccctgaagattaagcaagtgtgacaagaacaaaaggtcaggacacaggcaaggcctccaaatgccaaaattcacacagaataacagaattacaatacagacagtaccaaaccataccctaatgaaaattccgtccaaaaataataacaatg

SEQ ID NO: 189079 - DNA, 920 bp, Cannabis indica
attttcaaagggttgtgtaacttacacttagttttttttaaggtaattgaccttatgtattaaaaacaaatatgaaggtacaaggcagattattgaatgatttataccgactgtagttgtaattttctgttgccctatcttattaacctattttatgctatagttttattatatacacaacacaccatcagtagtatatatttattacttaattctcctcacaatataaatatatatatatatgtaaatatcggcatcagagttttgtataaacaaatattactagctagtagctaccctaagatatatataagtaataattgaacttatattagtaatataataatttattatggtaataacaagatatgtcacagggtaataatcttagaaattattttgatctcagataaagaaagacaaaaaagtacatatatgatatataattggtaaaatgaataatggttacggtactgagcaagtttttctttaaagatggaataaaagaaaaatccaagtctgaacgagtatgaggaagttcaaataaaagaatgataagaattttttattattattattatttttaaaattttaaaatactaattttttgagtagttgtaatcttataattatcatgaaacacttatgttggagttgccatcaagtaaagaaaagtaataataagtagagatatcaataatgatagaaataataattaattagtagactttgggagctagctaaagatagagaatgatggaagatcgacaagaggaatatttatggaaaatggaaaattttctaaattaaatttagttcatggattgagatgagaagagaataagccgatttacccaaattattataagtgaatcgcccagatatacattaaactcataatcaatatttataaatatata

SEQ ID NO: 189080 - DNA, 1107 bp, Cannabis indica
tttttggtaattattctgttcgtaaaattgtcacactatcacagaaacacaaattgtaatagtctcaaaaaaccaaaacaaaccttacaaaattatgtaactgcatctattttttcctttgttttttataattactttccaacttttttttggttgttcgaaatgacaatttggagctgaaagataacataaattcttttattttattatcaaatgtactaaaggttttccccaagccagttatgcccaatggtactattgataacaatgcattgcagcatatctgctttaaatgatattttatttacctgtaatcaatgcatgccactatgatatctctttctgctaactgcagtcctaaaagagaaccccatgctttgtacctgaatccacagaaagactattcaatttaataacaataaggaatataattagaccaaacattcacatggtacacagacataagtgattgcattgatttgtatcatcactaacccaataatccaagctccaccagttacaaatatcacaactggctttggttcatcagtactatttgctggtaaatataaatctaacctgtaaaattacaacaacccataacatattggtatctgattcataacttaaatcatttaaaacagaagataaaaggaaaaaagcatacctatttcttggttgatcgccatacacaatacttctccggacgtggcttgagaagaagtaatgatatgcgactacatacaaattaatagcctaataagtaagcataaatgagtttttcttttttctttctcctttttgaagagacataaatgagctttaacaatagatagagaaatatatatatttatatgaagacagaagccaccttgaagaaaaccaggcataagtaacagagcataaaaaccaagtccgagtaatcttgtaatccaccgatagcctaccctgaacaaaaaattactattaaacttcaaacatattcaccaaatcagaatcgaactagaaaaaggaaataaaaacttcaatttcagtaaaaccactaaaaaactccaatttcatcattccacacaaaaaatcgtaaaaaatccaatctatcaattttcg

SEQ ID NO: 189081 - DNA, 4342 bp, Cannabis indica
cttcttcttcttctacaaaacccctccctcccaggccttctttctctctctgccgtctcaccaccggagattttcatgatatgtaaaaaaaacattatgttcatagtcattggtttcttttcgagctataaatcctttaatatttatttttattaattattaaacatatgttttttagcaaccggtaccatataatctaattatattcaaggccagcatcaagctaaaaaagagcagtatcgatactaaaatattaatagtgttactgcaagagtcaaggaatgatctaataaaagtctactcatttaagtgaatatgatcaggtgaggtcatgtgatcaaaagtacgtgtaaccagcaaaaaacattttaatgtatgtgtacacacaagatatcgtacatatcaatttgtatatatacaaaagaaaagaaagtatgtgatgtatccatgagcatgcttccaaaaacctaatatgtggacctgtcttcatcccaacatttttattttttttaatgatggtttcggtttagctatagtagtaaggtttagaaagttttgaaattccttttcataaaaaaaaaagtttgaaatatatcctttttataatattaaatattgatagagcctgtcttattatttgtttatacgcatgtaaaattattattttaactattcaaaaatttaataatttaccaatattcaattataactatacaataaatacctttttagaaacaaaatttgaataaaaaaataatctatgtattgtaggtacatgttgtttagatacatcatggttaattaatctttccaataaattaaaaaaaaatagttaattaagttttattggtattcaaatataaagaaacaaaatatattatatgtttataaaattcaaagtaattagcatatggaaattcatcaggaaaaaaaaaaaaaccaattgtcctgtacatgtttttatataaatattaagcttttggtagtcttgggtcttggccatattgggaggagaagaataaatcatgattttccaagtgactaacagaccaagtttctcccaccaaattacatttcatatatgtatatgatcagcatctcattttttatatatatatgttgtcatatcatagtctaaattatttgtttgatccatatatctctcaatcattttaaaactgacctatattgcatatttatgcaaggggtattgaccccacactaatcagattcaccctttaataatgccttgatattctagtacactaaaaagatgatgactatttgaaccatatgaattcagaataaaacttacgttctcaaaaatactcttctagaactcaaaacacaaaattataatcttaaacttacactcatacatatatacaataataattttttctaggagaaacttggcctcattaaaactttcaagagcaaaagtcaatgtaaaggcttaatataaaaagagtatatcaagaagatatccttcatgagagatatcaacctaaattaattaagtttatatatgcaatcaagatgatccatggaaaggacaaatttagctaaatagtgagtagcactacttgtattccttgcacaaaaattacaagcaatgtaaataaactcattaccaagaacaattatatccctaacctaaatataaaagaaatagagagtaagagaaaagtaataactgtgtctcattcaattaattaagctctgaaaacaaaagccatatatataggcagtacaagagttggttaagaagattaaacaacacaacaacctaactgaaagagatatcatctcgacaaaaaataaacttataactatttgtaatagtcccctcaagatagagtatagatgttaattacacttattttggatacaatattgaaaaaatgagtagaaagtaaagccttagttaaaatattaactagattctattgggaaggaacatggagtagttggaaagagtcttatcggaccttttcccgtatataatgacaattgattttatccacatctttagtgcgttcgtggtaaaatagattttcactaatgtggatagcggtattgttgtcacaatacattttagcatgtattatgtgagagacaccaaggtctttgagaagagcaaagatccaggttgaagccttgcatgataagcttgtgtatattcacaggtgatagtgtcgccagccaaatcatcgaacttccattgactgtaggagagctgcccttatcaacaacatagatgcaaaaaaaaattagttgttgatcttccaccagtgtacaatgtattgacgggttggcccgcattaattggactaagagcagtaagctcgatcaaatatttgtccttaaagtttccaacacaaatgggagtaggagtagttcgaggcaaccaattgttggctcgcgagtgtgatcgcatagaactacagaaaaggagagccaattatcaattgatgataatcataacagaaaaaggtgagaatgaagaggaggatctagattccagaatcgaagacaaaaataacctgctcaaaccgattgaagagctggaagaggttattttagatccaaataatctcgcaaaatgtttatacattgggaaaattttggatgaaaaactaaaatagcaattaattgattttttaaaggcaaaccaggatcaatttctctagagccactcagatatgataaggataaaccctaaagtaatttgtcatcatttaaacatcaaccctagctacccggcgaaaagacaaaatcgacgaccgttagatttcgagagacaaggggcacttaaagaagaggttgacaaattgttaactaatgacttcatacgcgataccttttatccctcgtggatctcaaatccagtttttgtcccaaaaccaaacggcacgtggaggacttgtatcggttttttagacttgaataaagcatgtcctaaatattgtttctcactactcaggatcgacctgttagtgaatgcaacaacaaaacacgagctgatgacttttatggatgcatattctggatataactagataagaaaagtacatggtaattgcccacattgcattagcagttatatttaaatcaatcccaaaaataataactgtcaacctatattttaataaataggggaagatttcatgggaaaaggggatgataaaatttgagagaaaagactattattcaaaatcagattttatattttgtactcaaaaaatatccttaattataaggattgtggagtatatgaattttaactaaaaaatcacgtaaaatatctgaagttatactatcatttattacttattaatttctgttaataacttattactaaaaggctatttatttttttgttaacgaaaatgtgcgttaaatcatgctaatatagcaagtacatatgggcaatcaacaccaagagggacttactttgggtcaaatggatcaatattatctacttgaggaacgtctcctttggtcctatgaactcaaacaagacactagttggtattggcataaaatttgcaacttgaggaaaagatttttgcttgctgaaattgtagcagcagggggcaccgacaagttcaaaactgggtagctctacaacagtgaacttgctcagattcaggtaacctatcacagagttatctggaactccttaattcttcctaaacatcgttttatgctttggcaagtagtgaataatcatttacttaccagagataaaatgataaggtttcaaatttttttagaagtcatagactgtttgatttgcgggttggccttggaatcacatgatcatttattctttgcgtgagttttcccaaagagtgttggataagatttttgattggttggggtatagggcttggcctatggattataaggctggaatggttggttggcttcgaaaaccaaaggtttattgcatttgatacatgtgaatgtcttggatgcttctatttaaaacatttggatgaactggaataattgtatttttgagggctgcactaagtctatagatcatactgcttcggacataaggagagcttgtctgtatagattgtaaattgtaactaactcgaaaaaaaaaatttgtaaggaaagtgatttttcaaggaagcttcaatgtaattattagctggtttgttgttgctaacatgttgtagcttcgatttgtaattggttttgtacgattaatgaagtttttccttcttgataaaaaaaaaaaaaaagttaaatttttttactcttctttatattttttagttgagctttggctgattatttttctcttctttctctctctctctct

SEQ ID NO: 189082 - DNA, 3223 bp, Cannabis indica
gacatttgaaagaatcccacatggccaaatcgagaatttgtgggtgtacacaccaagaaatttgtggatttttgaaacaggtcaaagaccccaacactggaaactggtacacattggtcgaaaggtcctaaatggaggtttaagggggagacagcaaaagttttttgtttggctctaatgccatcttagaatttaggaagagtatggttaaggtgcatagagttccatctcaaaaccaattggcaatgagaggagtagctcattcatcttatatatgacattttatttccacacattaacaatgtgagactaactctaataatgaaaaagaaaaaaaaaactaagaggaaggtaactttttccgttgctagaacatggacacactgtgccactagattgttgaaggaggaagtttatgtccatatgatgaaacccaactggcttcatcgcacaattcgacccaaactattgttcatagcccattgataaaagtacgacctaggatatgtttaagaatttcattctacaaaaaggctaatgttactaagtaacaatgatattcttgaatattagcttcctaaccaagaactaagaaattttcatgaaatccttgttgagagaaaaaaaaacacgccaagaagaggttcttgaaattgataaattcgaattgggtcgtggccattttcccactaaggcatcattatccatgctcacgttttcctcttcatccaccatgttcaataacaacatacctctcaacatagaaaattttaatagccaaatttctccacatccaacataagtacatcgaggtgtttccaaatctcacttcaataagtagtcattgttataaagcatttggaaggatcctccatgggaattgtctgttgatgctatccgttgtccattgtgccaagaacatctactataatcttttccccatagtaattgttatagctttcttagtatagaatccacattcatttccaaagtcatgatgctcttcaaatcatccttgataatgttgactttcattccatgtcccactaaatgaccaacatgcattcatcaaccaagtctaaactggtgccaattttatattatttttaatactgagccatggtcaaaatcagagctctcatgaaatggagacttgtattaaataggataacagcaaattctaagccacatttatgtgaatcatataggaagcttatcatacacatcacacaaatataaaaaaattcatgctacatactaactctcttttttccttcttaacacaagcaaagataaacatagtaacaattgacttacctgtttggatgttagtaattccttgaacatcgaatcgatattccaatatattggtgcgaggctctatagaagcagtagcagcagtctgggaaaaaataacatatcaatacataaagattaaaggaaaatgatgatttcctcaaaatatgcaacatgtaacaaaaagaaagaaaaataatattaattatataaccaatacaattccccaggtagctttggtaatctacttctcataacataaaaagtaagacaaaaacaaaatagacttgaaatcaagaggaaaagtaacaactcaaaaactacataaacagtagggcaatagacctacataaaaacatgtttacatgtgtccaaagatattaagatttgtttccttccaagaaaccacctaagaagtggtatacactaagtaataatcagatgactaagtagattaagtgtgtgtaatgcattacaatgcaaagtcagagcttatgttattcatgatctaagtaaacacaaatcaaactttaaacacatatatcacatatttaaaattaaagaaacaattcaattcacgtatccagtggtcaattcattaacagaattttcaacaacaaacagtatcaggaaggccaatgatcctgtgatgaatcaatttgatacaatagatttgaattaggagatcctctttattgtaaacttacttctccatcctcctgatgagaagatattcctatgtctgcattggtgtttttgcgtgacttgtcatctgtgtcatctgagaacaaagtagtactgttggtatttgcatcactagggtctgatgccaccagatcaaattcatagctcaagatgtttttctcagcaagtccaagctgccaaagaattatacaagtatatcaatactgattctacaaacaaaggctgtggataacaagaaaactccatagcttaacacgtatttttatcagatgatggcacctgttggaagttatgaacaaaaaatgtgagatggcgacccctagaattagcaaggaccactttaagcttcatgctaaatagatgtagtactacaaatcagtaatatgaattacagtcctcatagtacccacatgataatattcaggggataaatacggaatattggaggtaaaacacatctaatcccaccaccttttgcaaggattgctacttcatcttccatgaatcagtatgatgcatgttttggataaaaaactaaaagtacaataaatagaagatataataacagattaaaaaaaccacattagataacataaacagaccatgcgccttcgcctccacatgtgtgtccacaagttcaaaagttcattagttcgtaaaggctttacaagatagtctgcagctccaagcctcaagcacttcacaacaacagagatctcatcttgtgctgacatcactaaaagaagcataaaagtactatgttgaggatatatatacatgaaaaatatacgatgatgaaagaaatttcaatgaatgaaaaagacgatatgctgagagcaagatatcttactgatcacaggaatgcgtcgcaagtctttatcccgagtgatgtacttcagcattttcatgcctttagccataggaaggtcgagatcagcaagtatgatgtctatatcaggtccctctgcattcagtgcatcaattacctgtctagcagtcctcacagaaatcactgtagagcaaacaattaaaagttgtaatgtaatagataaatcatcttagaaaagcataaccaaagaggataaagattgaagtaaacgcaatcgtcaaaaacattgctattgcaaatgttacaagacaaaataatatattttctttgaacagaacacagatctttaacaattccatatttttaaaacagaaaaagaaaagggaccacttg

SEQ ID NO: 189083 - DNA, 6245 bp, Cannabis indica
ttgtaaacataccagacaatactctacacaataacgtggtttttttgaattttcatgtgcagttggatgagcatttttctcgtccaatgaaagagtttgtttcattttgcttgaagaaggtacctgctgaggtatgtcttctatacctaaacagcctactgctgttccatttcttcgttcatgtgtgaatgcatgtatgcttaaatatgtcaaatgttccaaagtaagtagctggtaaagatctctatttttcagtttgaaggatgctgcactgctgtgtgtaaagataaagatcatgttctacatattgaggctcatgctattgggctttgctttttaaataattttgccaaaagttgtttcttttgagtaatagataaatttttgttcacttgacattaacatagcattttgaaaacctgtgtaacaatatttcgagacaaaggaactcttagatattaggaaggtattgatgattttcattttagagatttttgcaattgttcttagaatcattcactcttccttttttttagattttgaattgtcaccttcaatgagtaaaaatctattgttctataaaatatgctcttagaccttcctccattgttgggcatggagatcaaatttctgatttacttgttccgatgaattacaatatctaattaaattagccaacatgtaagctttttgtttgtttcacctttctctacctgcttaaatttcagcggccaagtgccaaggaacttttgaagcaccgttttattaggaatgcaaggaagagtccaaggcttcttgagagaataaggtgtgtatatgcatgtgttttgtttgaattaaaattttattctatggtcatccaagtttttctgggcactatggatattgacctgggttgatgttcagcgacacaataatagaaagatgtagaagtttaattaggagttgagagaactaatctaaaaatgctactagaatatttttggtgaatacttaaatgaataacaagccttaataccattttctaaagagtaattgattcgaatctcactcgaattcctgatccagatgaaggaccaagaaattgatttgaatctcacttgaattcctaatccagacaaaagaccaagaaattgagaaaaaaataaaatatgaagaatttttattgaaaaaaagaacttttagtacaatcctaaataaacttattgctatttatgttatcttggttaactctctccttgtattttgtattaattttacttggaactttagtaattatgagcttgtttaccagtccacctatttggctatttttgttgtaattctaaagggtaattgcttcgaatctcacttgaattcctgatttagacaaaggaccaagaaattgattcgaatctcacttgaattcctaatccagacaaaagaccaagaaattgagaaaaaaaaatattaagaatatttattgaaaaaaaaacttttagtacaatcctaaataaaccaattactttttatgttatcttggttaactctctccttgtatcttgtatttattttacattggagctttagtaattgtgagcttgtttaccagttcacctattcggctattttacttgtaattggatgtatgtatggccattcatacaacacatttaggtggcatttggtttgagttaatgaaatggaatagaatggaaaggaaacaattttcattccattcctttgtttggttgccttttaaagtattggaatggcattccaatggaatgctctttccaccattttagtggaatgattattccattttaaaaaggaaggaaagactattctaatgtaagaagagaaaaaattaatgatttttttatcaattttttttatgtatttaaattttattccattcctattcttattctcattcccatttctatttctatattttcattcttcccaacctactaagaattgtgacaaattatatgttttaatagtaatctagataaattaattactgggcatttatgtcctaaatcacactatcacacaagggagatgcgaagtttgtgcacaatattctgcacctccacgattgcatttccaacaaacatctcataccatgtttgatttctgcatcataaattacttatttttacattattgtgaccctgactttgtgttattgacagagagcgtccaaagtaccaagtcagggaagatgcagatactataggaaatggtcctaaagccataagggatacatctgatactgtgaagggtccacgaaatttaatggaagaaactgttcgaactaggtgggtttactttttactaatgatttcttgtggtgcaatgctaattgtgcgagtggattatatttccactgttgattagttgtgaggtcattactgggggacacactgactattccttatttgcagtaatcatggtaaaaccttgaaaaatgctggatgggattttagcattagtgggtcaccaaatacaggtacggtaaggaatgttgtaaaaccacctcagattagagaaagaaagctagatcttctatataatcaggccagccctgggaaactttcagagagtggaaatcaagggttgcctgcgtctagaaatacatacgaagattattttgggaaagattctagagatcaggaatccacttgcgaggatgtaagtctttctggctcactatcatattataccatacaattatatctatatgtaagttttgaactgataaatggaagggtttttaaataaattagatgggaaataactggcccctcaatattagtatattcagtcatctcttctctatgattggttactttcatctctatttcacgcttagactcctgcccagttgcatggtagttccttacttttgttaccataaagattttgtggactttgggctcttggttctactcgtttttttttattatttcttaaagaaaatagttttataatatggatgaaaaagaacagattttatcaaaagaacatatgtaagaaaagaaaaacagaaatacatataataaaacacaacgattgtttctttttggaaaatttttataacgtaatactgaatacatatgattcgactgatctgagctatcaaattgcatttactggctgaactctttgtgttgactgaaagtttaaaatgactttcagtgcaactcaatttcaatttattgaatgctttcccttgtaactgaatagcaactgaggtgttctattttcaggaaatgtctgtgagtgggtcaggaactgttgtaatacgaactccaaagggttcccagtcatctgcacattttcatgatcccaactcttcggtatgatgtctttacaaaatgtctactacaggaagtttctaactttctttgcggtaattgccttttatttaatataagctatctgtctgctgtttagtctagcagcacatatgcttcttttgaagatgcttcgcctagtggaactgttgtattccgcaaccagcatgatgatgactctccacgtactccaagatctaggctaggaattcaagagagaagttcgtctgcctcacttgaagacagtgttacaaatctcgcagaggttaatttttgtttatagataatacaatcctcttcttcctatattgataacagagtaaaaactatgtaactgggtatttccaaaatatgttttgccactggagtcttttcttttctgaaagtttatatggacaccagacttggttttatagagatgaaactatcatctagaataatgaaaattatatttgggtgttcatgtaaacgcaggcaaaggctgcaattcaaggaggggtcaggaaagggaatgttagagaaaggtttgctttggggaaattcaataatgatggcctggaaaacaaacgggaacacatgacaaatagctctgattcttccaggtaattgttttagctgcaagctactggtgtaattggttttaaattttctttttcttttttctttttttaaattggtgctccacaaacttattaaatgattatttctcagaaattcacatggtcattttgaatcaccaaaagcaatttctaaatcccgccaagaaagtgatgatgaagaaaatgcaaaaattatatcatcctctgcaccattggcaattttgcttatgcctgcgttaaaagaggtaaccattctgcagtttacaccgagtacttttctgtgtcagaattgaaaaacattgttctcaatgtgttttctttttgcttcaatcaatgttccttttattattgtcttttaatattttagtaacaatgttttgggactagaaaattctacagtacaagctcttctatgaaattgaaacaaaatagagtaaaagaaatattttgaactcaggcccgtaacaattgcatgtgagtgacccatgttttttactcactgagcataaaatagcttgagtttgggcttctacaattcagctgcatttagaaccatgctcgggctaagggccttggctgcttgttcagactatgatgaaatttatgtgcatgaactactgaaattaaattgactccatgtattgcactaatggtttctggactggttacattttatgcatttgtgctcaagttctttgagcctttgattaaatttgctgggggaaagctgtatggtaatgttacccaaatatgtgatgtttagaagagtagacatgagaagctaacgtgctactttaccactgcttttgacgtaggtcaatgctgatgattcagaagggcccattgtgcatgcagttgcaaattctctcatcaatatggaacgcttaaaaccaggatcttgtgaagttctcatcagccggttgcttcagcggttatcaaggtgcagaaagtttctcatcagtttcatgccggtcccttttttgtctcatgacatgaaatatttttcagtttctatagactaataagaaaaactttgcagttcaaaagaatcctcgctgaaagatctgcacgaactggcttctcacatatttacaactgaaaagacagcttctgaagaaatacagaacacaattgcagaagcggagaacaagaaaaaacagcagaacaaggaaattcattcaaatgcaaatttaagctcgcttgctagatttttgctctcaaggttggtacaacagtagttttataatctttatctttttaaataattttgatataaacaatgaaaattcttcacctggtatagataaattaatcacacaataactagtatgtagtttcaggtaaagtttaacatgatatttgcccagcgatattaagaaaccaaaaaatgtataggggaaatatgatacaacttgagcaagagttatggttttagttattcttttatctgtcaaagagtaatatggctaacctttatttgtaattatctgttagaatgagttaattttgttcctaaatatgatccctactcttatgaatgaggcttaaaatcttacacaacacatgccgtttgttcaaatgttggagaaaacaaaactagcctatttgcaactgtataacttgtaaaatattgtggtgcagatggcaaggccaagtttcaagagatctcagcccagcttaaatgaactcggaacgtgtcgttgatatttagcgccatcatcgtttgtgctattattattattttattttccttttcttattcaatgtacataaacattgttagaaattgtgtagttatttgtttgattgttattattattattattatttttgttgcaacttttctatcttaaacaattttttggggggttttaaggtggcaacatcgtggctgtataaattatagggatttttactataattacaatttcaagattagaatttactaagattttataactgtcttgtttgaatctgttggagattcaacttatcttatcttgccgtcattttattcttattttggcatagttattcattaaaatgtgccagtcggtttcgtcgtagagttctttatccctacacaaaaatagctctggaaaattcaaaaataaattaaaataaaaaattgggattgaaaatgctaaaataaaatgtttctttgaaaattaaccagtgataaaaaaggcgttctttataatttgataattttacttcacttacttcagcatagaaatttgattaactgatgggaaattacataataatacaattaatcatccaaacacagcaaataaaa

SEQ ID NO: 189084 - DNA, 1078 bp, Cannabis indica
acattgaatgaccgatgaaaataagaaaattgacaagactttcgatctttaaaaatcacttaagaacccttcactcgagagcttttgagctgagtttggtatttctcaatgttagctcaatataaggtagtgtagtatactcacgaaagaatagaccagatttgagctattgtatcagatccaaccgatcgagtggaaattttcttggacattgatgaaagtagccaagagacctgttgatcccaatcttcacacttgcgattgagacgatttagtaatcgatcttcattagtgagaaattttagaggtgtgagagctggatcgagatgccgctaaagtcgacagtctttgatcgtagcaaacagatgatgacgccattaaaagtagttgtgttcatctaatctaacatacaaaaaatgagagaaggtaacatgagaagattttggaagaaaaatagtggttgaattgggattggttgagtgagaggaatctctatggccagccattaattagcaaagtttctataatttcaagaaagagaaagttctgatactacatgaagttttaacacaaaattaaaagattgcattttgtatatcaaatcaacaaagagaatataaaattagttaagattaactcaccaagatcaacccacacttaattaactaaccaacaaagcttaaaagaaagttagttacataagaacttaccaacctactcaattctaatactagcttaaagttagtttaatttctcacttaaccaatttggaatcctaaaagcttaaaaactatatacattatatataaagtatatatctagtgtgtagggtatatatgatgatgacttctcttatattcatatatagttatatatacatctaaataaatgatgagttttggaaagagacaggtacaaacaataatggtgcaccctattactgtatcaaaatataaagatgtaataaatacacaaataatatgccacaaaaaaaaaaaaaaaaaaaaaaattatctattgtactatacatgctactcttcttttcatcatatgccacaattcctcatttactaataat

SEQ ID NO: 189085 - DNA, 1415 bp, Cannabis indica
aataaggggtgcattgatgcactctatattatttaagatattcgataattcttttagaaattcataaaaatttgatgcatcgaaaacaagattcaaataggtaattgcacttgtgttaattttgtcttatatgtatgcgaaataagtaccgcaagcaagacaataagcggcattattagcaaatcttttatcaaaataaacttgaacattaacaagagaatcaattaagattttgcaaactgaaattacagaactgaaaacagaaagcataacaacagtactctcaatagctttaaagagcacttcttttttaactttagaaaaagctctattattccaaaagttgaaatgaattttgatccaatcaactagaaactgaaaagaagagtttttggttctgccaaaacactgaggcaaacctaaatattttcggtttattgtctagtcctagacattgaaaaaggaaagttttttttatcttaaattggagtaagaagagaaaagaactgagtatttattaaaattcaccaattgacctgaagccttgtgatatacatccaaagcttcttaagctagacaggaatttctatttacaattgtaaataaaagatttaactaggaggggattttaatggctcaatgctctaacaaaattaagtacacaagaggttatatggtatgttatgagttgcgtctttttataagttctcaatttcattccattctattcttattttcatttcgtccaaccaaacacaacctaaatttcttcaaatcgcatctttcttttttctcctaatagaatcttcatagagaaacatcatatcattatacagaagttaccctctaagcaaaaatcatgctaagatttccatccagatttgtgatgataatttggaattttcacttaatattttctctaaatcaaaaatttaaagaaaacaatattgtagcacaaacacccaattatatttcattgatcttcccaatacaaacagagtaactactaaaaaataaaaatgaatcaacacattcattgacacactgctgaaacacaattacttggtatgaaaggtaagtaagcaaactacatacaagtatgaaactgatcagttgcaaaaaaaacctgaaaaatgtataaaactatcaacaagtatagttcttattggagacaaaagtctggtgttgagtcaggactcgataggagaagatcgaaaggtttcttcttccctatggtgtcttttaggattgtgatctgaccatccttgagaagtatctcttcgtcgagagactctaacttctttttcagtacattaacctcagagttcaaaagcatgttcttttcactatattgcttcacttcattccacatcaaatctctctctgcagagatttttggcagcatacctctcata

SEQ ID NO: 189086 - DNA, 877 bp, Cannabis indica
attttattttttaataattattaactaattattttaaaggatggagtaattaaaaaattattaatataataatatcgagtagtgtatagaggggagcggagtttcctatggagttctgtaatgacactctctgttatgcgattgtatgtagctatgaaactcgggctgttctcaggtctgtagagggtgtaaatctgctgcattagagtttacactaagcttaaaatataagccgttgatgctttgcatcgttaattttaacggttataaaaggaggagcatagaaatttattatagggtagaagcaggggatagtagaaagagtttggtcagatatacgtaggtaggtttgtcgtgaggtggttgggggtgagatatgaaagtgatttgtttagactgagtgagctacctcgaaggccacgttggacagtatgggcctatttttgggctcttcttgttttcaactttgacgattcgtcctactctttttttttttttttcgggaatagacttaattttttattaagggaaaaaaaccaatatcaagtcacaaaggctcaaataatgttccgtaaactcggtcatctgtcacactctcgccttatttaaggataaagcaagttaaataagattatgagctataaaatttgcaataagattacaataaaagaacttaagaagattaatgtgatcacacatatataacataattgaaccaaattgagtcaagagcaaatttttcttctgtaggatgttagtaacacgttgacaattcatttcatccttcacgttatgaaaacccaagcctagagaaaagcaacaagccctgtagaattgacatagcttcaactacgggaggagaaagaaagcccaacgt

SEQ ID NO: 189087 - DNA, 3080 bp, Cannabis indica
ttatttaatttttttttctcagatatttgtactgtttttgtacattgtataaaaaatatatttgtgtggtgataaatgaaatttcgttaaaatgtcaaaaaagaaaagttagtgaggtcacactcatattcactatgcctgattgtactagataagttcaaacaatataaaataaaaataaacaattttaataatgatttttaaaaaatattttgattctcataatcaataatagaattttataataaatctcaaatcaacatctcaaatattaaaatacattcatgtagagtttctctctttacattgtattttttattgggaaaaataaattaaaaaaaaaattattattatcattattattattaaagcaagagctaaggctaatgcatgtgcttcatgaagtaagattgaaacaaaattgagaagagggccgtcctcttcttcatgtgctatattgtcataaaaatttgaaaaataataattataaaattaaattaaaaattgataaaataaaaataaaataaaaataaaaatttcaatctttatctatttgaggtgtaattgttttttgcttgaggagagttttattgaaggtcgagcctcatcacgaggccatttttatttcatagtacaattacaaataaacatttatagaaaaaaaaaattatttatttattaaaaaaaagtcagaaagaaattaattttatttatttatttaattatttaatttatgtgtgagagagaaagatgatgtagtagtagtggtagtgaaaacccaagccccaaacctttctttcttcttcttcttcttcttcttcattttcaatatccccaaaatgctcagattcttaatctctccaacctattaaccttgaaactccatagatttgatctcaaaccgaaagaaaggaacaatctttacgaatttcagagaaaccccagaaaggaaaagccatgaaaagggaacatccgaatcagaacaatggttctgtagacccttcaatggatcctagctcaagtggtacaggagctggaaaagctgctaaaatatgggatgaagatgataactgttgtggtggacaaccagacggtggtatggatgaacttttagctgttttgggttataaagttaggtcatctgacatggctgaagttgctcaaaagcttgaacagcttgaagaagctatgtgtagtgttcaacaagataatctttcacaacttgcttctgatactgttcattataatccttctgatttatcaacatggttggaaagtatgcttacagagcttaatccttctcctcctaattttgattctgtaatggtaccaccaccaccaccaccaccacaatcacaaccacaaaggccttcgattattgaagaaacttcttacttagctccagctgaatcttcaaccataacttctattgatttcccagatcagagaaatcaaaactcgttagtgtttgaagattcatcttcttcagattacgatctcaaagctattccaggtaaagctatttacagtaatcaaacccattttgaaaccacttcttcttctagagaatcaaaacgactgaaaccctcttcagaaacttacactaacgacgtcgtttcaaaccaaaacgataactcaactcgttctgttatccttgtcgactcacaagagaacggaatcagactcgttcatgctttaatggcttgcgccgaagccgtacagcaaaacaatttcaacatagccgatgctttagtgaaacagatcaattacttagctatgtctcaagccggcgcgatgaggaaagtagctacgttcttcgctcaagccttggctcgaagaatcttcagactttacccagaaaacccattagaccattccttatcggaatttcttcagatgcacttttacgagacttgtccgtacctcaaattcgctcatttcaccgcgaatcaagctattctcgaagcttttcaaggcaagaagagagttcacgtcatcgatttctccatgaatcaaggtatgcaatggccggctctgatgcaagctttggctctaagaccaggcggtccaccagctttccgtttaaccggaatcggacctccggcaccggataactcagatcatctacaagaagtggttggaattagcacattagcagaaacgattcatgtcgaatttgaatatcgagggtttgtggctaacagtttagcagatctcgatgcttcgatgcttgaactcagaccgagtgaggtcgaatcggtggcggttaactcagtattcgagcttcacaagttgttagctcgtcctggagccatagataaggttttatctgtggtgaaacaaatgaagccggagatcgtcaccattgttgaacaagaagctaaccacaacggacctgtcttcgtcgaccgattcacggaagcgcttcactattactcaacgctttttgactcgcttgaaggatcggtcaacggtcaagacaagatcatgtcggaggtttatttggggaaacagatagcgaacgtggtcgcctgcgaaggaccagaccgagtcgaaagacacgagactctgactcagtggcgaactcggatggaatcgtccgggttttctcctgctcacctcggatccaacgctttcaaacaagccagtatgttgttagccctcttcgccggcggcgatggctaccgcgtcgaggagaataacggttgtctcatgttgggttggcatacgagaccgctcatcgccacttccgcttggcaactcgccgggaaaagactcagtgccgctcactgagtcacgcaaacgagtcgatgcggttaaccgggtcgggttttccgacccgcccgattcgaataagtttgccccgcattctgggttttgttttgttttgtttttttttaaacaggaaaaaatgtgttattttctgagctgggtgccttgctgagactaaggccctacaacaagacccataattttacccctttttttttttagagtttgttttaattttatttaggtaattttttaggagtttttttttttactttttattggttggtatgaatacttttttttgttaa

SEQ ID NO: 189088 - DNA, 1980 bp, Cannabis indica
taattatggatattctgttaaagtatattctgttaaaataaagagataacccaaaaagaatcgttaaactaagaattgttaaactaagaattgccgttaaatacgcacttttaatatataaagatattgttatgattttaaatttgatttgaaaaaaaaaaaacgtgatgaaaattttaggtgatttttttttaatacttaataattccaattaaatattaattttggaattattatttatcaagttaataaaaaatttaaaaaaaaaaagaagagaattaaggagaaaaaaaagaaagatgactttgaagaatttttaaaccgccacatcaccgctttatgcttctcctttatatatatatatatagatagatttaaacatatttgaaagtttttaatattagttttatttaattgttaattaattgttatttttatacatataatttttaaatattttttattttaaactaaacatgagacgtgacaaaaaacacaacattcacgtcaacattttgttatcattaaaagaaattatcaaaatattaatatactataaaaacaaacataaattcaattaaatacttatttttattctattttcataaatataatttttaattacaaatatatattgtaagtaattaaaatacatatacattttttctcgatttttctagtgcccccttcacctttatgtgggtcgctcctctatacacccaatccatcatctcctctcatattttcacgcctcatatacaatctttctttaacgcattccatcatacctactaaataaagaggtagtgctaaatttgttttggttgggttatttgatcagatatgtatacctaattcttatataattattattgtgttctagattatatacaaattgtatcttgagttatttaattttctatcatctgaccattaagctgaagcttagtctgaaaagcttgaatgtgtctcgacagtttgtcgacgttctcctaaaagcctgacgaccataatgacttaaggggatcaatgtcaaggactagggctgcgtctgggaatagcctcgatcgtactcgaagaagaatatctgaaatctcatttgcagtgtcagaaattcactggaaagttttttctgagttttgggtgattttcattctcagaaaaatttagaatcataagcaaaaatggcaaaattggtgtatgtttgatctttgctctatttatttgcaaactggcaatccacgtactctcaatcaaacgactcaagtcatatcttaaaaaatacaataagatccaacgaaccgagaatatggaagggtgccatttaatgttgtatatgggattgaggctctttaatgatgatattcaccttaaaaatcccactgacatgactagtcatcatctcgtgtcctcgggtttcatgggccttctcgaggcgcatagcatgcatgaacaagggattcatgacacgtgcagtttacttagggaaaatgaaggattcacaacttttcacaacctattgccttggaattctaaaagaccaacccaaggttccacattcctcggtgaatccagaaagaagttgtaagtcttcgtgactctcgagcctcgaaggcttgggggtaaatgttatccatgtttctagattaatgacacatgtacttccaaggcctaaaattaaccaagatgggccctttctaaggcccacttaagttaatggattagcacacaacagagtcgggttacagctctgaacccagacccagacacaagtccaacttacaaacatgataaaggctgaccattttggtccgggaaggaccatctgcctagaagacgtgtaacgccctaacaattaggcacgtcacgataactgattatgaaaccctaatcccctaaactgggattactagaaacgtaagcgcgggaaaatttaatctttatttacaacgggataaaaattaaacttgtaataatttt

SEQ ID NO: 189089 - DNA, 3481 bp, Cannabis indica
tttctctgtgacatgccatattaatgatcaggaatctacttgtgatatgaagcgcgcaattcaaataagggataggaagcttggcgtcctatctgaaaaagtaaagtctcatttattgttatttgattctatagagaaagaggcagtttccgtcaagcaagttgtcgataatgtgcaacacatgatgagtgaaaaagaagatctaggcaagtagctttactcttgcctcagttgctttggaatttaggacttcagttcatgaaatttctgataagatttctgttttactttgctgtttatagtggctgacttgaacaacaaactggataaagtctctgcattcgagaaagtgtttgttggtaattaaagtttgtgatcatctgagtttattagttgattttttgttgtttttggtagttcaagtcataatttgttgagaattagtttctgcatgcatgatgcttgtagatgcaagtggggattttcttgaaaaccacttcatttgctttcatttatcaagttcaaaaatgtaccagtgaccagtcagagtgatagaattttgcttgttttatgataaataaattaagcactgaactagctgcatattgatggtacttgtgttttattattgactcaatattggactttttatgcagaaaggattgttgaattggaagaaaaactgaaatgtgaagaatatgagatacaaagaaagaatagagtaatctcggagcttgaagcacaggttgaggcagcaaaagttagtactgcctgtcaaactcagatagatgagatatccatatcagtaacaaaacctagtggacttaattcattttatcataactgcaatatctgttggataaatatttcattttgtgttactcttcaaggaaattatgtttagcctggggttctttccttaaccaaaactcaccttcagaaaattctttcatcaaaggacgtagtcattgagaatctaatttcagaaaaagaggtttggatatttggttctcagtcacttatttatgcttttatgtgtcaattacctttcaaacatttcttgaaaaattggtttcaggcactgcactctgaacttcagagtttggatattgtcataaagagtattcagggcaatctcaaaaatattaatgaagaggtagggaaaaatagttactgcattcacttctagtgtcacaagactgtaaattcagagatatgttggatttttattaagaaacttatcaatatattttaattatatcaagtaaattgtgttaatgaaccacttgaggctagctcaagtggccatatagagagtattggtgtgtaactcaaaaatataatataaagacgcttctatgtaaagtgtgttaatgaacaaaaagaatatatttggtaagtttaagcataagataaaccctgattgtttgcacaattggtattattagaactcagaattcaactaggtgtttgacagagctttataaaaaacttatgttgctttcaatttgaatgttcttctggcaatcccatagaatgatattttcatggtttattcaatatgtatatcctttatgtgatgtattgttttcctctgttaagcaagtagttccttaataatttctggatgatcttcaaaggcacacattatgtctattttatttcactgcaaggataaagacaggttcgcctcaatacttgaataccaagaaggaagcatcatggctttgacaactggtaacaggtagtataattttattattatactgcggtatattttttaagtttaactctcagttgcgaataaaaatatataaatttaatttttagcggaaataacactttatatttttagaactctgtaggtacctaactatgttaagccattgtacacgtgtcattatcttattgaaatatttagatcaaatgttttttaaaaaaaataaaaatttaatgacttggatcaatcaagaattatcacgtagtaatttacttaaaacttaacagccaagttccagaattataactgagatattattaccgtaaaaaattaaacttggtatttatttgcaactttatgccgcaaattactcatttttaattagtattttgcaatattatgtaattaaaatgatcaaatagaaaatgtgagaagaaacagcctagtgtagatgctgcagttcaggtcttttgtaaggtagacagaataattaagtgctggttgcttggttcaaggtccaaatcttaaatatgcagcaataagttgttgactgatatatttataaaattaaggattctagtttgttcatgtttgtgtattcgcacaagtaacacagattctgagtcttcctccaagatcttaaaaaccttgtagaaaccagaaaagggtataatactaataattgtattaatattaaaatcctaatgaacacgattacactagttgctgtgcttgaattggaatgaaaatctgatggataaatcacattaatagattctcatataactgatttactagtaatgttaaaattatgcaattatgccaggattgataatgttaacggaaacagcacaggaagatgctcaaacaaggattacatgattggggctgcagcatgtacaggtttcttgcaaactttagctctgctgagtctttttgaagaggggctgtactcagtttaaccataaaggattggataattgcacactaatagattatttcaagtaaatttagactgctgatgccacagaaatgataaggaaacgcaacatttgtgcagattcatctctatctccaaagtctgttggcacacacttactggaaagcattagcgtggattcgtgtgtgtcaaaggtaagtggaatatattgtcgcatgacatgcatagactcgtgaattggtgactatcttttgaaataatgatttctatatttttgagatttgactgtttttccctctctctcagtcagcttcctcagagcctcaatcagtaattaatgctccatgcatttctgcaaatgaggagaatgtaggagagaagccattttttcctaccttggctacatgagttcattttaacaaatttttttcttcaaatattttgtgtcattaatattttgatttagtttctgaagtaaggttgcattttgaaattactctagaaaaaatttctctgtaatatctatcagaattttggccttaatttggctttatttaggttgatgccttgaaatagtaatatgcacggacaaaaatttataatcaacgttttaaaaaaatatatttttggttgaaaataatgaaattttatttacacttcaaaaacattctattttattatttttattttatataaaatatatctttaatttatattatttttttttctttttcacattcttgaaaaatgtcaatcaatcaatcaaatgagagaaattagaccgtgacaatctaaaattaattacaataagtttatgtatt

SEQ ID NO: 189090 - DNA, 894 bp, Cannabis indica
ctctttaatttatatccaattttttagattatattgactctaattttaataaattatgtaatatttagtactttattataaaataaaatatttattaattaaaatcattttacagttatattttatttgtatgaaaaacttaactgtggaagcttcttcaagaacaaaaacagttcttccatgccaattgtccaaagtggaaatggtgagggagttgatgaaattgaagtactttttgagtccatctatggataagggctcggcgatgaggcggcggaggcgcttgtgggcgtctccggtggtttggagcaagcttgtggggccaagcacttgctgtcctgtgtagaataggttcaaactcaccattccatcttttccacttaataatattttgcttgcttctcttccagtcatgaaaactgtgaatcttcctaatacaaatgacttgaatactttcccatacctataatataatttatttatcatcatcaaataccataccactattgttaaaatcaaattaataatatttagcattatttttttggattagttgtttggcaatattattcttttgcataattctttacaattattttgctctagaagttaggtgaaaaccacaaaaacatcacaaaaaagatatcaaacaattcgtagattacaaagaacaaaaaccatattctttcatagagggatacaatcagacaacctatctaaaatattttttcttttttgaaaggtttgaaatgttattttgtaaaaattggaaaatttttaaaaatattttttttatgttttatttacaattttacgaacgaaatttttatttatagaaatacgcttgtactattttaaaattatagaaatagacttttgtcaaaaaaaaaaaaa

SEQ ID NO: 189091 - DNA, 1241 bp, Cannabis indica
tggtgatcctgatcttgagaccaccgcaaaagctttgaaggttcttgattcttgtggatcagatataattgaactgggtgtcccttactctgatcctttggctgatggtcctgttatacaggttgctttcttttattacattgataataataatgataatgatttcattattagttcattgtacttatgtttttatgcgtatgtccttttaggctgcagctactcgttccttggcaagagggaccaattttgattcaattatttcaatgttgaaagaggtacaaacaatattatactctaaaattttctatgatgtttctttcattcatggtttgtatgaggaggattatctaataatagagtttgttggtatgataggtggttccggaagttatcttgtccgattgctttattcacatattacaaccctattctgaagcgtggtactcagaattttatgtctatcataaaagatgttggtgtacatggtaccaaattttatttccttgtcttgtcttggtttttctttttcttctttttgataatgtaacaaattttgaaacaatattagattcacaccctttcggattgctgcactttgttaaccaattaatctgatgttttactttttcatcattcgtgttgtttgcagggcttgtagtccctgatgttccattagaagaaactgataacttaagaaaggaagctctgaaaaaggatattgaactggtatgtttcattcatttagatggctacaatttatttttcatttggaaataaaattcacctgtattttctttctatgcttcaaaggtattgcttaccacacccactactcccaatgatcgaatgaaagccattgttgaagctgctgaaggatttatctatctggtaaggtttttgtatggatcaatcttgtttcttctgtagtttttctgcagcttaatgtattactttaagtaagcttggttcactcagttctctctttagacattaattttgaggtgttatttgtttatgaaatgtataataggtgagttcagttggagttactggaacccgtgaatctgttagcggacgagttgaaggtcttctgagggaaatcaaagaggtttgtcttgatcagcttaactgctaaataatgttttgtactgttcatctcattactattgtaactcatctgtccatagcagaaaagaaatatagactgacaaaccaaaattacattttttttttttttt

SEQ ID NO: 189092 - DNA, 4520 bp, Cannabis indica
ttttttaatgttaattttttttttgtgtggtcaactgtcttaggattttgtcattagaaaaagactttcatttagtttggaagaaaattattcatattaagcactatatttagaatatttgtttatggtcacgcaaaagttatagcaataaaaagatagaaaaaaaaatagtattatcattttttattataattttttagtcaatttttattcttcgtgtttaaaaatatatgttggaatatttattttcttgacggtgttcgttatggttacaatattatttttataaatttaaaaataaattgaatagtttattgggccaaaaaataaatttaaaattttttaaataattatagtaaactgaaatatcaataattctacttttggtattataaattatttaaaaaaatttaaaattacaaaaataatattataagtatagtaaatactgatatagaaaaaaatattctacatttcagacataaaatttattaaaaacttgtaattagtaatgctaaaaaaaatctatataataaagaaattgacttgcaacatagaatttgatagaaaatgataacaccgaatctagatgagtatatataatcaatttagaatttagaatataataataaataacattaaattagaaatatttacttttcctttccataaatttttacccttattccaattttagcctataggtgagtttttgtacaaaggaaaataatttatatggttttaaattagtattagagaagtaaatactttactatcttttgcatttacattgattacattaggatgtggcagagtggaaattcctcaaaaagtgacaataatatatgtggaattaattatgatatatatacatatatttcctcaaagtgaaaattaattattatgatatatatttttatgagtactaaaaaaagaagaagagattctgtagaagaaaattgaaagcttttaaaagcttagctgtatataataaaaataatttgtatctgaccttgctaaaattctggctagattcattcctattgaagaaacaatgtttgtatttaataatttatatttatttttaggataaagacagtttttttctcttaaattataatagacaaattactgtttatttaaatggttatctgctaacacttatgttattatccaaattcttactctaattctctgttttttttttaatgaaagtaaatactttcattatacagctaaataaaatattattctaagtgataatatgatcaaattataaataagaattacgagtaagataagacacaactttatttattgatcataaaacaaaacaaataacaacattattaagaatagataaacaaatttttacaaacactaataattaaaccaaatataaaaagatataaaaagtatttggacacaattttgaactacttaaacaattaacaaactatcagtttcaaccatcacatcggattaattcttcatttttatttaacttaaaagccttatttaaatttagtctcatcgataataggctgaacacaccccaaattatgcatagcaaaagcttcaagtaagagaccattcggcccccaagcaacaagaacaaccccataagagttttgagtttcgaaaatagtcccgttaacattaatctttgatcttattagtatttggttaatgtttttaagtgttattgatttcttctaaacataaataaataagtatttattgtaaaaaatatttaaattattatgttgagttgatttaattattttagcagcaaaaacattgaaattactatatttagtattcattttttttatttggaataaagtttagatttattaatgaagtcactcaacaaaataagaaatgttcctttcatcttcagcattcttccaatccaaattattttttaaaaggacaagtacctaaataattacatttgtaagactaataaaaaaagaaaaaaaaaacgacctagcctcattaaaactcatgagcaaactcagtgggggaaatctcatgtcacgaagaaaaaaagtgtcaaaataatattatcaatcaataagagtcggtctataaagaggcattgatacaaccgcgtagacaaaccatcaaacaaaatgatcattcaaagaaagatctagttttttcaatgagtgagcaacactattcacaatcctaagagaatgagcaaaagagaaaatcactaaagtaattacaataagtcaaagtatctataataatgtagcttaattaaaaatgatccaccgaatgatttttaagagtgtttaagatattgagacaatctaataccaccataatatgaacatagccaaaccaaatgcaaactccattatcatataaattgatcataactctgaccattacaggagtcaagacaccactaaaaagtaaaatgatcgtggctaaaacaccaccagaagaatctatatcacaccaaaacccattctaacatttggaatattcaaaccagcatcacaattaattttaataatcccagaatttcacccatcactagctctagagacttttgtaatacttaagtaattatgttattattgctttttgcagtaaaaatgctcattataaacaaattaccacttaggcatacataagtaccaaacaaattatttagatactagttatatatataatagtttgattatttttgtcattaaataaataatttggctactcaagagttaaagttgaagaccatggagaaatgatgcaaagtccacaatgatgccacaggaagaatagagaccggggaaagagccttaggagcgcgaggagtcttttggtttgcctcctagtagttacgggaaaatgacaaagcccaccccaaaactccttcagtgttgagaagtttatggtgatgaactcattggtttcggcgatacaaaattcgccacaagagaaccaacataagttccatatcttcttttgcataaacaacctcatgttctgaagaaaagagtagaggttagttttaggcaaataagaggaaggagtcacaaaaccaaccaatttcacattagacctaaggctagaagaatcccaaagagcttggaatgaggtttcatcttcaatcccacaaactagacaggcatgaactgtgagaactttatgaagagcgagattataagtaggaaaccaatctaagcaagttttctaaatagacactttaatcttaggagagatagaaagactctaaagataattccaccaagaagagggacctgaagaggagtcatattgcccctttcttaaaagtctaatcgcatttcagtacccgttcttaactgtgtacccactcgatgagttgtaatgccaaatcaaacaatcatgttgttgttgggaacggggtagagcccaaatctagagagcttcatcaatcgagaagagttcattaataagaccgtcattcaaatccccattaacgagtttaagatcactaaccataatcacattcggttagtcatgaaaagagtaagagatagaagcaaacctttttgaaatccaaatttaggacttaatacttacgttggagccatatgagccaccgaccgaccaccttccacaaaaatttcctaaccctataaaatgctcttctaaagaaaagagcctttggatgtcccctctacatttagaaaatccccattcgaaaaataagtaccttttataactctcgcaacaagagactttggaacaaagtagagtctccaagcttgtttagctaacaaggctttattaaacacagatatcacgaagctcgtgtcaccatccgacttgtgccagcaaaacctctcctaagtacaccaatgcattttcctgttatcatcatcagcaccccaccaaagtctggcgcaaagtctatataattcctcattcaatttcacagggagacaaaagattcatcgcataagtcagaatatcttaaatgactgatttaagaaacacctcacgacctccagtagaaaaaaatttaccttccaaacaaaaaaaaaattagttccacaccctatccagtatagactgaaaaaggttggatctattgtgtgccgcaaaaacaaaggagccccaaatacttctcataatacttaagttttacataataatttaagtattttcaatgcaaatatatatatattatattcatatttcattgtctatcagaattgtcttttcaaaaaaaaatatgaaaaaagttgttcaacaaaataagaatacaaaaatagcattgttatataggcacggcgtatgtaacaccataagatactatagcaattctaaaaaaacaaatgataccaattaggggaaaaaaacaaaagtagttgaaactaaaataattcatctacaaggttggaacatcatttgagttacaattatgtacaatgaaattggacttaagaaaggccaatacttctacatcattgattgagaatatttgtcacaacaacaaagcctaatcttttatc

SEQ ID NO: 189093 - DNA, 1413 bp, Cannabis indica
ccagctcatcctttttaatactatatacaatattctttatcctatgtatactatcatgcaaatatattactaaattattaaatatatataagtactggtgattacttattagtcacactagctagcatcggcatgccaagtgccaacaacgaccaccaaatcacagaaaagaatcaaatgaaatactcaattaatacaaacagcaatatcctttgttgtcattacaagccaaacccaaagccaaaatcaaatatatcaaagtagatcttcatcatgatatataccctcagaaagatgacacaaactcactcttgcttatttgttcatcattacagaagtaaaagagaaaaaacactcgaacataaggaatcaacaatcaatgtaattttgttgcaaacaaaaaagaaatgacaaatcaaacttataattgtatatgaataaggtttaatcaatcatcagtggtgtcgatattgaaaattcgagcacaagtataaactgagcaaaatgcttgcaaagccatcaaaagcaacatcaaaacagcagccaacaaagtgaggaacttccatgaattaagcacgtaaagtttcatgacctttccaaatttaaccttccatctcccgttgtgatacttgttcacatcttcaatgaccttatctaagaagggtactttagtcaatctaatggacttgctcatcccattccacaagttagctacttctttatcactcttcaaatggttcataatgatacctctttctctaagtagttttacatcttcatccgtatcaataatcccattcattaactcagtgtaacgtgtaaaaaccaacggcccagatgcattagatacttcataagcaactaagtttctcattatggcctcggcattgacgtctaagctaacggcagggaggtaaagagtaaatgttttgacgtcaaaagtaacggttgagaggttaccgtttgttggcaagaattgaacaccagatttgaagagctcactcacggtaggaataaaaatctcttcaatcaatggtggcttgttgttaaaattctcctcttctggtttaacttcttctttgtctacattgaaaaacaagtactcaacgggcgttttaaggagtttgaatccaggaagattggacaagattttccatggcagtagcaaaaatagtttaactggtttagagaaaagtaacctcttaaggagacgtattggacctttgtttagcttggaaaccatcttccaaattatagaaagaaccttttttacagagttagtattattgaaaaagctttctttcccttcttcttcttcatgatcattatcatcgctactttgatcctccacaacctgaattacttcatcttgtcgtggttgaagtagtttcattttgggtgtgatcatgtcgt

SEQ ID NO: 189094 - DNA, 2215 bp, Cannabis indica
ataaattttaatgtcgaaatagtataaggcataagcatttataaaataatagttatacactattattagtatagtatacctatgcttacataaccttaattttttatgataaatatataacaaaaaataatataaaaaaatcatatttatattttaatttttatatttactgttatacatatacatataatttttactaaaaatttaatgttgctcaccttcgcatgaaaaaaaaatctggccaagttggcggacaggtacaggtctaactcgaacccataggttagcaaaaatcagatttgaactcgtttgtaagagttgactgggttggacctgacccatccgtagagaacaagttttctcaaacaaacgggttggccgggtcgggttcgggtggctttttcgggtccaggtcaaattttgtcaaaatattcagtcttaattgttgatagtataaaaaaagagagatttttttaattaaataataaaattaagtcattggattaaaattgaatttttaaaaatgcttaaatgtgttgcatggtctaataaatactatcctattagatatcaaagaaaatatgctacctttatttttagtaccaaatatacccctcaaataataaaactaaaccccttccctctctttcctctctcattcttctctctctgtagaaggtcacacacacacaccttttgccggagtctatcaacttagcttgacaaccaagtgtgcaggaacaacccaaactcacataccgacataattcttgaaaaaaaacaatgggtatgtaatttatttagtaatttttgttagattttgttgtattttgttgtatttaagttgatataaatagatctacacatatcattcttttcatttagttgttttgttcccgaaacttgatctgctcaaattctgcattttctagtttttttcgagtttagtgaattttagcaatgtcgttatcgatatctagcaacatgagagtgtgatggaggttaagaatgacttttaataacatataacgacatgcagcgatggaatttatgacactaggaaggatttgttatctacttacaattttagcgatgtctatcaatattgtttgcgatatgtgtcgacagtttttagaaatagtgtttggtgaagtagcgaatgaaatttagctactagtagcgatttgttgcaatgcaattgttgacatggttcaccaaagttacgacatctattgcgatgtttctcgacatattttttccttgcttaattttttttccattttgtttgcagattcaattgtatttgtagttgtactgcatttccttccccaaggcatatgtcgcaacatgttgacaaacatatcgccacatgtcactaactacaagaaggaaaagaggaaacaataaaaagacatcaatatcacaaaatatgtcgataacatattgctacatgtcgctaactaaaaacatcaaattacaaatgatgtcgataacgtatcgctacatgttgccaaggatttcaactttcaataacttaacaaatatcgcgagatgtcgctaactatgtcgactaatgtcgctaaccattagagcttcctagtctaaccaaactatgtcggcaaaagtcactaatatgtcgagaatcgttgctaaaagaaaaataactagcacattttgttctaatttagatgatatcgtaagacctcacaaacaatatcactaaatgtcgataatctacgaaaaaattagaagttgaacaaacatcaatgaaaatcaacccaaaacacaaaaatcaaacttaatctaaacaaatttcctttcaatcaaccacaaacaataaaaaaaattgaaagacccattgaaattaaacataagttcaaaaacataccttttttttttgcaattttaggggggtgagtttcgtgattttttcttgggtgtctccggtgtgttttgtcgggggttaagaggtctggacttcatctagtttagggatgtgcgtgcgaacgacgatggtcatgaatttttttaggtgggtttggtgagagttagagaagaggagagttagacgagagaaggagggagaattagaaggagagagtatttgaataaggatgatattttgggatttaaggagttttggagtattaaatccctacgtattttaaaattgggatactaaaaaatcatgcacccaatttaagaatggattgcc

SEQ ID NO: 189095 - DNA, 2070 bp, Cannabis indica
cttgttatttttcaaacaggcttcgacaggttccagtcttccctgttcaaaacaataaagatattagttagatttgatagtctgtgcaaccttgtccatgaaacaatcagtccaactgcccctcttcataagctcaagcctgccagcttagggtctatggtactctaggctgtttttatgtgacaaggcaaataaattgaagtttattaagaggactttggaaaatggcttgaatccatcaattttttgtttttatgtggctataatttgtccatattttattctcattattgatgactttgtgccataaatagtagtttcagtccactcaaattacttcaatatgtaatttaatgacttatcatgttgtgaatttgcttatgacagatacagattcactttcctatacaatcaatgcaagtacaacagtgttcaaaatataaaaaggatggagagtagtacagggaatgaagaaaaagagagaaacagaataaaaaattacaataaataatcagcatttaaaggacatagttctaatcatatttccttatcatagtaattttgttccgttttggcaattacatgtcagttttggggattttttagttcatagtgtataaaatgatttaaacccagataaaattgagaagaacaacagcctatttgtgcggttatgccaagatgtttacaccacaaataactaaacaacattaaaagaaaaatttgaaagaaaaaaactaattgtatgaatgcaggtaaaaagaaaatcatgataagatttctcctacaacatcatacaaacaagagagaagaattaagaaatgatatatcgctcacctgctcagaaatcccaagaccagttccttctttccagccatgtttctttaaaagctacaaaatattagaacccataactaagcgaaagataaaatcaaaatagacagaaaattcaacaagtcaaatttaacaaaatttagtgggaaaaaagataccttaaaaccaatattggagggatcaattgcccctgatgaaccactactgtaagcctccgagtctttaatcatggtacctcctaaccagaataagatcataattatttccaatgaaaaattgtaaaacaaaacaattcaattttgcaaatatgaaccctccctccctccccttccttttacgaacactcaattaggttcttctcaagcagcttgactacataatttggactagtttcaaatcatgcataaacataacgtgaaagaaatcaattaatcctgaatttcaaaacaagaaaaacaaaataattcataaacttggaagcgaatatatacttttctacagccaatgaattttaattttattacaaagtttgcgaaaacaaagataatctttgatatttatttgacaaatgaactctgtcaataaaaaaaaaaaatgcgaaaagtgaacatagatttcaaattcactacaacaatttaggctcagaattacagttctaaaatttatagtcaaagtgtgggtgtttgtattaacatagcatacctgatagggatgaaccgcaaagtgcgtaggctggaggttccaattgttgcggcggaagagatagaatttagggcttctgagtgaatttgagaaagaaaagaaaagctttgccggcggaggcactgcctgtattatggtttacgtgatcatggaattggaatcggtaatgaaactccttcaacttatacaatttaactttttttttaacaaaaagttttaccattttttttttaatttggggatcatttaaatgtcatttcttaaaatggtatattcagtatatcaatatctatactaaaaaaaattaagagatttttacactttgtgtcatattttgctttcttttttttttacaatttttgtatttattcagttatttaaatatttataaaaaatttatttttcaatattagatttttaaaagtttgataattacaaaatacacatgcatgcttatgtcatgagttttctcccatattacacggcatctctgccatctttttctctttcaattatttttttttgaattttttc

SEQ ID NO: 189096 - DNA, 10280 bp, Cannabis indica
aagaaaatccaacaaaagataattttgtcttccagcaagcctagttcatcatcaagttcatatactccatcttcacaaggtgaagaaagtgaaagtgggtcgtatcgttcatcttcacaaggcaaagaaagtgaaagtgggtcgtattcttcatcttcacaaggcgaagaaagtgaaagcgggtcgtatccttcatcttcacaaggcaatgaaagtgaaaatgggtcgtatttgactacgagctctgcagaggatgatgaaagtgagcaacaaagtagctccagttatggaagaactggactaagacagactagaacaaatgtaccaaaacaaagggcagactcaaaaaaaggaatcggacgattgaggaggttgaaaaacaagttagggttcatcttccatcaccaacatcatcatcatcaccaccaccaccaccatcaccatagcaactggaagctattgagaaatgtatttcactccaagaagaaagataagaaaattagacatggagggtttgaagctacaagaaataatcagatgaaaaaatcagtggtgaaaaggaataagaagcacggcaaccaggacaatgttgagaattttcaagctcttgtggaggggctaatgcggcatgtgggtggccaccattcaaaggaaaagcccgaggtgaaaattgacactaataaggtgttggtgaagaggattcatttgtggcaacagcttcgtcgtcgtaagggaatgaagctacctaatagacaaggccgtgttaaggtagtagggtttaaccgtaaaacaccaaacctaaagatgtgattgtaaaacaagagcttattataacaaagtgcccttcttttatctaaaagagtatatttatttatgaataggttttaagaaccatgccttctatgactgatacatgacgtgatgctatatcctatatgaatgccatcttttctaaaacaaagaatcgtattgtatactgtttttgtatactgctcaagggcattgtaagaaggtaagcattatggaaattttaataattaacagggatcaaatggggcagtaaattaggataggttatactatttataatgataaattcagaatcaactagactgctcaagaaaaaacatgttgtgattaatgaacatggcattagaaaaaacaggtgaacaatgagtgaatagtatcttcacaattactacactgtaaatctaagggtagttttcaccccaagtaagaaggaagaagtggggtaaaattaaaacacatcccacctttccaggaaataatacaaagaaacatttaactttacctgtgtgttagctagctggctgctaattaagagtgagctaaggacgagagttgtcgccaactgtatatggcaaattttcggccagaaaactttttacttattttcttgtgtttttcttctttttctatgctctacaaaatttcccaatactcatgaaactgctgagtgcccacttttctgcttccatgaaggggttgagttttgagaaccttgctgaagttcttccttcaatcgtttagttggagaagattgtcgtgaactagaagaatataacagaattcataaatataaatacaagttcaaaagtagccatcataaaaaatcaactgctaaaatggcatcatgcaagcaacttataaaagctgatgaagttatatatattcaattaattaatgacatcgattaaattatatatttatctagatgccagaatctatctctctcctattgcccaacgaaacttgatagccttagcacaaacagttacagaataaaagatttcacatctgtgccaccttacctcggggaattggcgcgcttttgcacttgctgattgactgctgtggaagatgccctcccaggctcaatgtcagaagcctgcagtaatttcacacttgtcattaatgcgtatgaatcaataagcaccaatcaagagagagaaagaaaatcagaagaataaggacagacaaattgctttaaaaagatcaatacatagataacagaactctttatatcacacatttggtaaaaagaaaagctattcagggagcttgtgttgcacatgaagaaaaaaaaaccatttttcaatccactgaatacatttgggcacaacacaaacatacaaaatttgacaagaaataggtggtgtttggttggaagaacataacaatcggaatgagaatgggaatggaaataggaatgagatggaattaaatttaaaatgcattaaaaaattgataaaaaaattattaattttttttctattcttgcattggaatggtcttcccttcaatttaaaagtggactagttattctaccaaaatgataaaaaaaattattccattagaatgaaactccaatactttaaaatgtaacaaaaaaatgaatggaataattgtttcctttctattccattccaaatcattacctacaaccaaacgccacctaaattcataaatgattcaaaaagaacaaagtgcattgaaatatagtttttacaagcaaaacactaaaaacagtgtgaagacagcctagcaaccatgggggaaaagttacttttttcccttacaaaaagataacttgtgtatcaacaaatgatgatgaacaacattattgataccaaagccaaaaaaaaaaaaagataaattaatcatttgggaatacttggataaggggtcgaactagggactgaccaccaagctcttaccttttaaataatgagctaatggagcaggaaatggcagcagtagcagacatggagtcagctcactcccctttttcagtgttttagccatcacattggtccaatgcaaattttgaaaaaggagtggttttcagtagataaccactaacctttacctggaaatgtctttgcccacataccctttatccaagcatcacctatgatcttgagcataaaatatcaaatcaattactgaaagcatcatttaagaattcccacctctgaagtgctttctttggccaactcatcttccccaactgcttctgttgatccaggcttgatagtatcccatagaaagccattctcatttccaagagaaagcttattaaaatccctgtctactgcagctccagagcgaggtgcaatataagccacatatttttctgccattcaatgcatgaaaagttacctcagcatcttttagcatatacttcacacatgtgatactttgtccagattcaaaatcaatttaatatacatgcatcaaaaagcatcccttcatttcaagccccatttccccaaacaaccaccctattctacaggaacagaagtcccacctcaagctcaaaaaacatcttatttctatttcaagggggaactaactttgaacaactcatttcaaaatatatagagaaggaaaaaaaattaacaatacagatcatgtggctacacacacaagaactcatttagcacgacttagggaaaaaggaaaaaagaaaatcaatcacaggatgttataccagctaagttatgaagggcgttctcggcggcttgttgttgggcatcctttctagtcttacccatcccaacgcctatcttctcaccagtgaacagtacctaaaagtgccaagtcaacagtaagcatgatagattcaaagaacagataaagatagttccttagaacgtacaagttaagcaaaaggcttatttgtatgtacagtacccaaactgtgtattaacaaataggtcctcatttttagtttaaaaaaataaataaataattgtaaatattgaaaaatctagtgagaattttctaaatgtataatctgataaaaaaaattatattaattaatataatttacaggttgagatcattcttaaaacacatatgagatccataataatattgcattttgttaatataaactatagatttaatccttgcagaaaaagaaaaaacaaacaaacaaactttagttttgttaattcgtatttaatatttcactttatttttataattaatttaattatattgttaatatttttgttaaaataaacttatatattttttgttacagttggcatcaattttttagtatttagttcttgtttattttatatttaagtttagttttaattctatttttaacatatatatgtatatacataacaataatatggtcggaaaccaatttgacaatacaactcgagaccaagctcagtatatttttaatcattgcaagatttttttaaggtggtaggcctagctcctagggacatatttgcattaaaatggcaagtttgtaaaccgactgccaaatataattgtatggggacaaccttgccaaaaacataatttacggactgtgataagcccaaacataactttaataaatattaaaaaaaaaaaagaagaagaagaattaggaattctttagtatcaccatttaattccaatctcattgcaacaataacatgcacattgcctatttctacagttttatttaatttgatatattagacatgaaacaaatttcagaaacactaccttttcctaacatccttgtgaataaatttatgattggtactacttcaacttaatgaatacaaactaatgttttattttttgctgaatagaatagaaactaatgtatcatgcaagaatatcactgaccataagtacactaaaggttaaacaacatagagacttgagagaaagaaaaaggaaaatgtctaccaacctccacagaaaactgcaaatccttactggtgctcagaacagacttaaattcaacctgtgaagaaaggtatatatgatatacaaaactttaaaaacaaaaaaaataataaaaaattaatgtaatcactcggtacccttgagctgcatctacgtgcaatttcttgcaggactcctatagataaaggagatggtaacaggttcagctttccaccttcagcatggagttctctattggtggaagatacctgattttgcaatgcaccagaaactgcaaaaggcaataatcagatagaacataaaattaatgataatatcacaaatggaagactaagaggaaatttatgggatttgatttaaaagggagtgacccgtggtcaccattttcactaaaaggtttaatgagtgaaggaaattcctatgtataaaagaattatgtgatgtgtctggaccaaaactaataggaaaaaagcaattaagtggaaaagaggtggaagcatatttttataaagaccaatcataacaaactttaccctacacgcatacaagtcaatgttaacaagtggggcccatcttacttttttttggtgaatggggcccatcttacttaaataaatttagttgaatcttttagcaatgtaaatgtgtaaagttgtgtgtaatttgtgtgaagtcgctgattaactacaattcacatcttgtaaaaagcagcataatgtgtttgcttagaaaatactttgtctagctgtactagttcttttctgatctgtttgctagtgtgtacatttgcttccgctgagggcacattatcgtcttctttcttgttttcttcttttaaaaataaaaatcaactccctctagcaaagaaagtaacataattttcttacttgcaacctaatacctaagtttgttgtgtgtaaaaaaaattatcacgcaaattttccaattctcttaagttgtttgacataaatttttccaggaaaaaaggataaaacctaccaggtagctgactggtaagagaaagttttggcatctgcaaattattcccaatgtgtgcctgccaacaagaatatttcaaccaaataaggcaatctatagctactggtaatttcttcagctatgctgacaccaacagcctctcaaaaataattgtgagaaaattcagaacaaacctcttcactcttcacctcagatgtttgtgaaagtaaaccagtagaagtagagctcgaaggcatataagaagttgagttctgatgagcccgttgtttgtctagctttaatgcatcagactctggaagaggccccaaaggacgattctttacctgtcctttattgatgtcgtcatctaccaaccaaccaccttgtgaatgtactggaggtgctgaaattggtgcaggaaatctagacagaattggaggttcagcagagctattgtttcttaagtctataccatacttcaaagaaccaactcctcgtttcacgtcatgatcagaaaagctatctcgtctaacaggaggtccaagcaaaccaggtcctaaaataagaagtacaaagaacttacaatgtgaatcatgcataacaccccaaaatcaagacatcataaccataatagcagaaagactccatactctgcgaaggcaggagtggtcccaaagatgcagggttgatagcatttggaagaattggaacagaagcctgaaaggtttcagatcttatctcagcattgtttgtcataggatgtgaattcgattccataatttgcctatcatcctgaaagaaaatagaaagaaaataaaaatatgttgttagtttctcacccttagacatgtttagcaaaactagcatatagtaaaggttaatccttcacaaaaatcttgcaaagcgtgagaaaacagacaattcaatagataattaacaatgaaaacttacagtctggcccaatctacgttcaacttcaatcccattcattccctcattgacaagtggagccccatttggcacaaaaccagcattctaacattcaccagttcaaagtacaggttatatattttaaagatagtgaatgtacacattccctataaccattaaggatatgaaatatttttttaacatcacgtacctgtgacatcaagtaattgctcacatcaggagatggaggtaaagtggccacatcatcttcataaaaaatatcagagattcttcttaataaaatctcatcaaattccctggaacatatcaatacaggaagcacgtcttagaatcttgagaattatataaagaaacaataatcaatagcagcacgcttacttgaagaagcaaccccgtacattgcatgccacatttcttgctacgcagaggacaggaacggcatttgctgtctgttaaagggaaaaaactaatgaaggagataaagaaagctgtattgtagtgtaagattatgaaaacacgatcgaatacctctgcctgaggagcataatagggagtgaatgctggaactacatgcactctaggttgatccttatattcccaaacctctgagcgatcatcaattaccattgccatctttgagtgacaaacaccatcttggaagacattaatcaaggatttcctagagcctaaacaataatcaagtcaaaattttccaattgatgagaaacactaatacacaatacctagagtgcatatttaccggtctttaattaattaaacaaatacactaatgagttgaaaacaaagaagcaacctccattttgtactctttatctttcaagttatgataaattcaaaaatatccataactaacaagaacaaaagaaaagctttcaaatgaaaagaatggcacatcagtttaaataattatatcaaaattcaagtattttagactgcataaaggtaacctatcatcactaaagggttccttaagagtaaacttgcctgatttaacacaaacaacacgacccaaaagttgctttaaaccaatgagatgtgaccctgggtcaagaagcctccacatttctaaagcatagtctctttcagccattgtacaaacataaacttcaaatcttttccttccttttgcggtcaaataacttctcaaatcttcccatgcaggtcgtaaccgtacaagcacactagtatcacgaatctgcatcaagattagcaaaacacaaaaactatgctcaaaccaattccctgactgactgtaagacatcaaagttccactcagacaaatacatctaatgaaatgagtacttaattatttcaaagctactcacacttcagggagatatttatctcctaacatgtacacaacaaatggtttcatttcgaagcaatgttaagcaaatctcggttactaacttaaacttagatgtgaattcatctatgcaagcattaatcagcaacctaacatgcacttgatctataacttagaaaaacaaatattctaaggtatttattttctccacaattgccataatgccatctctttagataagtttttctctcctctttttcttcttttgttcaaaactttaaatgacaagataaaagtccataatcaacaaaaaagatccacctacctcgggattaatgcgagttagtacaatattcttatcttgcaatctaactacaggccgcacttttctttcatggttatcagataaaggaggaacttcttccatttgaaccttatacatcttcccgttatccatcacagtatcattgtcagcatattgctttaagatcaatcgatcatccatgtagcgctttagttctgcattcatcccagccaggcgcataggatcaatctcgcgtgcaatcaagctacgtagatactcaattctatcctcaaacgacttcatggtattcgcaacaactagagtctcatctagatcgaatacgatcgatagacatcgcatattcaacattcctacagaagcgttatacaaaccttttggaactgaatagcaccaaaagcgtggatacttcttttgcttactgagcatcgctaccaaatgaatctcttcatccccggccaataccacagctgtctgcaagtcacaatgaaatatatatatataactaattcgagacaaagaaaactgaattctcaaagtaaaagtaataataatttaaaactagaccactgctattcttggcagccaaacagaaaccggaaaacacggaagaaaagatagagatcggaaccctcaattcgtagtggcaggaagcgtgaagattgattaaatgcggctgatcgaccggtgaagacgattcgagcttgcaacgaacggagaatgaagaaatcgtttggagaatcgagaggggaggacatcgttcgcttggtggtgaaattcggtgaatgcgaatctcgttgtttgggaactggaaattctgatctttaaccgaaacaacatccaattcgcccaaacacaaatcaccatggtaaaccaaggatttaaaccctaaacgactcattcagatagactttgactttgctataaagcctataaaaactccaaaatggggccaaacacgctaatgtctgtacaaaattgatgaattgtgcaaaattccttgttgggtttctcagctttgctcgctgtttttcttgctctctctctctctctccctccttactaacacactcactccctcacttttgtattacgtttctctctctctcttctctcctctctctctctctctattgcctactgtttaaaacatggtcattgtccgagtttatataggcgcatgaaacgtaagctttgtatagaaattactaaaagggccttctgtttacagacccaattcagcttattttcagttttaaccgaatcaatggatgccaactgtcgtaatcgctgtgccctttgacggaaataaagtatggacacgtggcgttgttatatacaaattgataatatatttataaataaatataaaaaaaaaaaaagaaaatatatcatatatctttttttaatttagtggaattattttatattttaaatattttttttgaataatatgtataaaaaaaaagtaatagtattttattttttcattcgttcttattttatcattttttaatattattttattttattttaaatacttttatatacattaatatttatgtataaaaaaatatttttaaaaaacaatagtattcatatgcattcatatctttatatattaaaagtgcctatctaacggcatttcttggtttaacattcttggtttaacagaataaaagaatattctgttaaatttaacgattaggtttgatctcccgttaacaaataaacccaataattaaacccaaaaaattaaacaatcttttaaatattaataatctctttttaaattaaaaaaatcatcttagccacatatctctctaacaaacctatcttgggagaatattaataatttttttatttattttttaaaaaagaaaaatatagataaaatatctagaaaagataatataaaagaagattgattgtgttggcttagagatttttgggcttgggcttaaaaaaata

SEQ ID NO: 189097 - DNA, 1946 bp, Cannabis indica
tctccagatcttgagagcttctttaaaaatttaaaagatttgatgttaaacaagtcccttcggaccaaaatgcattcgcaaatatattggcaaagctagcaaccaatctagagattgaacaatacggagtggttcccatagctcacctagctattcgaagcacataatcagtggggacaaatgtaattgatcatcccacctcctgaataggccctatatataaatttttaagctttggagagctttcaaatgataggggtatagctagaaagattcaatacaaagctcctgtatatctggttctggttggaagattgtatcgaagggggttattggtaccttatctgaagtgcataacgagaacaaatatcaactctattatttaaaagatatgcaaaggcttctatagagacaacacatttggatccaatttgtctaagaagatcatccgataaagatacttttggctgacaatgaaaaatgattggattgactacgcttggaagtgcgagcagtgtcattattatcctaaaatcccaagggctccaccaacataaataactctgatgagtagtccttgtttgtttgttttttgagggatcaatttagtaggctctcttccaactggaaaaagaggagtcatagtcaatgtcgattagtttaataagtgggtcgagggagaaccaatgaacacagtcacctccaagaaggccttggactttgtcataaaagatatagcatgtcgttacgaccttccatacaaaattgtatcaaaaaatgggaagcaatttgacagtgatcactttactgatttcagtgtaaaatatggagtcataaaaagcttctctttagtggacaggtggaagccaacaataaaaagcttccacctttataagttgaagtttaagatgagtgtttttccttaaggatgagttcatgagcttccaaaatttcaacccgagtcttggccgtgttgtagtgctccttgtactcatcaccatgcctctacaacttttgcattcctccttataagatttgactctgtcgttagcagcaaactagagcctatctttgacttggtgatccacgagttccttcacttggctttgaacctcttctaatttggccacagcttctgccatttttgtgtgtgaagccttgcattcatctcaaagattttccagttccaaggtcattttgtacactacttccaaacaacgctttgccaataaatttccctaaaaagaaataaataaaaaaaggaggaattagtaaaaggtattgaataaagttaatgttgagaataagtaagaatgcttactccaataatttgatggcaaagtgaataggctaggaagatcgaatcctgactagctattgtggcccacctctccgcaccaagttagcagtaggtatcaactattttttttcatgaggtcaactgcaaatagagccaagttactttcaaccctaggccgaaacttctctaaaacctccaagtagtaagcgactagagcatgggcattaacatcagagcccttatcatacagttcagtcttgcatagagaaacaagcacattagttctctatctattcttaactaactctactttgaaccacttttgaaagaattgaactgcctcctcaagctggatgtgatactcttctatttgctcattagttagaatgggaaggataaggttgatggaggaagagttggaagaaacgccatccccttggataatgactaggcattggattaggaaatgggtctagagtttcggcacttaggatcagtaaattccttgttgatttgggagatccttcttagctcctcctttttcctttctacctccctcttcttagcctctttctactcaacctcttctttatcactctttcaaagttggcacagttcttggagggcatccactttggccttattc

SEQ ID NO: 189098 - DNA, 1727 bp, Cannabis indica
gaaacttcaaactgataaggaagtgtatcgggccctggagatcccgtggtcgtcaccatcgagatcgggaatcccttccgtcaatggtgattcggccttgtcgcttttggtcgaccgttttaagctttgagatcaaaggcattgagaagctggatacgcagtggtttgccacgcagaagcctgttccgggatcgaaacagagaagaggtaatttcggggttgtgattgattgtaagaacttgggttgggttttttttttgttttttttttttttttttttttcgtagttctggaatttatatgttttgattttgttggtttaggtgaatatgtcttcgctgagggattgaccactgcattggtttctagtcagatcgtttcagctggtacaactaaatcatgtaagacattactgctttcgacgttctttctttggttttgagtgaatggttcagtaatttagaggtttgatgatagtttatgctaattgttatgcattcatgtttggattggtcgtagcgctatttggttttgtgggagattttgattagtgtttgtatacccgtcctatgaatttgtatatttcaataggaatattgtaattgaagttccaacgaccctgcattgtaaggaagaacaaaggccaagacatttatacaaagtacatggactgttatgactttggaaagaaaatggaattgccttcatttcttctgttttttgcaatgagcacaattaataataaactaagaaaaaggacaaccttttattttagctaaaactacaaccttggcattagaaatcctaaagacatttgcaagtaagagcaaagagaagctttggtggatgtttctttaaataacaggaatcatataatggaatgcattttttagtcaatactttcttctttcttggttaccttaagcagtaatcatgttaccattttaataagtatacttatcacgtgacagagatgtaaggcaaatctttgctagaagctagacattctgtctctaggtgatcaccagtgagcttacgaagctacctatcattttaggtgtttctactagttactaatataacctgtgattttccttttaaactgtgccatgtgttttgcgccttgttccttaatttttattctgaactgcgtgataagaatagcatactttcacttaggtatcatatatctgagtcttgctatagcatttatcgttataaccaaagtcaactgattatgtaaaatgtttatttcacagatgtagtgagaacattgctaccaaatattattccaccttcatacaagggtgctacaattcgctacttgtattatgttaggagtacaatatgtgggcaatggttgatattggaaaatcctcattctcgtggagagtcagtaaaagatattactgaattggtttgttttctttgacttcataatttgatgctacaatattttttattgttgctagattgttttattgccatattatataggtcttgctttcactactgtccatttcataacttcaactttttgaaggatttttctcttcccccgaattctgtatttttttttcttttgcattaaggatattatatttatggattcatggctggcaaacattcaggaagctcgtgttccattacaagtacgtgtcactcagaaaaacaatggcttgccaatagaggaaggtcaaggtgatggttgagtttttttttttttt

SEQ ID NO: 189099 - DNA, 1881 bp, Cannabis indica
actattttcattccgttctttttgaaatagaaaaaaagatcattccaagtgcggtacttacccataaccatcttccgaccagcccgctgtaaaaatgccttcagcagtagcgaatgcttgttcttccattcccgcgagaatcattgtagcagccacaccataggtgacaccggtccatatttcacgcgactgcatacaagtctcatcgaccttcccattgggatgcataccattcacagcgcccattctgcctcctttgactttcataacattaaaatcatagatcttttgaagcgcgcttttgattttaaaatcatcaaatagcgaaggcaagcctgaggatgcagtgtaccactgcccagctaattgatccgcctgaatagacttactgttattacttgacccgctgtcgtagttaaaataagaaccattccatagcatcgattcaaatactggtttggcttttaaatacttggttttgcaccattcagcgaaatctttgtcgcctagttgaagggccatggcagctgcagcttgaagtgccgctagccataagcagccacaataggcactcacaccatgaacggtccaagcatcatatgtttgatctggaaaaccatcgttttcaatcagaccatcattatcccgatcgaattgttccatgtattccattgcagcacgaacagatggccatacatcaactccaaaagccatatcccctgttgcagaaaagtctctgtaaacttgaagcacaaacttcgggttcagatctttccatttactcgtatcgtgaatgttatatgcattcatttcactccaaggatcatgtgttcccaaatcatgaggtacagcacctctaactttacggattccccagtttccctctgccagaaactttacttttcttccatcctcagataagatcgctttcgcaaaatccttttgtatactgagttcgattttgggaaacaactcaagaagagcaaatgatgcatagaagtggacatcatatgtgcaccacatgatatattccacgccttccaaatacaaaaacctaccaacatcttcgtcataatcgttgcatgagtattcttttctatcggtttccaaaccgaaattagcagcagtactgtaacaactcttagttgttgcatgcttattaactgctctgcagtcccctgcttcaacatttgttagctgttgctgattatttcgtatgttagctggtgaggaagaatctgtacaagatcggaaagtgatgagaagtatgataatgcaacactaaaacatacgagaaaccagaatactaaaagtacgaaaaatggattgcaagagtataccaatccaaactgttccgccggcaaccaaaaagtagagctcattgaacaatgtaaacttgtacctacagcatcaaatggtggattacacattgattttgatagaaaacaatttagaacaaaaacaacttttaaggacataaacagagacacggaactcaagtacatgcccaagatcactaaatcaatgaaataacttgctcaagcgtataagcaactcaaaaacagaaactgaattggtattcgaatcatgtaaatagatgtaaatttaaatgtaaagggaagcaatggctatatgaggtttaatcaatgaaatgtatgacaatagaagactctaatagaatggtgaaactgaacccataagtttccaagagcttaatgcagagaacatctgaaattgtaaattcttgataggataaatcagtatttaccattctggtagcctaacatcattcagaatggggctttgccatttctcaatatcttcttcccaccgcttataatctgtacaaatttttagataaagccagttcagaattgtttt

SEQ ID NO: 189100 - DNA, 1515 bp, Cannabis indica
aatatatttattggttcccgatggaaacattatttataatgccaatatctgaagatgaagtagatgagtaaactaggactgatacctttccagtttttaagagattagcaggcaaagaagaccagagaagtgcttcgggagaatcattcctgtctctgttgtttgatgacaaattcatgttcacgttttcctgtttactcaacatgcgttttgtagaagtgttcttgggtggtacctgactttctttgaattcaaaacttttatttggatcagattggttggggataaaaagattggatcggatcggatgagcacccctagtattgttagatataacaaaatctggccttgatgagagtgtatcagatcgattcttagtagtcactggacatgcctggattaatgctagcataaatgatcaccttatcacaaaacggttttcaacattcaaagagaactctacaactaaatttaaatcaatgcatgtgatgtggtccattacatgaacctagcaatttatagtttttcatcatgcaatctgaataatcctttttgctagttgtgtcctctaagcaattatgaatcccaaacacaaatctaacagcaattgacagatttctacaataatggcaaatcatatttcatgtatcagattgtgccaattttcattaactatatacacttataaatgagaatcaatatcattctaagacagaatattgatcttaaatacggtttacaatatgaattgttattcttagaaagaaatatacctgactagtttgctcttgttgctttcctctaataataccagacttttttacaccactctcgttgtcattattgccctttccagttgatccattagaatctgctccacaagatttggcgtttggtgtgttaaaaccttgcatataccgagatgcaacaaccgccttttcttccttaatgacaatcttttgtcttgtgttttcctccttcacctctaccatctctttagatcttgaaccgttggttccctcaaaatgatcagcctggaccggactctctgatggctctaacatttgcatcaaatcctggggttccccacgaaagggtgtcgtcctggaactggcgaacctcaacaagagtaggaactggcttccctccattgactctctccacatagaagaattgaccaagctgtaacttgttgttcaagataagttcattgtcttccttggagagggagacatacgtcgaatgagaagagtcagagactttaaggaagaaaccatggtcaggccataattcagagccagaaatggcagggacaatgctaatcacttgcaagagaactgaccggtaatctccacgaacctttacattagagtttatactctgaagaagctttattagtactcctggtgtaagagatgccattgctctatcctgctcgtttgatagctgaattaggcattagaatcattgtcatcatcacatgatcaaagtaaatctattatcaatatcagcaaa

SEQ ID NO: 189101 - DNA, 4248 bp, Cannabis indica
gtgcatttgtgtaaatccattaatttatttgtgataggagaagttagaataaagtagctatagtactatatatagattacttttatcaattgtattgtaaaatatatatacatctgtaatgacaatgtaataatatgatatctaagtgtagtagtgtaagagagaaagagagagagagagagatagtgagcacatggacccaattaaagattaaccctaacttgttagggtgtcagatcacattttatatttctcattaacttaagattaatggtcacagcctgtctgtactacgtacttggaacttggccttttatatatcattttctcatttacttatatataattatatattctctgtatcaaaactaaaaataaataaaataaaaaccatgtattaatatatataaatgtatatatatattgaaattaaatgagaatttgaaaaaaaaaaaaaacgtaatactagctacatctgatcccatggcatgacacttctctaccatgccaaaacaactactattacttggcagtgatttgttatgttactagaaaaagtagaataaatgatatggcctggtgaggtgtaggggccatgccaattatatgtatatatatattatatatatatgtatgtataagttgtttgttgtgttgtatatgatatatgaaatatgagtgtattttaaaatctttattaattaatattagtagtcaccacatgggttgtctgccagtgagtgaataaggaaagcaagctccgactgtggaggcggtaaaaaggacccttccttacttaataacaaactacctttttcttttcttgttgcccaaaatgctttccttacttgcaacaaagtacattcacatacatttctgacacttaactcttttttctttctttttttcttttcaaattaaatttaaaataagaagaatctgccaaagtgtgtgtgagtgagtgagctcactaaatagtaaatactttaatggggggtacaactcatatattctctcctaatttgacgtaagcatcattatttagatgagagaattataaggatggaagttgaattagtatttcagacttcggaaaatggttgtaaattttaatagtaccaaaacaaacaatgacaattagaagtgatgtcaaaaaagggttaaataggtaaagcaattctagtagttatcaaccaactcctttaaaccataaataataacctcagctaacacaaaaaccactactactactacttcatgcaacaccatataaatggctcaaatcatcatcgatcatacatccgtattaatgtcggaatcaacatttttttttcttttttatatgaaaaaagacacttccactggctctggaggctcttaatgacatgggtctgtttgatcaacatacatccaaaagttagaagattgtataaagctctgagtttgactgattctaacaacttggatgattggatgattggattggatttgattagattggagaatgaatgccctgctataataacaaaaataataataataataatactataattcatgcttgctcttgcttcttttcatttttgccttgaaccttgattttgtcatcagtgtctgtactgtatttacaaagttcccaattgccattagcaccaaaaggatcccacaaaatatcacctgacaacaacagttttccaacattcaatatatatcttcatcttttacttaaaagaacagaagaaacattgaccaaaattacgtgaatacattacctgccattcagaaacaaccccatccaatgcggttctgagcaatagtagtccaacataggcttcaaaaccctaaagagaagaagaaaaatgtcattacactacaccagaatccactatcacacaacatttaatcgaatctaatgaagatatgaacaaaataatctttcaaagacatcaatgttaatgaacaaaatattatcatacatcacagttcaacttcgcagtagtacatttaaagcctatcaactataaatattaaatactgaaggtatcacaactaaggccaatgcaaaaggaatacaaattcaattcagctcagtttagaggaatagactgtcataattcaggtaaaaatttaaccaataaagataaaatggcactacagtcaaaatctattaaactcctttcccccaattttttaccgaaagccagatcgttcaaacaccctaacatgccaaggacactagaattataatagaattcttgaaaattactgtatatgataataagcaaaagcataaaacgactcccctgtcagtatctattcatcagtatttatgtctcaaaggcataataatctgttccaagcttataaaagtttttataattgcatgaatttgatttgtttaccataaattgtcaagtcatggtctaattacctgcaaaataaagagtataggacagagcacccacaactgaccatctacaccagcagtttctccccaaactacatccatccttttagccttcacaaaataaacaataaacaacttaattgaagcataaagaactaataattatacataatgtattatattttgattaatgatgattgagcaagacccaagagccaagagataggccagttgtttcccagcaaaatgatatgatatgtgtttgttatcctaatatattattgtaagtagaacgtagtatattttctatatcaatacatgtgtaaaactgaatatattacatcttaaattaattcactttaaaaagatttaagtaataagtattacacactatcaatttactaagcgaaaagaagtggaaatgacacctttcccaatgcaatacgagtatagagtctttggcgttgatatctattttgtaaaagcatagctactccttgcatcatagcccatattaggaaaagttgtacccctctctgtacaagaatgaactaatttaatcaactgcaaactacaacatttgcatgtaaatatggaatgggacaaacttacctgcttctgagaacaatttggctgtcctttgatctcccaagtgagactaacaagagccatgagcatagcacaataatgatggtatatccacctgccaaagtaggttgtggtatgtcatgagagacaatcctaaacacactaaataatgatatgcatatgtggtcagtagacagatacccatcttccagtaagctaatctcacaagaatgattactagatgtttctaaagtacacaaaggcttagtgttaaaatttcaattgtcaaagctactattattcaataaacgaaattgtctctgtatcatcaatcacttttaataggttataagtaagccgaacattctgccaaaccccaaaatgcaaaagataggttctttctgggacaatttttcctatctctttttcttttgagacaaaacaacactacttgttttatttaataacagagaaaataatacaaaagagtgactagggtgcaggaaaagtgtgtaaactatgttcctgctaacctacagacagaaaaagaaaggaaaaaaacagtcaagactctacattgagacaaggcaaaaccattcaacagaaaatcaattaaataaaattacaaaatactctgccaattccaaggaagatctgagaagaaaatgtcattgaactttttcattttgaacagccacggagcaacccaaattctgatcaactccccatatcataatttatcttaagaaactcttctatttctctccagccacaaagcccgccacatagccattgtcacaccagcttctaaaacagcttcctgcttttgccaccttctatatctgtagacagaataacccattccataccaaattccttcaggacttttaaccgaatattttccaatctcaatgaagagaaaggaatgggtcttcagcctagagaagtaacagcgtgtgtaaagttttcataagaaaatagtttgtatgagtcaaatgtgtgtttttataaaaacactttggttattccaagttcttgttgctatactcacattttggtttgtttagagagatcgctggcccagtaaaactatttgaggaaaacagccagtaaattgttggatgttaaaactttttgggtgttcatttgaaaccctggatacatgactacaatgtttctcttcctttccttatttcaccacaaactgccattcattgctgtttttagtctccttggtatctgttccccccccc

SEQ ID NO: 189102 - DNA, 1169 bp, Cannabis indica
tatatatatatatataaaggtaaaattaagaatatttcatatttacatatatgatgtttgttcgttgcattgcacacctaactaactcaactagctaacctagatcacaaccttaaaaaaaatgtcaattgtcacatataggattgttgagataacatgtatatacatatatatatatagatatatctttaatatagaataaattctatgaattatttgtagacctttaggactacttagcaaaaattatcatcagtatacctttaatataagagcattgttattaaatattagtagcgttagctactaattattagtaatactttataaaaattattatatatgttatgattttttttaccaataatgatataataccttaaatattattatattcgtacattttagcatttctccaaatatcaatataaggagtattttaaattgtcaatcaccacacaaaaagtgatatcattattggtgcattctaatatcaaaccccatacaaatttaataaacaatatagaaaatcgatgtatcacattggtacaatgttgaacaccataaaataccaaataatattgctcactatcataagacctacaacaaagcttaacaatctcataggcctcaatataggacaaatatgtctcacttagcagtttattatatgagaaatacgacatcagtggtatttaacaccctcttatatatcaatatcactattggtctaactaagtatttagttccatataatttaatataatagcttttagggagtatcgttagccaatcacaacgcgacatatcaaaaatgtactaaacaccactgatacctaataacaatactcttattatattatttattatattaaaatatataaaactctatattaacatacaccaataacaatacactaacaccttttcttcttctatgctatagttacctagtaagtagagtctcctagttagaccaagctcataaatctcatctacctcacataatagctatgcatacacatccactctttacacaccattcttcctacctacctctctttccttcttctcctctctctctcttactctctattcctatttatacattctcactctaaactctctctcatcatttccattaactcattactagaaacacaaaaaaa

SEQ ID NO: 189103 - DNA, 3679 bp, Cannabis indica
  modified_base (3606)..(3606): a, c, t, g, unknown or other
  modified_base (3614)..(3614): a, c, t, g, unknown or other
agtactgagtttacctcaataaaaccaaactaacaaaaagttagtgcccacttcacttcgcaaccttatcggcacacattacaattatgaggaatccaaacaaaataactgattagcgatgttcctacaaactagggtataattattaatagcccgtctactaaactcgccattaagagcattaacaacattcaaagaatcacatttaacaacaatactatataaacaaggggagattatacccaagcaactccccaacaaggagatccaaaaagaaaatcattttattctcgacccaaattattttcacacaatgaatcttagctaccacaatgatcccaagagctacatcacaattaattttgatccaatccaccaaaagaggaatccaagtaataggagaaggatggcttggttcttgagaaaaaaaaagtgtataattaataaagcaatgtagacaatattgttgtgatctttttgtcattcctagcatgtgaaatagtatccacaacaacagtaggatcaagtcctaataagaagaaaatagaagcatcagatagggataagatcccaagaagaaaatctccaaaaatagaagcaaagttagatgagagaaataagtgtttcatagtctcctcctcacaatcacaaccatataaggaacaaaaaatgtccttgacatgaaatttagttatgataacagttctagttgttggcaaaagcattaggcacgatgcttcaccacaagatttaacgtggttcaataatcttgaagctctaaaatttattccaaaaagtagagaagacatcacaaggagtagcgatcttctttcaaaatagggaattaatcactttttaaggagtaaagcaactttttttatgagaagcttacaaaatgtcagagagaacaaattttacttactgtgactacatctaatttttgactttttctttctgtcaaaagattattttggtgtttgattgttgtttctcataatcccttttcatttggagttaaatattgaatgaaaatggtaataatgttgttatatgattaataagtcagtcaatgctgattgattatacaataataataataataataataataataatgataagaagacaaagtattccaaacacaaacaatgatcataataataataataagataacatgggatgaatgattaaccatttgttaaagacttaattccagcaaaacacagtacacaaatcattccattcaaattcagaaactcaattataagaaataaaaagctctaaaaatcttaaaactaaaaaaaaaagtttgttcgttatttgtttttattccaaaaaagcccctcagcaagagtaactatttacacttatgtccgttgacttggacagtggtccctctaccaccaccagtagagattggtactttccttcaccaccgcctatagtctattccaaccctaatttaccaaaataccctcgccgcttctcccaaaaccctcctctctcccgccctcctttccgccgccacgcttcctcctccgccgtcgccgccgccactccgcctcatacaacattccacaatgctcgccttcgccggagagctggcttcactcgttggaccgatcttcctccgacatcggattcctcggactccgtttcggccccaaaggtcgagacttcgtccgccgttgttggtgacaatgcttctggttcgaagaagatcaagcttaacggttctcagcttcgaattcgctggaaaatggctatcaccgtagcggtactctctcgatctcaatttgtatattatcatatattgtgaagcgctcatagttgtaaacgcggttgcagattctgatcacggctttctcatcactactgtaccaaaacttctctttacacgaccaagtcaatgagttgcaggtaaacttaattttgttttcccctgttccttaaatttgtgcgcattgcaattcaactcttatcaaagtttttgttttttgattttaggagcatatttatgagcttgaaaatttattgcaagtacacaatgtgtcaagaattattaatgatggtagtgattccgtacaccatgtccccagtaaaggcttgaagagattagctctgtttgtctctgtcacactgttgtctattccacttcttgttttgaagtatgttgactatgtgtcaaggtcaagatcaagatcatcagaaaatagttcagaagaagtttctctaaacaagcagctagcatatagggtagatgcatttttatctgttaatccatatgctaagtcgctgggattgttagttgcaacattgttacttatctgtcttggtggattggcgctttttggtgtaaaagacgatagcttagcggagtgcctttggttgtcgtggacttatgtagctgattctggcaatcacactaactctgaaaagtttggtgaaagattagtatctgtttctattagtttcgggggtatgcttgtttttgcaatgatgcttggccttgtctctgatgctatttctgagaagtttgattctttgaggaaaggaagaagtgaggtagttgagcaaaaccatactttgattcttggatggagtgataaattggtaagcttttacttctgtggctgatccatgtgaaaatttaattattctttttgttttattgcaaaatagaagatgaaacaaagtgcttgtaatttattgtgactgctaaatagccattttccaattccaggggtcactgttaaatcagctcgcaatagcaaatgagagtttgggtggaggaatggttgtggtaatggctgagagggacaaagaagaaatggagcttgatattgccaaaatggaatttgatttcaaaggaacatctgtcatatgcagaagtgggagccctcttattctagttgacttgaaaaaggttaagttacatcattctgcaacctttccttacagttagaagattcttttgtgttgctaatacatttttcattataggtatctgtttccaaggcccgcgcaatagtcatcctcgctgaagatggaaatgctgatcaggtattcttcattaaagtgcagatatgacatttgctaattggtcaagtttaagcttaagtcattacttttgttgatgcagagtgatgctcgtgcactgagaacagttttaagtctgactggagtaaaagaaggattaagaggacatatagtggttgaactaagcgatcttgacaatgaggttcttgtaaaacttgttggtggggaccttgttgagactgttgtggctcatgatgtaattggtcgtctgatgattcaatgcgctagacagccaggccttgcgcaggttacttctaacattattatggatggtcatatctactttttcgtttcgtattttatttagttttttaatctcaagtttattactttctcaatgatgagcacgttatgacagatttgggaagatatccttgggtttgaaaattgtgagttctacatcaaaaggtggcaacagttggatggcatgcattttgaaaatgtgctgataagtttcctgatgcaattcctgtggggtcaaggttgcatcattagatggaaaagntcatttcngtaatcctgacgattcctatgtctacaagaggcgatgaagttcttgtatagcagaggtatgatga

SEQ ID NO: 189104 - DNA, 1947 bp, Cannabis indica
tataataataagaataaaaaaggttgacgtaaaagagtaaaataaatgactataattgttttccttgcatgaattaatgtagttagcataatattcttttaaatgttggtaccataccataaccttatgtttgttggcctaagtggaagtggaacccatttaacatcaactgtcagaatatacatgtgccatacacgtaggaccacataccataaatggcattttccttcatttaatgttctttttttttaaaaaaaaaggagaaattatatatatagctgtatatattttcaaataccaagttggattggatattatatataggtcatccatttgctgagtttttgtttgtttctctgtctctctctcagtcaaagatgtcaaattatctgctaaggatattggttgctctgctctttatgtcaatagttgcacagatatcaggtaaagaatgataatgtgatatagtcgtatacataaatgtgcattagaaatgagttgttataataatgtgtggtgtggtgttttgattcgtacagaaggggaatttgagcaatggtgcatagcagatgagcaaagctcagatgatgagttgcagggagccatggattgggcatgtgggaaaggaggagctgactgcactgagattcagattaacaaaacttgttatttaccaaacactctcaaagaccatgcttcttatgcctttaacagttacttccagagattcaaaaataaaggagccacttgttacttcagaggagcagcccttatcactgagctagatcccagtaagcttattactatattatattaacttaattatataaaaattcaaacaggactaacatggaccatggttggtttggttggctggtagtattggcttcctaatattttattccatgtgtatggggtttttaggctttgatgttgccgtgaatgtaggcaattaaagataataataataaaaaaaataataataagtgaggaataaaataagactttggaagaggaatctactacttagatatatctgatgctttgttagaactttagcatcatatttttttttgataaacaactttagcatcctagttagtaggctatctagtcataaagggtgtagtatataaatagatattgatgaagaaaatcactatcaaatcactttcttgaactatcaaattttaggttgtgagatcttattagattttaacaaaagcggggataagactcatacaagggattagaatctctttatccttatctctattttctaactatgaagattgcttatgatttttctctataaaaaatgaggtgtgggattaaacaagccattatgaaagtgttcaccaagcaatgaagaacactttcttggagagaaacctaggaactctaagtttagagagaatttgaacgagtgatcaagtcattcaaactcgcatggatctttctatacaatgtagaaaccgctcatttaaacaatcatatttgagcatttgaatttaagtttgaagtcggaacttatcgttcacgttacattgaattaacatcttttaccccgcgcgaatactaagtcaaacttcttatgtttattgtgtaaaaagggaaattccacatactctaaatgtgaattttatgtgattattttgacattctatttgtaccaatctctacataaatttcatcattgttattatttgtcttgaagactgaagagcaatttagttaagccctttaggatcatagttgtattgtgtgtagtgtatatagttcattcataactgaaatgacaatgtttcgttacaaattgtaagaaatgtttaacatacgttaaaatatactttatttttaaccctacatagatttagcttctgtgattaattacttgaatgattcctgtggaagataggattaggacagcgttgcttgcataggttt

SEQ ID NO: 189105 - DNA, 5086 bp, Cannabis indica
atttaaatttaatttttaaaactcatttttaatttttagataaattgctcaccaaagatccttcattaagaaactagttttttcatcaagaaattagtttcttcaacgagaaattgatttttttttatcaaaaagctagttttgattatataaaagtaaaatttatatacgagtttttaaaatttttatggttttgcttcttagatgatttatccaatatttttaagtttttttaaaaaatatatatatatatatcatatttggtgcaatcaagtttgcatgccatatatgtcaaatttttctcatatttttttaaatagcctttaaattattattaatttaagaaacatataaacataattttttaataacccgcttcctgaatttacgacataaatatttaaattattaagtttgttgttaatagatacttaaacataaaaaaataactatatatatagagttgtgaactaatttcaaaaattaaggtttctcgttcctaatttataactacaagaggttttttttttccgctggttagacacactggccttacctgggcataggtgtggcttggtttgtgttgtattttgctattgtgattcgatttttgctattgcacaactttttatcccagactgatggacagtctgagagaactatccagatactataagatatgttgtgagcatgtgtgttggaatttgaagggtcttagaataaatatctctctctgattgagttttcatacaacaacagttaccagagtactattggtattgggcccgtatgaaatgttgtatgggaggaggtgtcgttcacctatccactgtgatgaagtgagtgaaaggagatatcttgggcccaaagcagtccagagaactagcgaggctatagaaaagattcgagctcgtatgtttgcctcacaaagtagacagaaaagctatgttgatctgaagcgtagggatattaagttttaagttggggactttatttttctccgagtttttcctatgaaggtaactcgaagatttggaaagaaaggaaagttaagccctaggtaaattggtcccttcaagatcctggagagggtaggtcaagtagcttaccagctagcattacccctgctttgtctggagttcacaatgtgttgcatatcttgatgcttaagaagtatgtgtcaaattcgatacatatgatatcgaacttcagacatattttttgtatgaggaacaacctgtccagatccatgatagaaaagagaagtgttacaaaataagacgattctattggttaatgtattgtggagagacaacaaggctagggaggcaacttaggaattagagtcgcaaatgtgggagcaatatcatgagatgttgaggtaaatttgaggataaaatttatgtaaggagggaatagttgtaatatccaaaaattgtgattatatttaattaagaatattttattaaatatgagataaaataaatatttagggcataattgataagattataatgttattaagctaattatatgaaattggagattttagtagaaataaataaataagtgtaatttattaattacgaaaattttattaaagcatttgggtattgtgtatgccttttataagataaaatatttttcgagtttagcgtttgtggaaacccgatggattggccaagaaggattcgcagcgtccttgttggtttttgccttgcggccgagagaagcactttttaaaaaagtcatatctataaaatgcaccaagtgttagtaatcgtataataaaaacatgcgatcaaaagtgctaggggcatcactacctacgggttgtttttatttttccctagcaagacgttttttgatcttcacatttagcttttgaaatgttctttatatgtggattctcattggagtctaacgtcgcaacaaattagactatgctctcgtaatttagcagtcgtacataagatcctacaaccgcaatccttgataggctgctaagcacctcgatgatttttaatttgtcttttgtgagtttcaatcgagttggcctccctacgagtatgaaaagaagattagaattttttatatgtaaaaaatacaagtataaaagtacgtgacgaacttagacggcaattaaagtctatcctaattcttgaaaatgtgaatgcacataaccattttgatttctaatcgcctatattggaaatcgcatcttcaatcccatttatctcagtgttggcccacttggtgaaacagtagaaactattgtcattgctaatatttttaatgtcgtagaaataactaaaatcctggacaatgagctatccctgcgcatactctttgtacattgcaaagaatccgaggacgattctatagttatttggggttagctagaatagagagatgtcataatgggtcaagatatctttgacaaaatggtgaaaaggaactgcaactccacagtggattatgggaatcgagatagccgcgacatcaaacttgatgatctcgcggttagtaaaggaaaggtgcagtcgcttcctggccactggctttgtgcaaccagtttgaattagatttagtttttgaaaagaaactgaggctaacagccttaccctcgattcaaggtccacactagataatggctcgtcaaggggtgcatcctcgtcaaagacaccaatctcttcttcttcactcactttcattcttgtaagtgggcaagtcgaagtcttgctcaacttcatcgacttcaccatctggaataacccttggattgataaaactttgggcagatacggtggactcacttcctcacacttccaccaccactggctttgttaactccttaaccatgcgagctatttcctttgtggaaaaggatgtctatggtccagttgtctctagagttgcattgtctgatagtgacgtgagtatgaagctgtcactcctttagggctcgtttgctaaggctcctccttcggattatatctgactgtctgaaagatcgctcatctaaaagatagaagatcttttcagcgtgttgtgcgtgaaatttagaaaaaagaagagtgtcctcacacatatataatttagagaaaagaagagtttcctcacacgtatatatttataattttaagcaaaagaaaaagtattcttgaaaaactgcaagtcgtcatatagttcttcatgttctaagtggaaacctatatgcatgtgtgaatatttgaagtgttctagctaaaaatatatgattattcaaagttcatacgaagaagatgcaagcattcaataaataggtaaaaataactagaaaaaatacctttttcagtctttttgcctagaattttattacccaaaaactatcatatcatttatatatatattcgaccctaaaaacctagaaagcatgcgattattcggaaaaatgcaaatgaaaagaactgagggggttaaaggaacctaccttgaatccgaatgaacttttttcttggggattttgtaggcctgattttgagtaatgtagcagaaaaatcttttgaacaatatttgggaaattagcaagaatttgaattgaaaaattttctggttctttgggagaatgaggtttgagaggatttgagaatgagagggaaaatgaaaaatcctcatttcatataaaagggttttaatattcgtcacaatcaccttttgatcacatgacacatggtgatcgaataccaaaggtcattcgatccaacaaccttctcaagtcatgactgcacagaccccaaagggttcaatgacatggcatcttgggaagataaaagtcataattacagtcgtcgttttaaaaatccttaataagacatccaaacgtcactgtgatgtgacaatacaactcacctatcacttgagatagtttcgtcatttgacagacaactattatcgcgaaactagggacatgtgttatgacacaagttttttgcctaaaaatacgagcacattctcataggcagttgacacatggactcgattcttgatggaaaaggatgacgtgtcaatggatagctcctgtagagcacatgatataaacttgcgagaaggtgcgaccgagacatggtctagtcacacactatgcataacatactgtcgagaaataagtaggaccaaggaaagctagtactgatcgtgcatatatcgattatatgcgatgagcaagtatatctctcatacgacatgtaaagaccgcctctttacacatgtttggttcgaaagactaatgtgcgacgattcgttaggaactcgaaagttctaagttgtcaaggtaggaatatctgcatatgcgactaaggatgatcgcagacattcacctaataggcctaaatgtccattatgctagtaaaacactccaaagcttgcgatctcgcgtatttagaatatggatagtcaaatatgcgactcggcaagttgcacacattcaggaaattaatcaaagaacagatgaaattattcttacagttatcttaattaatatgtataattaatgtaataaacgatcatgtctgaccgattatgtaaaatcaagacacttgttttttatataaaggagtgatccgaattaaataaaataagctgaaagaattgccaaaagtggactaagcagaccaaactctaactaaaccattgtacttctgtctcattttctttttcttgtctttattttgtctatttcgtattctaatctttgagtattcgtcactctagatgaatactcgcatatctgcaagtgtgtgttcttgctctgcttgaaaactcactatttttggtgttgtctaattttctctaacgacaagaaaatacaaggtctaatttgttatttaacaaaacaaaaaatctaattaataacttttacaaaacacatagtccacaattatatatactaatataaaaatattgaactataatttttctaaatatcaaaaacaaaaatgctaaataaatacttaaacaatgtatgccccagaattttcctattaatatagtacattttttgggagaattaccccatatacatttttaaccttttttttttttttaa

SEQ ID NO: 189106 - DNA, 1508 bp, Cannabis indica
gtatattcatctaagattaaggaaatagtaagtaagtctttcaaataatattatggtttttttaattttaaataatattatagtttttttttaaaaaaaaataaaactttttttttaaaatttcaaaaatttatacattttaattatcttattatgttgtctttatgtatatgtgtggaattatagctccgaaatcttgatttgggtctcgagagtcaaattaaaaacaagccagctaattttagcttcgctagctttattattgtgcgtgctgattacgtccccaaacaacctaatttgtttgactgcggggtatttactatattatttatgattacggcttgtaaagttgatgtgcggtcctttcaggttagacatttttaagctcttttgttttttatttttatttataacattatttttagatctatatacatttagttttagacttttgaatttagaaaaattcaactcccatcgccttccacactttaatacatctaatattgatctcataatgtgtactaaagttggtgagagtctgaacttataattacttaaccataatacaatcacaatctcttttcatatatgagtatattccaaggtatcccatataatctatctaacgccctatcacaaattaatccattatttatagaaataaaaaagaagaatattttaataaaacagtttcatccaaaagttctacatacacgcgataataatttagtgtcatattaagttttcactccctagcattataataatatataataaattttgttaattgtttttttttaaatatttatattgaaaaattatggttagtaactaacattcatttttttgttgaagaatgaacttatcattcaaataagaattggagagtacaaaaatgatggaaaaaattcatcaaatcaagtttcttaaccactctgaatgtatacacaattaattcatgagatgccataaaataaggatatttcaagaaaattggtacgtataaacttgtgaaattatataaagattacatcggtgtaaatatagagaaagcaaagcgcaatgccaaattacaactaatcttaaaatgtaaatatagaccaaacaataagcagctacttcaaactctcatctataaatttgcttgaatgattgtaagagcccctacaaaaatattatagcaaaaataagagtccaataaattaaaatataaccataaattaataaatctaaattgatttgatatagacgaatagtgaacttatctcactaacaagatttatgaatcttcattagaatttttgggatatatgcaataaatctttaacattatcccaacatcaatttttttttcataattaacaaaatttaacttaaacaaaacaaaaccgaataataacaacatatataattacttttaatcacacaaatgtataataatatatgaataattataattcatttaataaaaatattatatatcaaattaatatattattaatctg

SEQ ID NO: 189107 - DNA, 10253 bp, Cannabis indica
ttgtcatttattattaataaatatagcaaaattgggagtatcataattagatgacccaatattgtgtatttattattatccatttattttcactaaataaggtgtcaacaagtgttggaattaaatggtattgcgtacataactagcaaagacacaacaaaacaatatattacctagaattgttctaaactttctatgttttttgcatataactaaagctgcaatactaaaataaacaaaacacaaaaaaagcttcacatgacacatgagagaatacacgatgttcaataacacacttgtcaagctctaaaccattgcttgttgtgattggtcaaccaacaaaaagtcctaaagtggaaataaatataataacaaaatacaaagcctataagctatacaacatcttcatcttcatcttaccactaaaaaaaataagacaaaaagtattattaatgtctaatattttttaaagtgttaatattactattgctataattaaatattcagtttcatattatttaatataactattggtatatagtggcctttatagtatcataccgatattaatgtaattaaatatcatatctcatataatttaagtaaattatttttaggtaatattgctaacctaatcgtaaggcactacctataaaaggtaatagacattattgatgctcaatagtaatgctcttaatgtaatagcttttagaaaatatcgctaatcaattgtcgggagctgcctctagaaggtgtttgacatcactggtgtccaatagcaatcctcaaaaaataaagagtattgctatttatcactttctaatagttaccgtattatttattaaattataatttgtgagacctgatattaaaataaacctataacagtatgtcacttctaataatacagtcatctaaaaaggtgtttcgatatacctctatttatttcaacaagaggagaattttttttaatgattctgtacgttatatttatttaatatttagttaagatcatttgtaaattttaagaaaaatttgaacaattttaaataccgaaaataagatttaaatattttattacacgtgcaactattttgtagtgtggtaagtaattatttgaaccttattttcgatacgataaattcttcaaacatattttaaaatttacaaatgatcttaaataattacaacatatacaattatataaaaaaaaaaattgaactaaataatttttttaaataccgaaacaaataaaaattaccaaaacatcctttaataggtgtaatatacaaatttcctaagctatatagcatcttaatcttccactaaaaactatatatatatatatgaaaggagtggtcccttataacaaccttaccttttcttttttcttttatagttgtatttgtcaaagtagccgttgcatctctctctcaatctttttctctctcatcaaacatttatacttacacaaaatcatcaaatcatatcataaaaacaaaaaaagactctgtctttacaaccagaaatccgtgttctttagctccctatactttacaacaacgctcctccaaacccagatcatctttttcccttttccattacttggacccatttacacatttcatcaaacacataacaaacactttagtttactatgaattcaacccttttggacaccaaaatggctcttaccccattactttcttcctcaattacaagcagttgtagtagcagaagcatcaccaccaccaacaccaccaccagcccccgaagcagcagcgcgagcagcgaagaaggcgatatcgaaaacccaccaacagttagtcattttgagcttcataaaaacatacccttttgtgattttttctcatataaatcattagctgtactctcaggtcatattggttctgtttcttgtttagcattatgtggtgagtttatactcagtgcttcacaagggaaagatatcatagtatggcaacaacctgatttaaggcttttcaccaagtttggtcatggtgataatggctctgttaaagctcttgttacaacaggaaacaaagtctttacagctcatcaagatagtagaattagagtatggaaagtgtcaagaagatcagagaatgtttttaaacttgttgacactcttccaacaacaaaagattatttggggaaattcatgaaacagaaaaactatgttcaaactagaagaaaccataagaaattatggattgaacatgctgatagtatatcatgtttagcaatctgtaatgggttgatttattcaggttcatgggataagactttgaaggtttggagagtatctgatttgaagtgtttagagtcaataaaggctcatgatgatgctataaatggtgttgttgcaggtaaaggaatagtttactcagcttcagctgatggaaaaatcaaagcttggggcaaagaaacaagtggtcattgtcttaagggtgttttggagggtcataataaggatgtgtcagttaattcagttgtggtttctgaggatggtaagtggatttactcaggtggatcagatggttatttaatggggtgggaagggaatagagaattgagtaattggaagattgtttgtgaggttaaagctcatcaaatggctgtgttgagtatgtgtttagtgggtgattttgtgtgtagtggctcagctgataagagtattgggatttggaagagacaatgttatggtaagatttgtaaaattggtgttattaatggtcatgaagggccaatcaagtgtttacaagcttcacctaataatgttggtggtgggttcatgttgtatagtggaagtttagacaagagtttgagagtttggtgggtttcaaaatactcatcaaaacaagaccaagaacaagaccaagaacaagaatgcatttctataagaagaatttgatgatgggtattcataaagttcacaacttttttggttttttttaacttattttgttcatagtttgtgtgaggattgaaatagtttgcaaagggtatacaatagtggagaaaagggcaactttgagttttgagtttttttggttgtgaaatactcaaacttgattttcaaagagttttgagtgttgagtttaggatatatattaaagggtaatttgtgtgattttctttttggtttttggttaccttttagtatttttacatagtttcttgtcaattgtaatcaatattctaaagtatttaatcaataaaatgaaatagcattaattatttgttagttcaattgttgaaatataaacaaaattttcctattgatatacttaaagacagagtcgagtcggccgtgaaatttggttaaacttaaaaaataaaaaaaacttataatcaatgtaattttctttttcttttacataatttcttgtcaaatataatcaaaattctataatatttaatcaatgaaatgaaatagcaataattatttgttagttcaatttgttaaaatataaacaaaattctcgataaagtcgaatcggtcctcaaatttgataaattttaacaaaaaagaaaaattataatagatataatttttttcctttacataatttctttttgattataatcaaaattacaaagtatataatgaatgaaatgaaatagcattatttgttatctgaattattattattcaacaacttaattgattgctaaaatataagcaaaattttctcattgatatatggctaaggacaaatctttctaatcaaaggaaaataaggtaaggctaagaacatgggattgcttcctcaagacatagcattactaccccactaatactaaaattataattcattcaaaaaaaatactaaaattataatactataatattaatgttctcactaacaaaaaaaaatggttatggcaacttaaacaatagatgtgtggatttgaggcaaggaatcttttcttcaagaatgttgacaatgtccccataaattttttttaagtgtttatacagttgttctttttgtctttaaatataatgttttgtgaatttaacgggcaaatgccacgtgtcatgtacccaatagtccaaactgataattagttgtgtttaagcattaaatattgaatgattattctatatattagctagtattttttttattgggatttagagcaaactttcaaactgtttgccttaatgaccaatctatttattcatcttaaaaatgaggaccacataaagtccttcaaaaactatattagaagaagcattgttattacataatgaatagtataatgaatcaatgatgcttatacagaatatacgggctttaggtcatttaaattttagaactctcattttataaaatataataatatatatatatgaaaaatattaaaaaagattatggtgagaatcaaattcacactattgtagaatgtgtcatacattcttaccaatcaagttacgaatatttgttatttataatacacttaattttattcaaataaaagtttagcaaaacattttattttttattttggactcccaaaaaatgtagtctcttagtataggcctagtctgcatatgtttaaagtcgaccttacttacaagtaattaacagtttttcataataattattaagttaaaatatatgaatccgaaattgaattacaataataagagcaatatgacacttttaagtgcctacatattttttataggataaataccattttaagttttatattttttaaaagttacttattaaactttttatttcgttaaatgataatttggatcctatattttttctttagtaaaataataataccctaaacaaaaagtattatgaccaattaattatgtcttttatacctcctaatattagaaaataacttcaaattagttgatactttaatcatattgaaaaaatattcactaatattagactcaagatattattatgtatcgcttgtaaaattataccatctgaataattatttaataaaattaagaacccaattagtaatttttacataatacagaatccaaaataatacttaaatcttttttatattataaagaataattccttgaaagattttaaagcaactacagtaccaaatttattggcccaacaacaactactaaacctagtcttctaagacattgcttttttatcttctttacttttgtttcatagtattgagacccattcccactagtgttggaccacaaaaggtctacaaataaatatagaaagtgctaaggcatttaaaaattcataaagaaaaagtacttcaaagctaaacaatcttctaagtaaaaaaagaaaaataaaaacaatccatagacaacttgtgttgtttgtgggaacctcactgatataaaattactaacaaatgaaagttttacctatttactttaagtatattttgcatttttagaaagatataatatgcaggtttagtcctgatcttatccataaaccgactaggcttgtgattacggtccacctagcttaggaatctaaaaaaaaattctcttttaaaagtacatattttttttactaattttgaaaaataccatatggcccaaaaataatttttttcttaagctctactaaatttcagggctgaccctatatgtaaggtaggtactgattttaaaaaataccatattcttctaaataaggatccaaaaataattttttttcctatgactcactaaattttaagactgatcataattatatgtaaggtaggattagaaaaaatcgagtctcaaactttgtaaagacaaaaaaaacatgtccaactagttatgctatgcatgtgagaatgtttactttcatcttagatttgcctaattgtgtaatcatttagggttggatgtaacaatctagtattactagcttattagaggtatctataaatgaattattgcagttaattatacttttgttattaaactccattggatcaaatacactaaataattaattaactcttagtgtaattgtttgattgttctcctccactagttttgaattaaagtaatattttctttccttttaaaataaactataggtaactaataaatcactttatgccattcaaatcaaatacccttttattttatgtggactaactataatttattgattaaaattactaatttttggaataattacattctgcaccattttttagaaagaaaaaaaaggtacatcttaccacaaaaaaattaattaaaaaatacaatacctaatttttcataataatgtttacaatcatataaaagttatttacaaatatatagggcgtatgtgaaagttacagtgtaattattaaattgtataattacactagtaattataccatataaattgataattacacataaattcttaaaattttgtttagaaacatagttagtaattacctataatagtttttaaaatttaatatttataatagaatttttatagtaattataatattgagtgtaattacactcaagcgtaattgaaactcttaacttcgttaaattttacagctacaataatatacttatctgataatagttagtaattaccataacgataattgtttttagaagttaatatttataatggaaattttttagtaattacactcaatacactattaagagtaattacacttaattaaaactcgtaactaacttaaattacacgattacaatataattataaatgtgtcaaattatgtaattatatcaaattacacccaaatctaatttctcctttctaaacacaccaacttgtttacaaagatataaaaaatgtttacaaacttgtatttttgtaatatattattttttatatatattatttcaaaagtttaagtatttttgaaaatttcccgtggaaaagagaattgcaataatattatcacaaaccaatgttttaagctttaaagagaaaatccaataataataaaaagaaagtatttcataaactaatcaacaatttaattatattacaaaagttacaaaaccgctggcactaaagaacagttaaaaaaaaggccatttactctagccaaaatttaattttggctaattatatttaattagtgttaacatatccataaataaatacatgaatgggacaaaagcccctctttagagggaagttaatgacaaaaaaaactcctctgttgtaacccttttcctttttcctataattgtctgtagataagaacataagcttgatcatgtaacactttacttgtgctaatggttgtaacagatgcatcatcaaatctcagccactgcccactactaccatggcatgcatccgcggtgtaatgccctttcgatggctctcttccgtggtgagttattgtagcaacaagctcgtattttcggccctaagaattcgaacatgagaaaaagataaacataagttaacacagctaaaaaaagccataatacaacatttgattgtggaggtgtagggtagtgataattactttggtagatggtgaagggacgagtagctcgcggcctaataccaactcaagaggaaagcgcacaggcttaagtaacttagtgcttccttggcttccataaccgaatcgcatcaggtgaagtatcaatatttttgaaagggattggattttggttgatttacttgcagtcacaacaccactctgagaaaaccataaagtgaagtaagtaccacataagtaatgccattaaaatccaatgcaataacataaaagtgtgttgggcttataataccttcccagttgtcgatgctcgataaccctcgagagtttctggtgcagagaacagtttcaatgcatcctcaatggtatttacagcttcagggtgaatgtcaagatgaagtagtaaaaacggctgaatggtagcagactccctattgcctgcataataccgaaacaaaggcataaaactcatcaggataattgaatactttgcaaaaatttaacaaagaataagttcgagacaaaaaaaaattacctttcgccttcacaacgcttttcaattctcctccaaagatattgctcagttttgaaggaataaagctctgtgttcttgtcactgcagatttgttctttggaccaaccgtttcccactcatcgtcttcaacagaagatataagagaagatttgctcccaacaggtgattgtccttcaagcttgagcagctcatcgtgcatttgatccatcacaaagctcagaaactcttgagcatcttcctgtctgaacatagtaaattgtgtcaaatggttagttctaacaaagcccgtgataatcactaaaataaaatggtgacagctctcaaaaaatcaataaatgtcgggcttactaaacggggcacaattcatttttacaaaatgaacttactacagaacatttgacaataagaagatcaacctatgctctaaatctaacccgtgaatatttcgaaacaagctaagatattacatgtttgatagctgaaaggactacagatcaagccatactctatgcttaagacactaaaggcactacttctaagtcaaattctataaacaaaaactattgaagataaaagaaaagaaacataaaaatcaatgcacataatataccttggtctgcctgatataccacttggaatatctggagtgaagttcttcagtacttgttcaaacatggcaggtctaaagggcctaccaacatcaatcacattggtatctttcttccttgtgtttgaacagctcggcatatcaaattcaatcacaaattcagtaaatgcagacaatgttggatattcagcctgataagttacaaaacaattcaacataagcaacaacaacagataaagcgaaaacaccaagtaaaatcgataaacttatcatgtcttaagttccattaaataatcaccttggtgatgtttgagtgtcttaaatcctccaaaagctgcacaaaaagggagcaagacaacagagcttgcacagttgcattgagaaaacacaagtttcctaaattgactaatccccggcgcagtaaggttttagcaacaacaataacttgtccattagcaactttattaggttctattttcgccaaagataccgagaaatctcctacactaccaccattctgtactccattctgcaaattcaaacaagcaaaaccatttctaagggcatttagattctccaactcaggtgtagaaattccaacagcattgccccttttcctatccttaactccattactatgaagagaagtatgttcagcaacaccatatgatgcttgtgttgttcctttcaaagcagcaccagtagattttccagagacaaaatctacagatccaaatttgaatactttcttctccaaatccttctcaacaaccttcttagatgacttaggcttcatcaaagacttagtctcatcttcactaaaagaaccaaataaaaacacctgtacaatacaacaatcataaaaaaaaaaatctaaacaaacccaataaaaaaaaactcaactttctaatcacaatatcaaaaaataacaatcataaaaatcatatctttatatcaaaattaaggaaaacacaccttgggattactcatatttccttctcttttagtatcgaccagtgtcccaatgtatgtgagaatttgaatttgaagtagtttgttgaaataattggaattgggttaggattgggattgataattgggattagggtttctgattgttgttttggtattccgattagggaacttggttggctgccgccattcccgtctttgagtttctctctctctctctctatactctcttctctactatctataaataaataaataaaattaacaaattaatgataaaaataacaaataatattttatttttaaataataataatagatcaattgagttttgaataataattttaaaattaagaaattaaattttaaataataattataaaaaaaaaacaaataatatttggttattatattctttttttcatttttgaatagataaactttttttaaaaaatatatattcaattaagttagaagatatataaaattaacaaataatatttgatatttaaatagtatttgtttaagtaatattaaaattcgtttaaaaaattaaagctcctaatattagaaaataaaaatattattatctctaaattctcacttgtgtctaccaataatattaatgaatattgtttaatatat

SEQ ID NO: 189108 - DNA, 2137 bp, Cannabis indica
gtttttagtagtttttcaataaataaaacatgttcttttttaatttggctgatcaagttttctgttgaaagtttggatttttagctaggtttctgacatgaactgatacaggtaatatgatatgtataaagagtatttgtatttatttgaaagaaagacaaagattcttactttatgtgagttgggatacaaaatctatttgtttagtttcaaattattgggataatttgactttgatggttgacctttttttgtaatcttataatgattgtttttctcactaacattattggtccattccattccattactctgttctgttatgttgtttgttttggtcaattttatagtgttgtctgttgtgttctaagcaattgatagaatgttcttatcaaaattatttgacttgtttacttttatagtgtttgatttaataaatcttttgtaggattagatttgttcaatctatttttctattgtataaatcaaatgagctcaaaaactgtttgagaaaccaaagtactctaaaaagtagaaagaagaacacaaccgatttgtttctggtttcaaccaaagagaagctttggcttacatccccgcgaactccctttgagttcggcatcttttcactatcaatggcgacgatttcacatgtcttttatctttcaacactctccttacaactcaatcaaatgtattacaatcgaaaatgtgctcggggaactaagttcttgactctttagtaatccatgtgccaacaattagagcctcctatgattagttttagatgaattggtttaaatgtgatctgatttgcaactaaaacacaatgcactaagaatcaaaatcccctttcctagaaaccttaatgttctcttagcgccctttgaaacccgattattccaactcagatacaagtgttaagttagttcctaacaacttactcttaaaaccaactctcacacactctttgtctctcacaacactcgaatctcgctcttcccattagacttctcagagttctgtcttgaagtaatctttaatgtatgttattatgttatctgtgtttggtaaaagtgttcgtgttaatatcgccttttcggggttagaatcacaaaattactctgtatgtactaaaatctgttttcaacacggggcgatgtgtaaaaggcctttttgtttttccttcattgaatcataacagggctctcaagttcagttcatctcgaatactcaatgtgcatatccccgaagtccagcaatggcactcggtttaactgcagccgcagcactcatgatagctcaagtgatcataaacggttcaacgggctgtatttgttgcaaaaggagcacacaacctctcaactccaattggaaaatggcactcgtctgctttgtcgtttcatggtaacttcgaaaaactcttaaacttcgaattcatcatacaaatttggcttacaatctttttggcaggttcacatttgtgatagcatttctgttgctactcaccggtgcagctctaaacgatcaacatggtttagagagcatgtatttcggaaactattattgctatgttgtgaaacccggtgtgtttgctggtggagctgttctgtcttttataagcgtgacactcgccatactctattatctaacattcaattcagcgaaaagcggggctagtccgtggggtagcccctcgggtccaaatcaagggccaccgagcattgctatggggcagcctcaattcccaccgcagaatcctcaagacccggtttttgtacatgaagacacatacatgagaagacagttcacttgagtttttgatcatgatagtttggtattttgttatttaattatctttcttataacttaaattagtaactaattagtgtatatttatttattttaaaatattattatgttattgtaataattattttataattatatctcttctttttttttttttttttatttaattatggttagttcactaaactcactaaatatttagttgaattgacgtaaacgacatgaaagaaattgtcgtttttttcttgaattttatgctattagtattagatgaccaagaaatgtcgttttactggaaacgacatcgtacttacataaatgattt

SEQ ID NO: 189109 - DNA, 5056 bp, Cannabis indica
tattatttaaattaataattaataacaactctaatacagtatatatattgcattattaaaaaatagtgtatatatatataggtgttagtaataaggaattgttttgttgtatataatcaaattcgtgcatatgaggattccattagaccttcaaaaagctcttaagttgaattttgatgaaagtgagagatagggtttaccctatctacttgtgttattgttgttgttggtattgtggggtaagttgagagagtcttttcatgagagagaaagagagagaaaagagagaagtatacttaattaaaacacgagtgagaaattaaaataagtatagtatatatactactactatgctagtactactgtggattgaagtaacagctagtgagtgagaattgagaaatggtgggtgttattattattattagatatgtatatgtatatattctcttgcttttgcagcaaaagaaaaggctagggatgggttatatatattcatgagtggacaattttattcatttactcattttcttttcttttctttctttgtgtgttgtgtttgtattggaatttgatttggcaggatttgagaggtgttaattaatttggatctagctaatatatacatatatatatatatataaatagttacacatcatttcctttcattcttttcttgatcccctctcaaagttttcaactcctattgacatggatggaagttttgatatgttgttccctcaccactcattgctctttagacttcttttttttttttcttttcaattttacttatttgttatatcatgaagaaaaaagatttagtaaacttctcaagggtggtttagatacattatttttatttattttagcttccttaaaaaagttttttagtccaattttttttatgaacataaatttttaattttttttaaaaagttcatataacttcttaccaccagtataagaaaaaaaatttataaatcaacaaaatatttcaactttattttttgatactgtaaactatttagaattttctgaaaatttatggataattttaaataactataatatcttatgttatttataaataaataaataatataatattaagattaaattgtgataaattatattattgagaaaatttattaagtgtataagttacattttatgaaatgaagtgtatttgtaacttaaaaagagttacaagcttaattacacgtgcaagttgtaacttaagaaagttcaaatctgaatatagatttgtaactcatgaatcaaagttttaaaatataattaaggatataattacatttaagagtcatgaagatgtgtaaaatgagtttccagttagaaatggaaatattcaacattaattttacacaagaacgttggatttggagacatctctttgaggagaatcaattctccaaattggatttggaaatgagttttaggcaacatgtcgcctattgcatgcatatagttcatttcatcgtgtaacgatgtatctcgagggttcaaatgtattacttcgggcgatatgtcatctggtgccaggccacatatcgcttggagccctttcctaagataaacgttacaaaacgttatgcattcaataggagatgtttgctacttcttagcctgatccctaaagttcctctacacgagtggtaactgtcattagcgagtgagatttgaatttcaaacttggttattcctaaatactatatataggaccctttggttcatccatttcacaagacactcttctatctttcaaacacttaagctagagagtttgaggcttcataattctcagaaaatatctccactaaaaattctaagtgttctataaagggaaaaataatatgcatgtttgtctgctttgctgttttttttatatatacttttttgaatgacggccacggttgccgcctgtgtaacacctcctttagtggatgtttgatgatgtatttctctctttattattattatttgaggggggcaaagtcagagaatttttggctctcgttccccatgtgcccctttggcagtttaaaatttccctcgcacgtcttctattcttttatcttgatcttcccacaatgcttcgatattttgcacctgatgtctgtcattgcgaatcgtttgattcctttcaacattcatccagagggggcctctttccagcagttcgggaacccccattcccctttttgacctaaggtttgatgtgggggctcactggtggatttcttatctttcaaatgattgaagttcttcaagatcttcacgaccacaatttcttcgagttcgaccaggatattctcgagcttcaccaagcaaatctcatgtcgactcatgtcgcaactggctcaaagtcttccaagaaggggccaaagaagttggccaccttggaggaagttatgaagggtatggtcgcttacaagaaattttcttaccattccaatggttgggaggccgatgagctatattcgaaactaacttgcacccaccaattggagaagatagtgaccgtaaatgggattaagccatctagttctggagtttaccatcgtctaccgagggacgaggagatgccaaaccataattatcatggttttggagcctgtagccaaacccacctcatgtccggggctatggtacccctctaagattatttcattaattttttaatttttgtatgactttcaccataccagctgatacctcaagcctaccacctgttgtcaggcctttttattttttatgccgcgaggggttgggccgctcccagccccactaaaattttgtatttttacgaactactttctgtcctaaaaaagggtgacaaatttaaagacagtttttataagttgcaagctcacttggccaacaaaaccccaatacccttccattgtgaaaaaaatgttaaagaatactgtcataggtttttcttttcctccgagtttaaggctttcgagcgcctagacctgttgacggagtgggacaagatccctccaatgcatcgtaccgatcccacccagcttttcttaaaccacgcacaagtatttaccggctacaagaagaaagacttgaacgtgggggacttggtgacaaccgttaactgcgggagggccaagttgattttaaagagtcaatctatgaacaaatttaacctgtccaaagtcctttgtcccaatgcccaaaatcttgggaatgagaagacgcttagggccgatattatttcatttactggttaggccaaaattcccgtttctggttctaaactctgggggccccggtgcaagtacctctagagcttgtaagtctcctttgaatattcacttcgttccttctgtgacctgtccatgattattctaacttaagttcagtggaatttgacatgagattatataaattctggatgccccattcccgttgtggcgataatgcaaagagcttttatttctccaatttaagtcatttcctgggttggtcctggatgggctttggtcctccgatgccgattctcttggaccactcctcctacatgacctcgagttggtttctcccttcagataactttttaggggatgacgacaccaactctttaatttatgaatttgctaggatagaattagatcgacatggtagcattagcctcgctgtattatacttgcttttgtaattttttagtgctattctaactttctatttacttcggacagtaaaatccatagaggacttgcttgccattctgggccgcacataaagccctgagccggagatgccatagcttctttgagcaaatgtgactccgaggggaccaaccaaggaagtccctgggaactaagaggtggttctcattgaagaagaagaggaggaagtggttcctgcacttgaccagaaatagaagggtgttttctctgtgcctgagccttctaagaagcttaagcgagttgccacccctactcccagcactgaatctgggatcccagccgagggcgatgactttcctgcttcctcaggcattcatttaacccctgcccatcttgacgaggagagggtccagcttcagattgccaaacacaattatgtggtggatgaactgtctaagggcgatgctgaggctgaggccctgaagaagtggctaagggaggctcacgatgggcctttctaaggcgagtatactggggagatatgggacttgaaccttgatcccatgattgacaggtttaagcacttcctaagcccgaacttgacgttgttcgcctttgaattggtgatccactttactgctgacctgacccaacttccgacgaagagatacgcagcctgtgcttcctccaaccccatttatcaaatccaggatatgagtgttgccctaactgcagtaagtattttattccaaggcccttcttctttttaatcttacttttttaagacctaaccttatttgttgccagattgctgcgaaggccagtcgactttccaagacattaatcgatcaagggattaccatcttggagttgggtggcatggatggtatcatgagaaggctatcacggagtgggaccaagaggcactaaaggctaaagacgatattatcacctcaagcaggaaggacctccgggacgctcaagaggaaatctaggaactgtccgtgaagctcaagtctctttaagagttacatcagactgacttggaaaccatcgccaacatctctgttgaacttcaagagttgagcaagttctgggagcagacccgaaaggaagctgccaaggctgcgaaggaggctttattagctccggtgacctgcaagcactgtgagaagcgcttcgaggacagagtttttatgtgctggaaattgaacaaatttgaacctcgcctccacttcctgcccgatccaaaggccactatgatctgattttgggagaataacaagaagttgaagcatgtcttggccgagcgaatgggtccccgtcttccaccttgagtcgtttgattagaccctaccttttttcttatttctcttacttctctcccc

SEQ ID NO: 189110 - DNA, 3523 bp, Cannabis indica
aacaatgcttccaaccaaaggatgtacgccttacccattagaactgttgcaagctctccctaactgaactggtaatagttttggattcctgaacctaggtgagttttctaaccagtgaccagtgctagttcagtacatatgatggatgaaacaatttttcttttggattcttccaagctacctaatcaatagggtgatactgagaaagaatgaaagatactcatttattcaatttacacacattcatatacatatacatatacatattttgcttttccctttaatcagtttaggtggaaaatatatcaaattgtagaagaaatgagagtaccggccaagatgcttcaatctcctatctgttgatgctcgggaaagagcttctttagggcttgatgccaaatcatcatctatgctgagttttgtctttaaatcatctggcaaagcctgtagactaaacatgttagaacctctcactcatccagaagttgaacagtacaccgttcccaataagagtcataccataacatcatttacaagtttctcgagctgaatctgttcaatataagtacgaggaacatatgtaccatccaagcctagctgctccgcaacaaatttaacatataaccgatctttcccttgcaccttcatatccattctagaaagttagtacaatgcttcttaaaattcacctaataataagactttgacatgaaaaattcttttctatattatgtagcataattgcctaagcaagtggtgaactgcccaaccaagtccatgagagcaacactcaagtctctatggtgtaattccatgaaaaacaaaactaaataaataaacttccatgttggccagcatattaggagaggtcaataatatatatcacattggagatagtatgttacgaagtttgaagcactcggatgaatatgtcaaagtcatgtgtaacttctcttccagaaaagaagagaaaatgctgataagaaacaacaattataatttcccaatcaacagtcatacaataacttatatacttaaatttcttgatatgctatcatacaaaggtaaagtcaagatatggtaacaagtacatatatggcatgcttgtgaagtctaaaatgttttccgatcagaaaggcatttaataaccttaagtaaaaatgaataatttcatctaaatgaccaacaataatatgaatgctaaagctagatgaaattattcatatatatatatatatgtatttatataaatatatattaaaaatagtttaaaggattaaaaatcaaaatctgaatgctaaagctagtagaatacctgaacatattgacgattaagttgctccaaccaatccgttttaacagaaactctatcatcgcagaagatatggctgcttcttttcaggatgctcgcaattgtatatcccaatgccataagtcccccaagaaggcgcacgctaacttcaaaagttattcgaggagaaattatgaatggactatccgtaacccattcctgattagagcgaaagaagagaggctaacaggttagaaatctttctgttatctgaacttctctctgaagattattcataaatctccaagtaaaatcttgatacacaaatcctgccttgtagtaagtcacatatcaaaagatcctaaataacattaaattttgaaagtagcttgcctatcttaggaaatttcaattccaatctctacccaaaacaaaagaaaaaagaaaaagtttttcatatttagcctaaacatacactccctgctagttttcttacaaagaaaataacaggaagaaagaccatcgatgaggataagtacaaaatttagtttcattacttgaaaaacagacttgtattgaaaggagaaaaagtgaacaacaataatataaatatacatataatatatatatatatattaaaaaacggcttcttgcctaacccattagacagcctgaagtatctaagtatagagtttctgcatggaataatgaactcactagtacttaaccaatttaacattgacatgtacagacgttcttaaactagagatacttgagcatatataagaactaagagcagagaaagtgaaattttagcctactttcaactctagcaaagttggatagcagaaaaaatgggtagaaaggaagaagtagcagtcatgcgcaaaacttcaggactgactcaaatcagtagtgagcaacaaaaaaacacatcattcacttctggaataaattgtggatgaagtagacagatttcaagtaaaagcatagatctaaaagcttggatatattgcagtacataacgagcactagatatagagcttgataatagcttaatgatagtttattctacaatggtccacctcaaacatgagattgtattttccatctctgttcctcatcctcagatacgactgacatgcttcaggatcttcaccaggaggaagaagaaaaatgtcatatgtttcctctgtaatttctttgtgatccacagaaataacagccttgatttcatcattagttacaactttagttgactgcaaatagaggagccatacagagattcagttagaaaaataagttcgcacttaacatagatacatggagatttatagaacaaaaggaagatgataaatgacctggacaaggacaaatgtagaataacctttaaaatataagtgggattctgaaaaccactgaaaggattaaatttgttgatgatctttatatgtgctgtttgcagatctggctcaataaatgccttgtacataggataaacctgtgatcaattttaacaagaagaatattaaacatattaccttaagtaatgtgtcaatgaagtcactaaaagtcataaaatcacaaaacggaggttaaaagggagaaccgtttcagagatttgatggataatttcttcaggctcttggcctgctcgttgaatgtctcgtaaaacccgtttcacaaggtcaaagtgaactccaccagtgacagatacacgaagatctaggaaccggcgcaatttttcacttaaggcatatatgccctctattatcacaatacgggagctagggacttcaactgtcctgatagaagcataaaagttataaatatataagaaaatgtaaggatagtcagaagagcttgtgaactgaccacaatgtttgcataaaaaaggacatgatcaccatattcatatgatttgcattacgaaatacaaaatctataggcttccttgacatttattttgacccaataaggttgcacttcatgctctttctaatttcctccttaataatacaagtttgcacatcttactgaaaaagttccagtgacacattacctgtaacctgtacgagagctagtcttgaaatcatatattggaacctggacaggtttccctgctcgtaagccatgtatattttcaagcaatgtgtcataatcggtgaggcgtggatctatttgaaaacattaagataattagaactctgccctcaacattgcaataaaaaa

SEQ ID NO: 189111 - DNA, 3051 bp, Cannabis indica
gtcattaaggtaaattttatttttctgtgagaaaatgatttaagttgatgcaaaaattttcaagcatagctaagctactaatttacatatgtatgcagctattcaacaatagcatgggcagggtgcttaaaaaaagggcaaattgagaacgtgagctacgcatacaaaaacacgggcccagctgacaacatgttcagattctttaacgctttgggccaattcgcgtttgcgttcgcaggccatgctgtggccctggagattcaagccactattccgtcgaccccagaaaagccgtctaaggttccgatgtggaaaggggtggtgtgggcctatttcatcaacgccatctgttacttcccagtggcaatgatcggttactgggcatttggccaagatgttgatgataatgttcttatcgatcttgaaaagcccgcatggctcatcgccactgcaaatttgatggttgttgttcatgtcatcggcagttaccaggtaccattaattacacaattcattattaacaaaagactaagaaatctgctattcatcctccagctcactatccacgtgtaggactgtggaagggatgagcagcatatgtattttttttaatctttacttttgttattttcaagtaagccttttgacttgtttttgatcatagaatagatgcatgttttgaccaataatgatatttgtctcttttggaaatcctacctgctacagtgcagagaagaaattttttaattattggactatcatgagacccttcaaaaatataaaattgacagtataactattagaggagtgttacctgttccaaccacttattaaactttttatcttttaaaatatatatatattttttgtttggcactgttctttatatttacaacattacatataaattttttaaaaaattaaataatttatagtaccgaaaatacatttaaatttttttaaatatgcatatattaaactaaaatattaagaagtttattttcaatactttaaactattcgaaatttttaaaaattttacataaattatattataactataactaatattcttataaaaaaaatttgaaattttttttttccataattttaagtttagaagttgactaatagtacttctctaactatttactaaagcgtatagctataagccacttagacatgacatatgtgtgcgattaggttcaacatatttcaacttaaattaattcaaatttaaatgttaagacacatgatacatttttattgcactaataatgacatagggtagtggactattgtggatatctggatattgtcccatgtaaaataaatagtagagaattgagccatatataagaacatggactactccacttataaccaattaattttgagatggaacaacataatactcaacatgcacattacaatttagcatttctcaacttagactgatctatcaaaattggttttagattattaattcattagtgaaattttaaatagagaaaacactcacaaataatcacgatagaattttttatgtattgtttgtgtatatgggaaaaacactcacaaataatcacaatagaatgtttttatgtattgtttgtgtatatatggtcaatataagctattttttttattttaatatatacatatatatttataggttttttgctatgcctgtgttcgacttgctggagaggatgctgatgaaaaaattgaacttcccaccaggaattttacttagattggttgctcgaacaacatatgttggtgagaatatatataaatatatatatatatatatatatatattaaatattatgtaatataggcacacgatttttcttttttaattaaaaacacacaaatttagatggtggtggctctataatgatatataggtcaattaaaaatttagttcaccaaattatacaatgaacaagagtttattgggttaattttgatactaaatattatttcttaattaaaactatattgcagcatttacattattcgttggagtcagttttcctttctttggagaccttcttggtttctttggtggatttggttttgctcccacttctttttttgtaagtatttaattattaattttcttacacgaattttagatgtttttaacatagctaattattataaatctacattttttttttattaatacttaattgattgcagctgccttgcgttatgtggttgataataaagaaacctaagagattcagtgccaagtggttcatcaattgggtaataatcatacgttttttttttttccaatatgaaacagaaataccatcctaaaagtagatgtataaatatatacatattttaattggaatattatttttcaggcttcaatatccataggagttttcataatgttggcttccacaataggtggcctgcggaatatcgttacagatgcgtctacgtatagtttctacacatgaatgagtctatatatgaaaaaaaaattacaaataagggtactactttttttctctactgcgtctattattattaattggagaaattataatttaaattttcttatatgattatacattataattatagttatactatgtatactatcgtaagataaaaattaaattataatatctccaaataccgaaaatatagacagctcttatagtgtggggaaaaagataacatttccctttactccctataatatacaaaattcgagaagttggatccctcctgtcctatgaagctctttcattaaattatttaaagaaatgtgatagctcttctcgtaaaagttatagttcatgtgcttactacctagttgtaataacaagtgacattttctagtttatattctatttttccttttcaatttgacacaagctcaagaaatttgactagcatttattgttttggtattcttcacgaaaacttgcgtagtgaacataacttcatcttaatttttaaattataatgagtgatataatttaacttttttttaaaaaaaaaacaatatataattatcttc

SEQ ID NO: 189112 - DNA, 4810 bp, Cannabis indica
agagtgaccgattgcaaacaaattgataagtagcttgtttaacattgcatagctttttcatttttacttttgtagggtcaacattgcatagcttggttattgtagtgattattaatgttttcagcctcattgattactagacttcaaattctatcaagagtaagctatgtatcgtaagagtaagctatgtatcgtgtggctaaccaagtataaaatgtcaagtaaaaagtaaaatatatttggttgcagtcagttaaataaatgccagttttatcaacacacacagggtcaataataaagatacacagttcgggagaaaacataattagtaacatgacaagagcaataaggtacaaaaagaatcattcttaaaacataggttcatatcttgtaacatgtaagctttcaaaatcaccacacagcttcaaacatcaaaggtgcttcacaacttcaaacgtcaagtgtttgatcaaataacacactgtcacaaatagtctaaaaccaaacatcaaatgtgtttcacaacttcaaacgtcaactgtttaatcaaataacacgacactgtcaacaataatctctaaccaaatataccagtcccagatacattcaacaaagccattcagaaacagaacgatcaaagaatacacaacaccaccttctccaaataaagtttgatcaaagagaaaacattaccaccaatcgaatgtcaattcaccggtttttctattaatatataactcccctgagcatttgaagatagaatatcagagagaaacgtagcttgaagactatcgcatcctaaaatgaagtccaaaccgaaactagataccatcaaacattgaatttcataaagtccaccatctcattaacttggaagatcataaatcagattaaaaccaaatatctaacctcgtaacaagaaacagatggccgagcataacaagttgatgggcaataacagtagacgatgccttgcactgtatatatcagaatttactgggaacaaacgaaagatctcaaaaactcaacaaccaaatattcaactttatagtgagaaacatttgacattgcattgagagcttccaaccaaacaaagtagattaattcatgaaaccaacttccttacaaatgagtacacaatggagttccaagtccaaattcataggctattcagaagaaagtcaaggttgcatatcaaaaatccagattcctaaatataagcaaaagatcaacatcatctgcaataatcatagagatagataaccacaaaaccctctgtagttaaaataaactattaattcatgaaaccaatttccttacaaatgagtatacaatggagttccaagtccaagttcataggctattcagaagaaattcaaggtcgcatatcaaaaatccagattcctaaatataaacaaaagatcgacatcatctgcaatgatgatagagatagataaccacaaaaccctctgtagttaaaataaactattagcttccaacacaatacaaaaattataccaaacagatctccgcacttcaagaagaggaacagttacaaaatccgatgtcacagctaatggtgcaaattaagcttgtggactatgacctcatatgaaaagatgatgatgaaagatatctaacccacgctgctaggactagagaagaggaaaattcatatgatgaaaaatacactgtagcagatgatgaaaaacctccagtagcaccactatcactttaagccttgaaaaaacatttaatgacctaatatgagagaattcagaaaatacttggaatcctatatttccgacaatatatcaaagggagaccaaagaataagtaaacataaaactaaagtttgagaagggaacaccaccaccacaggaagcatccatatgagtaccgaaaaattgatgcatttacacgaggaaatactatcatatagggagaaaaaaaagtcaattcgacaatgagaagtgtataaaactagtattgttatttttcaacaaaataggtctgttgcaggaataccaatcttgactctgggaaaccttgcttggtatctccataagaactgcaatgatgttcaaagtgcaaaacaagaaaattcaaaaaagaaagtaaaactatacatcatataagttaaaaagtgagaagggaacaccactatcacaaataagcactgaaagaaaaaaaaaattgatgcgtttacctaatcagaaaatactatcaatactttcatataactcgcatccttctttgatcatggatccccaaggaaaagtttaactgatagtaataaagacacttttaaaataatttaacccaggtaaaacaaaaattggccatacaatatgtatagatcaaaatttccaaacatgtatatagatacacatgcaaagtaccaactgtaagtcaaaccattggtgatgtaagtcaaaccaccgtagaatatctggaaatcatacctagacgtccaaaactaaatatatgaccttttaatgtgaaggtccaactgccttccaaggttagagtctggcttaaatagactcgataaaacaattgaagccttagacgcatccaaattttgataatattcttgagtgaaaaaagagtccttaaaattcactgaacacctaaagaaaagacaagaaccaaaaatctcacaaagacggaagctaaattttaaaaaaaaacactagttcaggacaactcccttcaaatgttagattcttgcataaatagacacgataaaacaattgaagccttagtcacatccgtgccttaaaatattgaagagtcctgaaaattcattgaacacccaaaacaaaaaacatgaaccaaaatctcacaaagaccgaagaagaaattaaaacgaaactcaaatctacgacaactcccttccaaggttagattctagcttaaatagaccaaataaaacaattaaagccttagtctcatccatgtctcaaattattcttgagtgaaagaagagtccggaaaattcattgaacaccaaaaacaaaagacatgaaccaaaaatctcacaaagaacgaaatgaagaaaaaaggaaacactagtcgaagacaactcccttccaaggctagattcttgtttaaatagacccaaattgaagcctttgtcgctttaaaatattcttgagtgaaagaagagtcctaaaaattcattgaacacccaaacaaaaggcataaacgaaaaatctcataaacaacgaagctaaagttaaaaggaaatagtagttcaaaacaactcccttccaaagatagattgcttaactcgaatggataaaatgattgaagccttagtaagtttaaaatactcgagtgaaagaagagtcctgaaaattcattgaacgcccaaaacaaaagacatgaaccaaagatctcacaaagaccgaagataaagttaaaatgaaacactagtcagggacaactcccttccaaggttggattattgaagccttagtcactttaaaatattcttgagtgaaggaagactcctgaaaatttattaaacacccaaaacaaaaggcatgaacaaaaaacctcacaaacaacgaagctaaagttaaaagcaaacactagttcagtacaactcccttccaacgttagattattgcttgattaagcgtcgctttaatattcttacagtaaaagaagagtcctgaaaattcattgaacacattgaagacatgaaccaaaaatctcacaaaggctaaagttaaaaggaaacattactccaagacaattccctccaaggttagattcttgtgatccgataaaagaatggaagccttagttgcatattttaagatactcttgagtgatagcagagtcttgaaaattcacgaagctgaagttaaaaggaaacactagtccaatacagctcccttccatggttagattcatgcttaaatagaatctacataacaaatgaagccttagttgctttataatattcttgggtgaaagaagagtcaaaataaaaggcatgaaccaaaaatctcactataaccgaagctataaaagaaaacactagtccaatacatatgcatatgctaagatggacaacataataagaattgaaataatcattttacacagaaaaaaccttgacccattctctcaatcacctaaaataatgaaaacagaaagaaattcgaactgacgaacagaaggagagataaaagaataacattccaaacccataaggatgaaaggccgcagttaatcagcacaacctgaaaattcaattgaatataagtatgtcaaaccttaaatgaatcaatgatcactactactttcagcgatgaagataatcagtactcctactactcctggagattgcctagtacggaaattaagtcaaggtttcaaccatttatgttcgttctgatgatcatgaaagattagatttattaatcttgatctaattctaattattaatgaataacaatgaaacttgtgaaggattgataccaggcgtaattgcaattaaccaaaagaaaccctaaatattaatccaaactccaaacgaaaccgatcaagaaccaaatcgacctaatcaaaatcacaacactaaccgatcagcgaaaaatcgcgagagagagcgagaagaccccattctgaaaagttacttcaaaatgatgtgaaaattaaaaattgaacccaggggttctatttatagcaaaaggacgtataaatggacggccaagattaagttatcatgaatctatctgaacggttgagaatgtcttctaatttaagttgaattatatttttggaataggcg

SEQ ID NO: 189113 - DNA, 1101 bp, Cannabis indica
aaacgatacacactgaaactgatgatgtaccggattaaaacacgcacattttggaacgcttctttcggagtattgggataatctaaaaactttagaaggttggtggaagatttttttgttttcagttgaggactccaaacttccaaaatctcaggcaaggactctttttcatataatataaatagctacgacgttaacaaccttcttcaatatccattgcaaaaacatctttgtttcgttccttttatttttcataaatttctgtatagagtcattgtttatttgatttttttcgactttagaagcgaaaaaaatgactatcctcattgaccagcctgtgattggtacattttttttttacattcttgtgtttcttttgatgattttgttgatatttcaaatgtgttggtagtaataatttcaaatttatctcaggttcacatcttgagaacaagaaagttgatgaaataaatgagttggtgttggatggtgggtttgttgttcctaatggtgaaaatgctgtatcagaacttgtctcaaacaatgaatttgttgcccctgaaatcaactcatttggtcactctttcaggtctttattatctacttttattatttgttacttttgatataatcaatttctcaaaatgactaatgtgaaatcaataatataaacagagactatgatgctgaaaatgagaggcaaaaaactgtggaggagttctaccgcttgaaccacattaatcaaacttatgacttcgtaagaaaactctcttgtatccaattaagatcaaaattaactttttttttatttggatattgatcatgatgttgaaattttggaatatatgtggaaaattgtataggtgaagaaaatgagagaggagtatggaaagttgaacagggttgaaatgagtatatgggaatgttgtgaacttcttaatgaggttgttgatgatagtgatcctgatttggatgaaccccaaattgaacacttgttgcaaactgctgaagccatcagaaaagactaccctgatgaagattggctccacttgacagcccttattcatggtacaaaatataccaaaatagacaatgtattat

SEQ ID NO: 189114 - DNA, 2619 bp, Cannabis indica
aaaagccctttaattattaggtttgttacacatatgatcctcaatataaaaaaattgattgcaaaagcactttaattttcatttttgttgcatccgtcgagtcaagaacattaattgacaagtaagatttattaaactcatgtgattggtccacataagaagctgacatgggttaattgatgatgtgtattatttaaaactaaattactcaaatatcaataaaaataaaatatatatttaataataataaaaagcaattagtaaaaagggagatctcctccaagctgataactctaaatccctaaaatgaaaacattagaaaaaaaatctcatcgaagaagttgatctcctccaagaaaataccttattccaaataccgaatctcctccaagaaatttgaaacccagctatagaaccctctcaaagaaaccccttcaaacccaaacaaagaacctcacttcgaacccagacgaaaaactcaaagcctcctctccaacctgttatgatggcgaaacataatggtgtgagcaaatctggagttgtggctgaagaaggaggaaacgaatttgaagctccatggatgaaaggtatgttttggacttgtgagccaccaaatttgacggtgattagaatttctaggacttcaaagaacccaggtagacgcttcaaaacttgtgtgaagcatcgaaataaaggaggttgtaattttttttgaatgggttgacaatgaaccctatgcatgtcaatgtggaatgggtgtattaccagacttgatgaggaagaagctattattagagagagaaatatactctatttctgcaggttcaatatcaaaggcttacaaccatgaacaacaaaatagagagtttccaagatcaagtgtgagtgatgtggaaagttggggtgaaagtaatatcaaggaaactgtagagaaccatttgtttaatattttgaagaaaattgtactctgtttagttgttatatattttctgttttggttgataaaatgagtgtagtttgttattaactaatatatttttaaatgtaatgttaatctaactaagcttcccctcttgctaatgtatgtcagttgtgattaatggagaaattattttggtattattttgattagattttttcatttcttgtcattactataccccattcttcacttgctaccaatacatagggatatttactaaataatctgcataatcttacaaatctagatatttagtctcaagacacataaaaacctaccattaatatgtaaaaaaaaaatattgtgaagtttggtgaccaaatggtagaatattagtattagtcaatggcaggtaaactaagagttgggaagtactaattgattatgcaaccctgcaacttgtcaatttgttctagcaaaaggataagaagagtataagttgttattggacttggaagaaaagacacaaagtaattgaaaataaagcaaaaaaaaaaaaaagcaaaagtgatcatcctacagtagctttatatgttcaaagcttttgtacagcacaaacactgtaagcatcctaaagtatcattcaatttcgaaatagcattcgggtcaaagtccagaaagacttccctgtgtagagatacatttcacatattaatcaaagactttttaagactccagtaagcatctgagtataactcatagttagattataaaactttaaggctgcaaagcactagaaataaactgtagcaacaacagtcacaatgcagataaaaatttatagaattcaacacacttctatttcaaatcatttccattaatatcataaacactctcatttagtctaaacaatgcatgtaagtaaaccaaaaaacaataaaaaaataattccaattaacatcaacaaagtcataatacttcacatgtagcttttaacattacaaagtcataatacaagctgcattaacatcaaaaaatactagctgcaataataaatccatagtacttcaattttatccatcaaaatactagttgcgataacaaaaccatactactttaagtgtatccatcaaaatacttgttgtaatagtaaaaccacagtacttgaattgtatctattaactatataaagtcatagttttagctgcattaacatcaaaaaatctacactcacgactgcactaaaatcccaacaactaagaacttggaccagctactccagcagatgcaccttcttccctaagttgttgcttctgccttctccgtctccttttgattgtttcgtcagatggattattgcttggtggcctttcgatcctttttgtaacgtgtacctacaaactcacaaaaagtatgtgtgcaaataaatccaacaactgagcttgaagtagtgtcaaaataatgaatacttgtacctgcacaattttttgcatgcatgttttcttatagtgtcccttgtctttacagttactacaactaactatctgcccaattttcctagcctttttgctcctggaggaggctcatcagcttctcttctcctctttttcttaggtcttccaggcataggggctgcagtaggaggaattacaaggttaagtccaatatctggccatgttcattggatcacatccaat

SEQ ID NO: 189115 - DNA, 1215 bp, Cannabis indica
aaacctagctcatatatatatatatatatattattttgatttaagttaaaattaaaaataaaacaaatatataattatacaaataattgaatttttatgttgaaaaaaatattataacaaaatacaaaagggattagaaaataaaaggatagcacatgtattgtcaaattgaatatttaattaaaataatcttataattatataaaaaaaaagagagaataatgttgaattttttggcagacttatggaaaattaaaaataaaaaaaataacataattctaataattttcacaacactatataatattttatatcatattaataatttggtaaaaaaaacaataaattttaaaaaaattaacaaatattcaaccgatttagttctctagttaatatataataagaaaaaactgttactttttccttgatggggtgctaattacgcagtctatccaatgggttatcctgagaagcatttttgtataataatttattgcccatcactaagattagatagcattaaacggacccatgtgcatgagtctaaaattgctcaatgcagttgttaataatattccaaaatccctttgttgattttctataattttcagtttaattatttcttggtgggtttgatcgattatcttggtttttccacaaaccgacatgatcagttctttctacattatattagtatgtgtcatattattattgggttgaaagattcaattagataatattattaattaattacttaagcaatcatatataacttacttcactgatactaaagtatagtacgtatagctcctaaatcccataatttttcgatgtgttagattgattatcaatctatttcatgtcatgtatacttcattttttcatccatgagcaaaggagcacaagatctttattcatgcatgcaaaatgcatgcagctagttacaacgtacgtagtagatatacactgattgatgctctagtaattcatacacacaaaattataaaagtgtagtgtatattaagagaacatcatcacacctttattataacaaaaaatgattatagcccgctttaaataaacaaataattagttgggacgcgtgcaatcctttcgaatttctccttgtgtaccagtaagaacaccaactctgccgagcttggtcatggcatcagcgaaggccttgttgaatgctgcagggctggaagcgaagct

SEQ ID NO: 189116 - DNA, 2557 bp, Cannabis indica
aacctaagacctcaccgaaaatggacaggttaggaggaaaactcaaggtgttgctttccatcgtttcagtctcagcactctcaatcttaatcatagcagagtatcgaaggcgtcggacattaaagtgcccccgaagttcatgttatttacaagctgaccacaagccacagttctcgttcaagcgtgttttagctgataattcatattctttattcaagcatttcaagatcacaactgattctactaccagtggtactattccttttttttttttttttttttttttacttattttttaattgtttttctttattgaagtagacggttaaggctcaagagtagtgcaggagaaatgagttttcttgtaatgtttgtgaggtttttaaacagaaaaaagtttgaatttgcatccatatgaggctgagataaccagcttactggaatatccaagacttgaaggattacagttagttggtaagaatgttgatatgaagatgaatgagtcatacatttgggttgatactgagttggagttgaaggagcttgtgaccgtattgagtaaagagaaagtctttggtgttgatactgagcagcacagcttacggtcctttctaggctttacagctttggttcaggtgaatggaatattcattgtttgttaaatgctcaagtttcattgcaaatttgtttttgttttatgttgtaatttttttggtttgaaattgactaggtatctactctgaaagaagattatttgatcgacactattgctcttcatgatttcatgggacttcttcgtccggtgtttgctaatcctagcatttgtaaggtatttttcagttaaagttgaacaatttactcaagaattcgaggagtaagctcgctactcttttttatcttgctctggatcatgtttacaatctgaccagtagtgaattttaatgggaatggtcattccttctgtcttccttgcattcctcttcttccattccttcatttgattcttttccttaaggggcatttagatgttacggttgttaatttaagttgttgtgatgtaggtgtttcatggtgcagataatgatgttctttggctacaaagagactttcacatatatgttgttaatttatttgacacagccaaggttagttcaaaattttgagacttgtctaaatttatttaccatctacctacttcattatttatacaaatacacatatgcagataaaatatttataaattcttcatgttattgttctcaggcatgtgaggtgctgtcaaaaccacagaagtcactagcctacctactggagtcatactgcggtgtaattacaaacaaattgttacaggtgtggccctatttatgttgtttgttttgctccttgttagcctttcataatgatactttcaatcttgtaaatttcttttttcttgaatttatgtcttcacaggtgaatcaagggagtaaatttaaattattggttgacattttggtacgcaaggtgtagcaactccagaatacctaaactcactgcttaaccattgttttattgtatcatagcgtgaagactggaggcaacgcccattgtcaatggaaatggtgcaatatgctcgaactgatgcacactatctattatatattgcgaattgtctaattgctgaactggaacaacagaaaaatggtatgacctcaacatttcttttgtaactagtttcgactcctgtttttttaaagtagttggggaaagagtaacaatttaacatgtagttatatttccaattattattatggctgttgaacaagactaatatagtggtacgttctatgtgcttgagtagtatgcattcgctttttattttttctctcaaagaggaaaattctagttgacatagactgtacttaatatgagagatttgcatgatatcagcttagataatttttcattcttgatgaacaatgaaaattcagcacacatattattgattgggtcacatgctaagctaatctattgaaaacctttttgaaacctgcatgtatggttcctcatagaattggaatactaaatatattaatgtatcagagaaaacttccaccgatgacaaattccattttgttcttgaggctagtcgacgttcaaacacaatgtgtatgcaactattctcaaaagaaaatgaagcatctcctggggaatctgctgctttgtcaatattttcccgccgtctgaatggtcgaggcaactcaatagtatctggtggatttcaggtggcttccttgtgcaaatataaatattaattgtcagtatcatctcatccagttttgtaatgcagcaatgttttgtatggatttcaggatgtggtgaggcgattgtgtgcatggagagatttaatggtaatcatttttataagtttagctacaaatgatattactatcctgataaaaaaaaaagagctccactggaacaaatattataatgcatatgtttatacacaattggagtaaattctatatattgagcagacatgtattctaccaatttccaggcccgtgttcatgat

SEQ ID NO: 189117 - DNA, 742 bp, Cannabis indica
aaaaaaaaaaaaaaaagaaccccagaatgtgcgtggatttggtgttttgttcttatgatgctgcaatgttgattgttggtccatacataccttcagtgaaaaaagcatctaaaatcctttgcttcatctctctttcacgttcattttcatcattaagaaaaaggaaaaaaaaaaaaaaaaagccgtcgaaaatcaaagattaataaatttaatattaacaatacaaaaaatgataattcatctatttcaaaatcacactgctttctgtctaataaatgaggataaaaagtaatcgaaatgaaattgccatttgctgaaaatgatcagacctacaatctctttcgaaatagtacattcatacattggttctccaaattgggttcatgttcttgaatcttgtctaataaaataatatggagaagtaaatcagattatgttgactttcttagaaaaagttaataatataaatcattctatttattttattttttattcattccattattacatagcagaaacctaacgaatcatacaatatggtcattttactacacacattattattattatgattcattcttattactcgacagaggaggaaaaattacgagagaaatcatctgaagggctacaagcgctagctgaagcaggttctttgtaccattcatttgcttctcgagtcagaaagttggcctctgcgtataacaaaacaactttatacatcttcattttttagttattt

SEQ ID NO: 189118 - DNA, 3012 bp, Cannabis indica
attcatatattataggacccaaatgtcgttgtcgtttaagcaaagaagacatgtagtgatttactcttttaccctcgttcaaaaactcaacaatcagcccagctttgcgaggctgcagcctccgcgaacccgaaaacttgtggctttaacaacgagctgtgaactcgttgatccaacggcgggaactctacgcccccggtgtacgttagcatgtccttaacgtcaccaccaccagtattattattattattattgttggtgtcagcagtcaaaccaagaaaatccctggtcaatcggtcgcttttacgccacgtggcaaggtcatcggacgtcaacccacgtccaaggatgaactcgttcgttgtcgcgtgatggcgaccgttcatcacccttccgagctgatcagtcacgtgacccactgactgaccgtgaccgtggccctggacctgacacgagtgcgccccagacgccacggctccgactgtggcagccttctgtagcagcgcagtggccgataggtgcgctgacgtggccatctgcgagctgctgacgtggagggtttggaatggggagccaatcaaattgaagcccttctggcccggttgatccgccgggttctgctgcggcgtagagtctgggaaaatcatcagtggctgttgcgaatgtggtggcggcggtggctggaagtgatgattctcgggcttgatgacgtggagtagcggatgacgcggttgagtggtggtgctagggttagggttttgatgaggtgtggtgtcccaaatgtgaatgggactcggttggtttgtgaagttgtgatgatgagttgttactgtagagaaattagggaagagtgattggttagggtttgctgctgccacagccgccgcagctgctgcggcggagagtcttgcgctttcttcggctaaagcatcacaaaaggctctgtgggttatgaagctatcctttctgcgtaacacaataacatatatatcaatgaattcaatcgtataattaaaattggtgatcacttgaaattattgtgttcttgcatgtgatgcatggaagcttacttaccatagaaaaatagtgatatgaaaaaaaaaaatgttttttaagttaaaaaaaaaaagaaagttaaagtgtgtggctcagctcaatgtatatttggatacatgatgtcataaaggaaatggcaatgggtaatttttggtaaattgaatgaaacattaatattggtaagaagtgtactgagaaagtgggaactcgtgcatggaacacactaaatataaatataaccaatgaggaaaaagaaagaaactcaaagtaaatgcaaaacctagactatatctaagtctaagatatggatattcaggtcaggaggctagctaggaaatatttctaaagcaatatctcaccatatatatatacaatcagaaatattttcagatgttatcagttttcataatgatgatgaaattcagagagttttgtctgtgcgctctgcatgtattaataattacacttgcactatatacttttacaataaaatttataaataatattatattttttttgtgtcacgggctggatttctcaaccatttacataccaacgaaattaaccccacaaaagtaatcagtcatattgtttttttttttttggagacaagcagatctccatcattattttcgagactgcagtcaagatcttgaaaagtactctagctagctattaaagaaacaacttattatttctcaattaattaaaattgggtggattgagtgtgtatacgtatatggcgaaatgcatgcttataatttattataatatataatttcttttaattttaatgttattattttattttatttccaaaacacgaaaatgtacagggttcagatattattccagagatatatagctttcggttcctcttgcaaatgttctcagttttgacagatactttgagtttagtgttgtctatttcagagcaaacagatatatattccatgcaaacagcttaccactcttagctaataaaatattataattaccaaacaaataacctagcacataaaaatttccatatttgacaagaaaagaccactattaattttgtgttagatggagagagaaatattgacgatcatgaaaattaaaagagggtatttttgggtattgaaaaataatgtgtacctggagaaaagggttccacagtcacatctatactctctggtaccacaggtcttagagtgagccttccaatcagattgaacagcatagatcttagagcatttttcacacttccacttcttctctccatgttttctagagtagtgtttctttatacccgttagatctccaagagcccttgaagggtggtgatgaacacacgtggtctcagggcaaacatatgctctcttcttgatcatctctttgttgctcctttgtttaagcttccatggaaggttatgacctcttctgtgtagctgaaggttttggtctctctgaaaacctttgttgcatatctcacacacaaatctatttgtggctagaagtgtctttggggataatgcaatcacttcagcatctgggtctaatatagtataatcataattaaggtcagaattaaattaaaatataacattaatatgtaattcaaatataatattctataaatataagtacctgggtgtccagggagacttcttttcttcttgattttctgtggttgctgatcatcaatactaataatattattgttattattattattattaatattaatattattgtgatcagaaaagtgtgaaagtagtggattattattattgttattattattattaaatattcccccaaaatcatggagtctagtaccagaagaaatactagcagcttcctcagacaaattagaagttgaattagacatggttacagaaaacattgcccttggaagaaaactccaatagagaaaaacaaatcactatattatttttttataataaaatt

SEQ ID NO: 189119 - DNA, 3970 bp, Cannabis indica
agggaaataaaaatcagtagctagagaaattaacttaaaggttgacttgcgtatctctaattgttctcctctaattctcagtggcttcactatgggaaaaataaccatgagactgaatggtctttgaaaatcatagaagattataaccagtctggtcttgcaaataacacatgactaccatcaatataaccttaattcattttcaattggggttataaaaaatcctaaaacaagaatctcttaacttggtatttccaactttgatatttcataatttggataagtactcgaaattagtactcaggagctctttaatttttcactttgcagtgtgtaagacaaaataatatagtatagcactttcaaccacgaccttccttatgagaggttagatcactaaaattactacagatagccatgacaaaatatccacattcatttggtagatttccacaactagaaaaaaaaaaactaggtaaaaagcttagaagactaacctgacaaaaacacatccttgtagtcctcatcatcatatataaactgaggtggatctggggaaccgaccccgacaatggtgcttccactgcagcatgcacgatgagaaaatgtaaaattcttgtgacagatgatacaatgaaactacataacaagtccctcattcataaaattcattgatgcaagcatcttgatgaagattatttatgaacccttatatacaaaaggacttgcaatcaatatcatcagatgattttttttgtttgtttctatagttacagggttactaactaaatcttctcttaagaaatctaaaccttattgctcaattttatcagaaatatttgaaatttccagatgctaactgcacgatttaattataagcttagtaggaaaatgatcatccagtaagaaaaatcataacaggagacagacactctataacagtatggccaaatggtcaggtcaggagaagtcagtttcttacttacccggttttcgatacccaacgagccagatgttcctattgactttactttctaataaaattcatatagtgaaatgcagtttaaacatccctgaactcatatacagtttaaaatccatagctcaaaatttccacattgagcatatgaacatatgagcaacataaagccatgagagctagaaatccagtatttatacctcccagacataaaaacagcatcatattgtccacgactagctgcaattatacgctgtttcaatctcttaagagatggaagaacttcaaaggcaggaggttctgcaaataaaaacatcattagacatgtaaagaaacaaggaatacttctaagaatgcacatcgaagttggaaacttgttgagactcagtacaaactcaagttagagtaaaaaagaatctaagcagtaaaactaaaatattttcttgacctccaatgtgtgttgagaaaaacatgaagcttcgacaatcaggcacataaaatattcaaatattcatgaccatccaaatattcatagcagcgtatcctttaataggtttattgcagtgtagtatcacaaatgaaaagggaatatttacttacctaagtcattgatgcagacatcttgacttattccatcacttgagatcttgtggagcaattgtaaaggatcgctattactggttttatccaaccgaaaacgctgcaatacacaaaaaagttgccattaaaatgtatcaaaagaaaacgatgaaatattcaccatgttaaaagagcattaccttataaacttcggctgttgaacatgcttctgggggctttatgagaaccatgggaatgtttaatggtacaggtggtagaatatcctgaacaacctggacaaccaaagaacattttatagcagaattcatcacaattactagacctctatgcgaactcctttatttagattagacaagcatacataggtaaacaaataaaaaacataatgtcagattcaaactcatagactgtcactactgaaaaccctatgtagttatgcagtagtaacattaaacacaagaacccatgacatacagaattatattgcacacactgcacagctatatgcatctacacacaaattcctaggctgtatactgtgttccctcattttgactggttctgaaagccgatgcaacttctcaaatatgagaaaaaagagccgagagaaaagtacaatagggctttccatttaataaaaaagacagtagccaaattatggattttttttgaaactggctgcttgctttacactacaatatttgagcatgaaactatggcaattggtacccaacagggattcaaattatggaaactttagcagattcatctttggcaatcacagaaactaacttatgaaagcacaggtgcagaaaaaggattaatagattttcaaatgaatattgagttgtaaaagaattataatatctttgtttgaacaacatacagtaagataaagacctacctcacctcgacctgtacaataggctgccccttgggagaaaaagaaaggaacatctgaaccaatctcacttgaccattcttgcaattccttttcagtaacaagacaaccattgaactgatttgctgcccatagggctgttgcagcattgctgctcccaccacctagccctgctccagtgggcactttcttgtcaagatgaatctgccaacatgttaaatgacacaaggtatcatcaatcaatggcagctttctttaaaaacaaaacacaagacataaaactgttttaggggtctcttacccaaaagtatttgtttgtaccagttttctttcggtaaagattaagggccttgataatctgtacaaaagaaaaaaagtcctcttatgagtgattaaaaacatcatcatgcaacaaataaaaagcagcaaaggaacattcatcccttaccaaatttctatcatcaagtggtaccccagaggcattcgttgacaaagaatctttctttgttgaaggagacaaagagaacttaagcacatctccaagacttatcacctaaaatttcaaccaaataatcacatatgtttcatatattttccaacaacttaaacaaatttaagtaaaacttacgtgaaagagggatgccaaatcatgatacccatcttcccttttgctagttattctcaagaaaacattaatctgcattcatgatgagacatcaaaaaactgctgatattagcataaatcaagaaacccatttactaaaaacaatgacaaaccttgcaaggtgagaaaagagtgagcctagaaagaggcgcttccttgtccactacatcagccaatttgtttatcctttcatcagcatcataaactatctacaaccaccaaactaataattaaaaaaaggatacaaatttatacacaaaaggtaataaatgatcaaaaagaataatctttacaagataaagactgaaaattttgaagtcaaaagggtgagaaggaatgggagattccaaaacaaacctcaacttgtcttctttcagaaaccacaattttgagagatgaaggcctcgaaattctagatttcgaaccaaaaaaacaaaacccatttgagtttaaggaagagagacccctgttcctaaaaggattgggagaaagattaaaaacgttgttgtggcagagaatatgagaggaagccattttagttgtggagaggtaagtatgaactcactaactatcaaactgtgaaaaaatggtgcatttgaagacttgggatttagcggtacttgggattcagtgggcagacagaatcaatctcgaagctattcttcattcattcattcattcattcattgatgtggtttggttgaaggatgactctctcaagaaaacagcgcaggttgttatattccaagagaatttaaaaactataatataaataataaaaacaacaacaacaacattttacgggaaaattggttttttttttttt

SEQ ID NO: 189120 - DNA, 2785 bp, Cannabis indica
ggcacgagcatgacacgatcaggtatacgaaaaatatagagtttaaatacaatgcgatacaatgctacatatagatatgatacgataataaaatatgtattgagcatgacacggcaacaaaaatacaaaagtataatatttattaattaaagaaaaaaacacatgctattttctaaataaagtttgttttttctatttttttagaaaagtatatacgacattactctaaatgagtgttctaatacccctgctatatagtttaataggattaatttttagtttaattttttttatataatcgtgtatgttgtaattatttagggttaacttgtaaattttcaaatagtttatatagcaattaaaaataaagttctaatattttattgtatgtatgactattttttatgcgcatgataaataattatttgaatttacattcgacactataaatttaaaatttttgaaaatttacaaatagtcttaattaactagaatgtacacgataagaaaaaaaaaaaactaaagtaaaaaattatcctgaacagattagaatgtcaaccacaacacacgtctaggaggtatctatacatttttcctttatcttttatgtgtttcaatatcttggagatcttttaaggttcaaaaatatttatttcagtagtaactattttttccttatattccataagtaaatgtttaaacaataaattatttggaatttttaaaaataaataatcataaataactataatgtacaagctcatgtaaaatgaaaaaattaaattaaaaaagctcccattaacaccaaaacaaacacccctttttagaaaatgtactatataagtttattcaaaaaataaaatacataataaatttttccaccaaatgttcataccatcaaggtctaaacaatgaattctagtaatttcattataaaattaaaaatgaattctaataatttcatgataatatttcaaaaaaaaaaaacaaatgaattataataatttcaaaaaaaaaaaaaacaaatgaattctaataatttcttaataatattttgagtaatttgcggtgtaaatatttaagtttaactcataattacagataaatacttaaatttaatatttgacagtaataatatctaaattatattttagaaaatttcgtaagtacttgacatttacttattgatatattaaaataaaaaaaaaaaaaaaatttaattacttagactaattcaatttttcaacgcttgtaaagtatttaaatattcttcaaaacaaacataatttctaatataactataatacacaatattatataaaaagaagtgggatataatttcgtctttacaacacctaaaaaatttcctataaatatatatatgaaaaaaaaaaataggtaattattgtttttgattactatctacaagtagttatatagtatttttggtacacagataagttgcaagttcatgtattttaagagaagtatattaatatatggtgatatattatttattatatagagtagaagagggatctctcccatataaaccgcaacatgaatagtcactttccgctttaagtggggggtgaggtggggtgggagaagtacacttcttataataaatgtgtgttagattctctatttattttagcattaaatctttttttatgattgttatttatgtggaagttatttaagaccacttataaatttttaaaaaatttaaaatatttataggaaaattatcctctatactgtttttttaatttttttttaaaaaaaaaatttacagtttgagtttttaaagtggtttctatgtagattgttatacgattttttgttacaatttaagttgcatggctaattgcaataggggtttctatgtataattctataactataaatctgtaaatgtaaaaaaaaaaactgttttaaagtataataatgaaaaagtctcatatttatatttacagagtgctgaaaataaagttcaaacaatttcttaccatatgtattcaaatatacaattatagtgtagcaaaatatttaaatattatttttaacactataaattacgaaatatgaaaaaatttaggagggtgtagtgtaaactttccacttcttatacaatcattattcatctacaatcatgatgaataactaggattatattcatctatgattttatatgtacaaaaaacatataattatagggtttgatgaattcattacataaacatacttattattgttatttttatttttatgtatgtcactatgtaagagagatgatgaagaaactaaatttggaaatgagacaagttgcaaccaatcaaaaaccatttcataccaacccaatccatacttgttttgagacaacaaactgaatttggactctcctactcattttttcttattcttcttttgtcttcttatgtcatatacataatttgataattaacaaacactcacactctttcttacacttatatatatttatatattgatacgcaataaaatctctatttaaaaatattctattaaaaaataatttctaatttattatatacaaaaaatgaaatctcaattaattagactaattataaataaaattataacttttaaattatactttattatacattttctaagttctgtattacaaaaaatactatataaaaataattatatcttaagaaaaagatacatatataattaataaatttatttaagtagaactaataattttattctaaattgtaatacatgtataaatatt

SEQ ID NO: 189121 - DNA, 1984 bp, Cannabis indica
gttcacaaggcttgaattgctcagcctgaagcttctcacacttagtattggaataatgccttacatgaaattttatctactttttttcttgttgcaaatgcagattagtcctgattttacttgtgatcaatttcaaatgaaacaatcttgttttgaatcaggagtttgagcccagagaaacatggtgatctttattttgtcacaactgctgtggtgaaagaagcatctgcattgtggtcaaggaagggctttgcctagcgaaacgatgagacttgctcaaacggtgataatatgtacaccccatttgtaatcttatatcgtgtcatatgaatatatgatgtatttactttcttcactatagtttttttcttaaaaatttattattcaatcaatagcttcttggcaactttaaaatcctggtaagttggcaatattaaagagcctaaaggttttgctgatgtgcccttttcttcattgagcttccatattttcataagcaaaattcatagatagatgaaatagaaaacatgaaaattaaaatgaaatagtaaagtcttgagcctatgttattgatcatcatcaaaagatttacacgaataatagaatacgacattcatgaccgtctcaaaaacaagcactgacgaatacatggaaaccaacataggaccttcccataaattaatccccttacacaatctgaactcaaaaacacactcaactagtctaaaacctacattgctcaacaaagctatgaccaaagctgtttgtcgcctaccttccatgagagtcttggccttcagcaatgactcaaatccataacactctccctcaagtactgatataaccctagctaggttccccagaaccataacatgtgcaaatgccacacagtagagtatccctaagactccaaggacacccgagaatccaaatatttctgaacaaataccaaatgcatgaaatatctttggcactattacaagactgagaatgaaaattccaagtaggccaaaaactatgaccagttcccagaaagttgtatggagaagcttaatccatgccgaactgcttctcataagcaatcttcttccgtcaatacttattctgctgtaaatgtctgagactgcttgaactgttgcggctctgcctagaagagagaaagttatagatgaagggaagcatataatgatgtgaactatggttttggagagcatggtaggcagaggaccaaacaaattgtgggttatagtaaatgttgatgaaggtattttggggaaatggtggatgagaaagtgtgagatgaaaagtgagatgggtagaggagaaaaaaggaaggtggatatggaatgaaactgagttggatagagaagtatgactctgattgactctttgaatatctcagctgtgttcatcagatagattggatcaagaactcgtgttgttcttctagccatgatgtgcaaaagtgggagatcatagagattggtgattgagaattttgagaggttataggctatatgagttttttttaaaaagaaatcaaagtcacaggttaagataaaatatggcattttggttgcttgcattctaatatatcatgattgaaggagtttgtttaagagtggtcatatcattatcacagtttcacactgttatattcatacaaatcactatcatttcggttagttaaattataaagctaacaatcatgagcagcgtggaaatatgctgaaaaagttcaagattcgtggcacggaattttctagatgtattcatttcttttacatgaaacattgttttcctttccttgtccttagccttctgttttttcagcaaacggaactttcttacttttttggataaatactaaatactaatactttataataaattgattcttcaaatttactttttccaattagttttctgaccctcccacagaatgaatttatacaactcttttgctgtgcttgagatattatta

SEQ ID NO: 189122 - DNA, 1235 bp, Cannabis indica
atatgtatatataaatagaaggatatggttcttgagaccagctcatgtgtgcactgcgagcagtgaagataagatggagaatttatactcttgaaattaatgagaagttttgtcgttttctttttgatagagaagtcgttatcatcaaatgttatcagatttattattatagagacgtttgatttagtttaggcatgtaaatttgatcgtaccttaattagtcaaataaattacccaggatatacacaaatatatacagtacaaaaatctttacaattgagttataagatgaaatttgtataaataaataaataagaatctgttcttgatatgtattgaaatattaagtttttcatcataaattcacacactataaaaaaaattatcaatgtggtactgtagcagttgttcaattgtactttaaaattatttcttaatttgcttggtgaccagttgttgtaggtttatatgtattgctcggctatgcaaatgaacaatagggctttggtgcctcgggcatgagtgtaacatgtcatgtcatcacagctccacaaaagtggctaaaacttctaaaaggatgtccaagaagtaaaactgcctcttttatttgaggagtatttagaatttagaagtttattgatactactacaaaatgtaattttagtggttcgaggtcggatcaataaattaaaaaaactaacactatagagtaccatatattttaattagtactgtcgggtttaaatcgatatttataaatcttcaatgcactacaacaaattttgatattactggcggagccacccgccggtaataatagaggagactgccgacattaattaataccggcggattccgccagtaattatccgccggtattaattgacacttaaacgtattaaacataaaagaactatgaataaggaaacaacccctcaaaccctagatcgatatcggaaatttctcgcattctcttagccttttcacccaaacctcaaactctcgcacttaaactataaaaaattggtagcttcaaaatgattaaaaaaattagtaatttaaattagttggcaacttttaaatgttacaaattaaattattaattttaactaattggaaactttataacgattttaacaaattagaaacttgaaatgataaataatattgttaatttattaaattaattggaaactttaaaataaaaataaagattgttaattttaagaaattag

SEQ ID NO: 189123 - DNA, 4046 bp, Cannabis indica
tgtgcgaaaatcagaagagagttatgaaactgcattctcgaaaaatgagacgatttccccaagacaagataaagaaatggagggttgctctagccacagcagctaaccactctggatgggatgcatccaagttcaggttctctactcttcacttttctaactttattttgtattagttactcagagcatcttcaataggggttgactgcgggttcggattgaccggtgaactcgttaatttactcgttaatttatttattttttttaaataaaattaaattttatgtgattttttctatatatattaaattaggtatataaattataaatttataataacacccataagattaaaataaaataaaaaatacattaattttaaatctaaaatacaaaagttaagttacaaactatatatataatatattatttatatattgttatttttaatatattatttatgtaataaaaataaaatgattagattttaaaatttttttaatttttaatatactatatatgtaataaaaataaaaaataaaaagtgatcgagttggcgggtaggtttggattctacttgaaacccaacgaccataacaaaccaacccgcaaacctgtccgatggtgtaccgggtcgaacccgactcaccagaacagaatggagtttttaaaatttttgagttgagtggatcggatccaggttaaatccggttaaaatgttcagtcataatcttcacaagttaaattttagctaaaagttaaaatagagtcattcttactttaattatatgctctctacttagtatttgattattattataaaaatatattataatttaatattaaatataaaatagtttaataaattaatgaaaaagtaataatgttttatgattaaaataaagctccttacatttacatttagagagctttctattctttatctattatagagaataagttatttttttaaaaggtctcttggtcctagctaaaatattgtcacttatattgttttactagtttcgaattcgaatttgagattaattaactatacgtacatctaatttagggatgatgccgacttagttaaagacattgtcaaaactatacgagggaaaatgggcaaggagaccgaccctgatttcgataggcttcttgaagaactagagactaagtccctccctcttgctgaggtgcttattgatgcagagcataagcagatgagcaacccaggagttgagaaatggctagacaagcttcgagatgctgtggaagatgcggagtatctcttggaggaacttaagtatgatgcgctcaaactcaaggtggagaaagagccaaaactgaaatcaactattcaagaaagaaagaaagatatgaagaagattctagagaagttggatactttcaaaaatgataagttcatccttgatttgcaagcaaatgctgaaaaaatcccattgcagaggccaccttcaacattctccataaatgattctgaatttttcggcagagatgatgaaaaggaaattttgaaagagatgttgctgtcaaatgaagtggatggtgaaaaaatatgtgtgattccaattatgggcatgggtggaatcggtaaaactacgcttgctcaagctctctataacgatgatgaagttaacaatcattttgaactcaaagcatgggtttgtgtctcagatgaatttgatgtttgtaagataaccaaaacgattcttgtagcagtaactagaaaggcttgtgacattgagaacttgagtgtgctgcaagagaagatacaaaaagaattggacaaaaacaagttcttgattgttttggacgatctttggagtgaggactacgatttttgggatacattaaggatgcttttcaacgtcggggcacaaggtagcaagataatcgtcacaacaagaagcgaaaaagttgcatcaattgtgggaacgactgcatctcaccatcttaatgtattaagtgaagaagcttgttttaaattatttttcaaaattgtaagtggcaataaagaatttactacaactgattccaacttggggagaatcgtacaagagcttgttaggaaatgcagtggtttgccattggctgtgaaggcaattgcaagcctcttacgcgtcacgaaagttaaggaatggagaagaatagcaaaaagtgatattttggatttaccagttggagagaaaaatattattccagctttgagattgagttaccattatttgccattgcacttaaagcgatgcttcgtttattgttctttatttcctaaagactacgaatttaaaaaggaggagttggtcttactctggatgggagatgatttgttgaagcattcaagtggaaataggactatgaaagaagtgggatatgagtattttgaagatctagtgtctcgatcattttttcaacctgcaattgcaagtcgttcgtacacaacaaagtgtttcgtgatgcatgatattatggttgatttggccctttttgtctctagaaagaaatttatttacacagagaaagatccaatgtatgacattggattgatgaagaaaatacgacacattgcatttgaagtggacatcaactgcaatgcttttcatgagacttgccaattaatttttgaagcaaatcgtttacgtacatttatgcctgttactaaaaagtattatgacagttattcgaataaattgctgcaagtacaagatgtgatgaaagatttgatgaaattgaggcgtttgagatttttatctttagcgcgttatgaaaatgtcagcgagttgcctaattcagtaggtgacttaatacatcttcgctacttggatctttcttggacttcaatcaaagaattgcctgaatctgtgagtttgttgtacaatttacaaactttaaaattgattaggtgtctgcaactctccaagttccctacaaatttacatcatttgattaatttgagatatctttacatgagtcgttgtaagtttagtacattgccaccacttggggaattgcctgcactcttgactctttcgattgaagactgtgcaacagtagaggtggtgggtgttgatttttacggaactagttcttcccgatcatttccattgctggagtccttgacattcaaacacatgcgaaactggaaagaatggtcagcaccaaaaccaaacatggaagtgtttccgaagttaacatcacttactatgtccagttgtgatagtctgacgggagatctgcctcgcctcctaccatctttaacagagtttcgtatagattattgtccaaagcttgcttcattactcccagatatgccaaacgtcactagcctacgtgttgaggagtgtgacatgattccaggactcaaatcatgtaatggcctccaaaattttgattatttggagtccttacatctggatcattgccaaaatctagaatttctaccctcctctgtttatgaatctctccaagaacttcttgttgtacgtatctcttctagctccttcaaattgctttctctagattactttcccaatattaggaatgcctttgtccatggttgtgaaaatctggagtctttcacgctattatatagcctaaactctctatcttctctctgcatcgaaaactgtcctaattttacattactgcctgatagcaaccttcattgtccagctcttactaaactctactttaattgttgcaacaagttaaaatttttgccagaaaagttgtctagtctactcccttctttacaagtactagatattgatggttgtccagagttagaatcacttcctaaacttgggttgcctttaagtttgcgtgaactcaccattagaaattgcaagacattgattgcatctagaaagaattggaatttgcgagcacttcctaatctgacaagcttttctattggaggttattatactgcggatatggagttctctcttcggacatggtttcctattgcagattattataatgaacgtatggagtcctttccagagccagggttgctacca

SEQ ID NO: 189124 - DNA, 1652 bp, Cannabis indica
gttttgccgcaaattactctatagaaaatagcaatgctaatacacactaatacctctttttatctgatgtgcttagtactacacactaatacaaaacattttgtactaagtgtcaaaaggacgcacctacctctttttaacatgattcaaggttaacttcaccagatcctataaaaaaaaattgggattctatagccatgccctgcttccattactcatcagacaaactcttataatttccgttaaagccctcactccctcaataagaatattacagaataaagatggcaccaaagactttcatttccattaaccataccaccattttatcacaaatacagggcgatcgctatcaacagtctgttgcagtgcataggagcaaggcttggagctttgggagataaggataacccagttgagaggtacctgaggcatttgcgggctcaaggtgaaagaagttgagaatggacggcttgccatgttctctgtgttcggcttcattgtatagacttgctatagtactggaaaaggttcctcttgagaatcttgattcttgcccacctacttcatacctgggaggtgaaaaccatctagtcacacctaccaaaagtaaacataacatagaaacaaaaaccttcccaacctcttataaaatatgcaatcaaatccattgtataacatgtaaattgtggaaaaaaaataagatacaattggaacccaagttacaactaatacaggcatccaaaagttctcaatatggtcaaaatatcaagatagtgactaagtttctatctggcaatgagaaagaataaataaaaggaactaatacatatagatagaaaatttcaagtcactcggcaatgaagagtacccaggaacgagtataaggaatgaccaagtgggcaaaaagcaagccaaccgaatcgcttctgctttcatgaattcatttatgagttgcaccagaactcagctatttgcattcctctccctgctactgcaatctgatagtatcccctgtatgacaaaaacaaatgaggaactttatgtcaaagaactaggttattaaagcaacaaatattctttaagtaggacggctgttaagacaggtccttcttacccctatgttttgtatgaaggaaagaaaaatggaaagagagaaattgtaggggagacagaaaatttgggtgatagaaaataaaatatatttttctttatcttgttcggtacaaggaaaaaaaaatgatgtaaattattttaaataaaaaattagattaatttagtaatttggttaaatatacattgtaaacattctctttactttttttttccgttcactttttttttttatcaagaaagagaattcattaatcaactatcagattaccaccaaccaaccaaacaaatttctaattccatccacctttttctccaaacttttccttcccttttctcttcaaccaaacatagggtaagtacactgcttacctactgcagatcctagcatccaatgcttctggctctggcacactaatgatgacataggccttctctgttattttaccttgctccccaagacgccaacaacggattcgctgatctagaccagtggaaaacacccacaaaccgtctgtccagacaccttcatgaaatta

SEQ ID NO: 189125 - DNA, 2528 bp, Cannabis indica
aaataacaatattacacctaacaaaaatactaaataaatactatatattacgcataaaatattgataagctttcactagtttttagaatatctccaatatgatatttttatttttagccaagttttaacgaaaaaaactaaaaattagaaatagaatcattttattatttatgctctctattttatttagtacttaattattttaataatattttataatttaatttgttaaatataaattaatttaatttgaaagagagtttatagtcttgcagatctattttgcttgggcatatgctcttccataatggtttctaaaacttttctagaagtagtagtatcggcggccataacatacaattcaattggattagacccaaataactgacttttatgcttaaattttcttctcaacacttgaaatctcttttggattttgtacatgatttcagattgttttgacaatatcttgcattaatattggttaatcagatggcctcatcattagcagctcgaaacaatcatcataaattcatagccaacacatttgtgttggttatgcttttaccaatgccacattgggtagctttgttctatctagacttatgtggtgtagtgttttcacaagcctagcttcttcactaaaccctcccaaaatgaccataattggagaacaaaataaaaccatttgctagcctttccccgttcacccgacggctgttcgcaaattcatcgcactcaaatttggaatgaacaaaaataaaagtttactagtcaaaaaatttacacagaaaaaagaggttaatggtatgcaatgacaccctattaaaaatacacttagtacccattttcgcatgtagatatgtctatgcaaaagttcataaagctttttcagatcatttggagttgcctattaaaaacagaagcataatgattaaaacaagattaaaaagaaaaactcacaagaaatatcaatggcaaaatatgagacaaggttaagaatataaggaaaaattatagttttgattatgctgatagcttagctaattatcaaaaagagaaactgaactgcatacaaatgtatgacaagacaacaatctattataaatcaaaatcactactacaaaaagcatatgattaccaaaccaaaaagaaagaagtctcaaaatggaaaacaaatttgacgaatagtactcaatactccacaactttgtcattccaaaaaacaagtttcatgcatttcaatacttgattggagcaataatttcaagctgaggacctagcttctcctcggctatcttctcggccttcaccctaagtttattcaacttcttcttagtctcataagccaactgagacctctcctttctcttcttctcaagctcctgtcgaatcatcaaaaatcaacaaatcaccattaccaacatgttaaaaagctttaaacttcaaaatcgacaaatgggaaaaggaagtaaaactgaccttgatggtgtcatagtgattccatccaacctccgatgaaagctgacccaacaagcagtacttgtgaccggcttgaagcctcaaaaccctaataattgaacagtttaaacatgtcatttcccttaatataacaaaacaaaacataaaggaaaaacagtaagaaccccaaaataaaaaacactcacttgagagcatcaggaatgaccattcttttgattttgtcatatggaggtgggacaccctcataagccttcaaacgagcaagagctgcagctcctctcttggtcttgtgtggaatcattctatacaatacccattccaaacacattagcaaatcaaagtaaagtttactttttatatcaatcaaaactaggaatatggaaaatgtaagcaaaccagttataaatctttcaaaaactatagccaaagatacaaatgaaaccttaaatcatatctcatataacaaatcatttcagctataatccaaaactgaatcaactaaatccaactgaatcaaaatattgcaatctaaacaataaagttagaaatatacaaataagagcagaaaaccatatatcatagctacacaccaaaacagaacaaaatctacaaatcgcaatgaaatctggattgattcaagtaaagagcttaccctcggattgtacgccagagaatcttagcgggagccctgaaatggataggaccatgagaaggcttggtgttcattctcttacgaagaaacctcatgtatttcatcttctgacgaacgagaccaccggacatgcagatctcctcgcaccggacaatgactaccttctgtccattgagaagctccttggcgacgatggatgatagacgacccaacatgtggtggcgagcgtcgatgaccacgcgcttggcgcaaatgcctgaaccagaaaccatttttgctttgctctgctaaccctaagcggctgagagagagaaatgaggttagggaaggctagggtttttgggttttggattctttgctcctatttatatgtaatgccaacctcattttttgc

SEQ ID NO: 189126 - DNA, 1143 bp, Cannabis indica
cacaaaagagactgaactcactccgccctttcctctttccctctcatctctctctctctccgttgacggcggcgtaaggtctccgccggtggcgtcccatccgataaggtataaggtatcactctacttcaactactgattacttactcaaattcaaattcaattcaattcacaaatttgattttaaatggctatggaacacaatgaatttccttctgttgttttgttttgttttccagattctttgattgctgatgttttcgaattctgatcttacaatactaattatcatctgataatgcattgatttgcgtctttttcagattcttgttagattattatttcgaagacagaatggtttatataacttcttgggacgagttcgctgaccgatctctacaaatgttccgtgccgatcctgaatctgtcagtttgttttctcacgaattccatctctctttatgaatacaatgctccaatttatgttaatgttaatattgtttatttttttccctttttccaaattgatgtagacacgatatgtgatgaaatacagacattgtgatggaaaattggttttgaaggtcactgataatcgagaggtactaaattatctttcttgttggattattggattgattgattcaactatgtcaatggatggaaacccctttaagtccacctctgggtttcaactcaaaacacttaaattttgattccagttttttagattattaagaaagcagatgctactttttaaggattattgaaataagggatactttatttttcccctaaatttctttactaaagaaattacactgcttcttttgtattttttagttgtttgtgtatttttaatatgattgcatgggcatcacactgtcatttattttttggcaagttaccatgaccattgtcttagtattgtgtttattgttctgccatatatgtcatatgtgattggtttggtaataggtacttccattgcttcttttggtattgatattcataaaatgttgagaaatcacccattgctcttggtttctctgtttagatacttagtaagtgattgtgatagaacaattttacttgctgaaaggaattttagttagaaaagtacaatatgttacttcatactaa

SEQ ID NO: 189127 - DNA, 558 bp, Cannabis indica
tcaaaaaccctaaaaattctttttcttctccatctactcactcggaggtgttgatcctaaatccctaaatcgatctactcacatatcaaacaagtgctccccacaccaagaagcaatctccatcgttttagttctcttttagatttgtaattggattagtgagaaaattttaaatcttacattggagatagtttaatatacgcatcaagttaataataatctgaaatattatttaaggacataattaataattaattaatggatgtgtatagtaaatttggaggtgattgataacatgtaaggggacattaatagtaagtgttgttaaaagtatagagagttcacatcaaatctacaactcagtgccaaatgagtggccaaccaatatacactttaaatacaaacctaccctctttacaattcatgatgcatgtatacaagaaaaacagactcaatctaccgacaacatttatcacggcttccactggtcataggtaaattaaaatttgtgtttaaggcccacttaatctaaggatctaaaaaataatcttctttttt

SEQ ID NO: 189128 - DNA, 1792 bp, Cannabis indica
atttagatatgtggaaaatatgaaaagagtatattggtgcacactattttaggaagttgcaaccaatcttttatatgaagtaagtgacagcggcttctgtactagttttaaagtaattatcttcattattttactatattctattttatatcaatttttatattgcatcatactttaattactcaaaattatcctttacaccattaaaatactaaataaatttaaagcacagactattcagtataagtagaacaaattgtattgatttgaatacattatatatacatatataacttatgatttaagaaagtggaagctaatttgatcacatttagggccctaatcacatttagctaaaaataattttcgagcgaagaatctctattataaaatatgaggagtgagtgtatgttgaataaactgctagtaaaaataaaagagaaacgaaattattaaatgaaaaattttgggttgagtcgcggattaggtcgcaagcagtcggaatttgccgatcgtctacaggataaaacagtccaatcgtactgtatcgaaatctcactacactgtagagtagtgtcgaatacacccaaagaattttgataccgcatatggaatttacttatttatgaaaactgtattttttcgatatggaaaagatgtattcttcccaccgaatggattgaataatcataacaggaagaacgtgttttgaatcgtggggtgtagttgattggtttgaacatgtctcattaatgatactactaagtaatcagttccaattaaatatgtttctcaattaaataaaaaaaaatgattttattaaataatttttctgtaaaaataatagattgtcacaacacttgtgtgagtgctcacccattcgcacaaaactaggtactctagtctttaggacccaaatccaaatgacaaagttgcactttatatactcttgtaaataagggttcatattttatgtgagactcttttcattttacacctagaacacatctatattttgttaaaagattcatcaaaattccaacagtgtgttatggaaacatataatattacacagaataaaataaattctttaattatttgatttagctgccttctaatttttgttgatctcatactttgttcaaacaaaacattagtacaaatcattatcgcgcgagaaagtcactaatttgataaaaagagaatcgatggccgagcaatagtctaaaaagattcctccttactgtttatgtatttttatttatttattttccttcaataacgggcaaagatctttaagggacaccttatgttaagtaattatagataattgaaaaaaaatcacaaaaacaattgtttgttttttaaaatatatgtatatttgccccactacaaatatgcatagttggttataataacaaatgagaaaccaaaagctagctacattctcagttctcagaatcaacaatttaaatgttagaactttgaagattgatggaatggaacttgctagctattattgatatatgctgttatatttggccagctaggctaacgtgcttataataattgcatcgactttcttatatatataatacacgaatatctccaagatctaattatacgagataatataaatctgtacttcatgttactattcgacactttggtgaattataattaacaatcgggatcacaatacacatatatcattacgatcaaactaattataatacgtgcctaggtagataatgttatttttcttatacgtggaagaaaaaatcgtgaaaaa

SEQ ID NO: 189129 - DNA, 3241 bp, Cannabis indica
cattttgagagagagagagaagttgctccttttcccataataagacaaaataaaaaatcaaaataactacacctttcaggattgacacactaaaaatgtcccaactctgcgatttacaagtgtggaaaagagaaaacaaactctcaactaattacaaccaaaagcatcatcaccaaatgaaaaaaacaaaacaagcaaaggcaaaagaaaaaccagtgtaattaattacacacagaagagaggttcaccacgttaagtgaaatcttgaatgaacattattacagaaagcaaaagaaacaaggaaaaatcatctttttccagaaagactgaatgagctgactttcatgggagttgcaaccaccaatggagcttcaggggaggagtcgcttgcagcaaacttatcgtgcatgaaacgactctctacaatggattcatccttcagtacaatcttgtaacagtaacagctcttaaggccttgttgattccggtaacatccatgtgcggtgttcttcacttgctggaagtcccaaatcacactgaacttgcccactgttgcaaccagatgccgctcttgtttaccattttcagtaacctgtgaaaccaaaatcacacgtgagccattaaaaacagaaaaatacctgtttaaattcatttatataagcaaaaggaaacaaaaattaggaaggatacacttgagattttaaaatcaaaacaacaagcacaatgttgtgaatactagctaccaacgagcataatcaagctccacagttacaattcatcaacataatccatgctaaaaacaaataaggatgtggaagctataaacgtgaaattcatcaattatcaacttcaaagagtgtgtgtgtgtgagagagagagagaagagaaagtggttgttgtacaatgctcaatccttagttcaacatggtcacttttgtgcctagaatcctcttataaacgcgtatttgagctgttccctaaagggaaatcacctccaccatcctggccacatttagggctccaagaagaaattgtatttcgagaagtaaagagcattcccaatgcatgaaaagtccattttattttatgaggtctaaagagactgatgtggagctatggaaatagtttcaatggatagggagacatcatcattgtaagcaaggtgaatttctcaagcaacttaggatataactaaactatgctactgagtatttagttaaacgctactggaacaaatagttttcataatgctaaggaaatacatatggtgatgaatttaggcaagttcttaataaaataaccacagcaagaaactctcattagaaacataatgaaatgaccgagaaagctgaaaataaagaaagcagctacaaataaaaaaaaaactatgtagttattgagacaaaggatagtatgcttacccaagagaaatgacctccatgaaatttattgtctgagccagccaaatgtgaatccagaggagtcagcttcagcaatctgggagccggtatcctgttccccatccgaccattaaatccagtctttgtctttccatccttgtcagtgaagagagtacatataagaaccaaataagtatcagtggttcccaagatccacttcccatcataagttacatcaacattagtaatgggagaaccaagcccaggaaaagcagtctttgcttgccgcattgaggtcttcgaatacaaacgtatcttcccatcaagagacccaacaacaatagacccatctccggtggtggcaaagcactgaaaattcgtcccacgtgagaactgatgcccttggctccaatgcagaacaggagaattcgaagacgcaatgttctgaacaattcctttgcgatcacgcatatcccattgacaaagcctgttatcatccaaccccaaaaatgtcgattctgaaggatccaattgtgaccctttagtatcattagtgatatccctcattgtaatttcggtaccatccttttcaaacttccagtcggtgacaatcttccctgattcgatatcaagctgttgaagccctgtggtgtgaggtttcccttccttgaatggactcatgagaagcatattagtctccgctctcatgagaagggccttattcggagtcgattgccccaaacccaaactggaagaacctccacgcgaattcccgctatcgaattttacacagattcctttcccatgaataccatgcctgagattcctataaacttgaacaccattatcactcaccaagaaactattatccaaagcacccagggtcaagctctgaacccctccattggaggcctcctcgaactcttccaacaagtcttgattggaccgtgcaggcgtcgccggactagagatcttttgcagctcatcatctgtatcctcccacatcgaatcgtccgccacctcgggcttaacccaccccataaactctttcccatagatcttaaccttgttctcttccgtcgcctcgagcccgtacacattctcaaacaaacaatcctgaaattccgtcacaaaccgccggtactgctcatcagtgtagaatttcaacgcccaaacacccttagatacaaaatcaatcctcctctggtcaccaaacatcttcaattgcatatcggtcgcaaccttagatcgaaccttagtcccaaccttgagaaaccagtatccctcaccgaaatcctcttcctcatcctcatcatcacgatcaccatcggacatcttgaagaaatcataagacgtaaacttctcggagatgatccacttggccttgggagtattcccgccaatatggaggtagagtttaacagcgtttttcgaattagggttctgagaagaagtagaagatggagaagcagaagagtacttgagcttaagggcattaagcttggcatctagatcgttaatggagtctgaagcggaggcggttctggatttaggagtggtaaaagaatgggatttgggttggtggtcagccagagcatcgtcgtaatgttcttcttcttcttcttcgtcttcgtcttcttcgtcgcgatcatctacttcttcgtaatcatctgagtctgagatatggccatcgcggctctgagtggttcccattgattgaaagagtaaaaggtttgaaggaattgaagaatgagaaatgagaaaaggaagaaatgagagtgtgattagtgtgatgatgtgattcaaataatagtaagtttcaaaattaagagttagttaag

SEQ ID NO: 189130 - DNA, 2569 bp, Cannabis indica
tattagaaatgagcttcaagttgattatactaaaaaaatcaccaaactattatttgtgccattttaaaaatacaaaattcaaaattgtcatttaagagcaatctttaggttgctaaattgtcacattaatcatcttttaaccccatttttaaagagattaaaatgagtattttttttttaattttttaaaaaaggcaaaattttgaatttattgaaatatacaccatattttgttatttttcgttttttaaggagtaaagattgaacacaaaatgagtgaacattttttgcccaacataaacttgctgatttaaaatcaaaggcaatgctcttaacactttttattttatgcataaaggctataagtaaaggtacgttgtatgcaataagcatagactgttgaaatgaacacaggagattaattagcttagaggtacaacccaaactcacgagtatctaaagttttaagtttataagtggcataaatcaacataaaccttaatgtttgtaaaactgtatttttttttttctaatttcatcactacatactgttattgtcttaaacaagacacacataaagaatcagtactgaagaaactggaagaaaattacagttgtacaaacattgaacacttatgccgttaaaaataaatattaaatttatatcgcttgcaaacttaaaactctgggtacttaccgctatttaccctttattataatacatgacttgtgttgtagtacacatgctatataatctcttacagcagtacaaagcaagagaagacatttttgttttgtgtggtttcttctgttgcataccatttggtctttggatgagtggttcccagtgttgagttaatcaaggatgaaatcatctgcattaaacttaagaaaagataacagaaatagagattattaaggtaaaagatgacacaactcatggttgtttattcatccactaagacaaaaccaattactatcaactttcaatagtgaatgagcaacaaaagagatgttttataacttattaaaagcttatcttaaactgaaatcattatacaaatatcaaactcaaatttacaattcttttatgagtactagattcttatgaatggactgttgtaatttactaatctatacctgatcatatctagtttgatgcagcctcaacaggctttgaagacaaatcttgtagaccgcaaaccatgttcgcgggaacagccacgtcaatcatctttggatagggaaggttcagatctgtaatattattaaattagacatggttgaattgaatatgagatgaaatttgaagttgacattgtgttagatatttgaaaagccagataactgcacttactttccatgatatgtttaaatgtatcctgcaaatcaaagtgcaaagaattaagaaataaaataaagataacaaagaaccattgatatcagttaagaggataaatcagcatatagatgacaccaataaatttcatgaaaataattggagtaacaatgttttcttctttctttgtattgtaatatacttcagtctttttctctattctgcccttaaggtttcacttgtatcttgcatatatcatgttggtatctatcccctaattttgcaataaaatcctagcctccctttcatcatctattgtcttttactttgaatatttgatgttggttttgaagaattactatggtctaatgagataggttgtctgttttttttcattgaaactaagatccccgcctaacccaacaatatttgaggactaagaaactataacaattaaattgctatgtacgcatccaggaggactcgaacctcagacattgaaactaggttgtcattttactcttcacttgttcaaacacgacactattactctaatcttctttcagcctcatcatgggttagagtaataaataaaggatcacctgatctttagtgagccgaggattatagagcatctcctctcctacagtgctaacctaaattcaaccatgtcaagtaagcagctgttttaaatatatatatatatatatatatttatacagtacagaagcaagcaaagggagatgatttgattccttacagtgaatcctttgtagtcatgagccggataaatcaatgtattcttgggcaatgagaaaatctggatccatagccaaatgagagtgagtgttaggccaatgcatgcataaggaacctgagtgtaaaaatataaactaattcctaaaccgaaatccttgcctgtgaatgcacagacttgtagagttcttgtgaactcccaccctgcaaacagaacaaagaagtgaaatgaagctgacatttgatcaccaatcaaacttaaaactataagaatatctgtatagacattatacctgaaaatcagttctccgcatccacgtatcaataaggcatctccagtgaaagccatttctggtttgggggttgagttgggtccatctcctgtaacataggtcacacaacctaatgtatggccaggagtggtcgaacctgcaatcacgaagcaacgaaacagctgaagctgtcaccagcatg

SEQ ID NO: 189131 - DNA, 14427 bp, Cannabis indica
gtggaacttgagaagaattgtcattataatacactgcatatacatattgattaaaagggctgcatgtatagttgaagatattaaacaaattagtaaccaatctgaattaaacaacatttttttttggttgcatcaattgttgactaatttgaacacttagtataatgaattgattgaataattgaaaaataagtctataatgaattgattgaataattgaaaaataagtcttagactgttcaagtaggcatgtcaaaaagatccatttagttggagtaaaagtttcgatccaaaacatttagatacttattggatcttggatcagtttcgctccatttcgcttatatttttttttgaatcatatttgatcccattcggttcaatatatataaaaaaatttaaatcaagactcggacccaatttggactcgaatcccttgtgacctgggactcaaacccggaccgaacctgcctgggagccaaacctggacctaggatcggacctggacccgaactcgagacttaggctcgggacttgggcttggacccaaaccttggcccaaacttgagactggactcgaacccggactcgaactcggttcccagtatggggccctgactcgggacccagatccagattctgggaaccgggcccgaacttggatcccaattcagggccctgacccaagactcaaattcgaacttgcttggattttagggcccagaccctaacccaggatctagacccaaacccgaggtcggatccggacccagactaggatctaaacccaaaaccggacccaaacttgggaccagacccggacccgaattccaggacccacacctggattccaggactcgaacctaggatcggacccggacccaggatttgaaaccaaacctagacctaaacccgagattcgagactcagacccgaactcgggacccaaacccaaacctggggctcggactcaaacccagactcggacccgaactcgagacccaggactcggacacggtcctgattccggacccggacgggactcgggaccaagacccaaacctgagacccgaacccaagcccgggacccgggacccagagactcgagacccaaacttgggaccaaacgcagtgccgatactgaaccccgaacctggacccgacctggattctggtgcccgaacctgaacccgagacccaaaccgaggacccaaacccaaactcgagaccacaaccagactcgaacctaagaccgggccgatgatccagttccggttctggacacagacccaaacacggttgctgagatcgaaacctgaacccgaactcgagacccaaatccgagcccaggacccaaacccgaacatggggccggacttggacccgaggcctcgactcggagcctagacccaaacccgagacccgaacccaaacccgaacccgaacccgaactcgaacctggacccagacccagacccagatccggaccgaacccgctcccgagaccagacttggactcggaccagtagttggtgttggggtcgagtttattgaaaatatattatatttgcacattctattaatactagttaataccaaacatagtactgttttaaataatactaatacaaaattagaatggatataaaattataagttgagatataaaattaaaattctaaaaaaaaaccgggtcggatcggatcagatctgatccgaataagtcaagtcagatctaatccaatcccagcatatgatctagcagggcaggacagatccttacatgatccggatcaggttggatcataatcggatcatatctgacctgacccatttacactcctatgtccaagagagtgaaaaccctcaattaatatataactatttaatgttagatcattgttattatgcaccagtggtacccaacacttttatagtgccccacaattgattagcgatatttttcaaaaattagttttaaacttattttcttaagttatataagatccgatacttaattacactaataacggtatgacaccgaagaaggtactaggtatctgtagtgccttttagttctcttaacattaatactagtccctactattttataatggtgttaggtgtcactagtgtctaataagaatgttcttttcataagaaatactaaaaggacttagtaatatctagtataacttgagttgttatattgcttggtaaaattaagtagtaatgtttcacataatttaattttagcagctatttatatgtattttcgaatatatgacatgtgacctcttagctacatggtgttggacgcattaaattgccaaataacaattaagttaagaaaaaaagaatatttaaatagagaaatttatatatatttgtgggctaagatatgacacgccaagacaaaaacttggaaagaggactgaccagaaaacacaccattatccattaccattattcattatccaatttccttcttcttcttcttcttcttcatccaactccaaatgctttcccaccttctcttcttcttcttcttcctctcatcacaaccaaaatgcccatcttattcacttccactcccactcacatttcctttctctcccacctctgcaaatgcaatcccactaccactgatgccaccctctcactctcttcttcatcattttcttctctcttaaacccactgaggaggaagataaggctgcccatttgcttctcctcctcctccaccagcagcagcagtgaggtctttgaacgccgccctgatagagaagctgcagctgcagcagcagctgccagagcacttgaagaaacctctgcagcctcctcagaggcacttagacaagctcgggtgagttttgttttgggtttagatgaaaaatgcataaagagaataaaatagaagaatgataaagtttcagtcttgaaagaatttgtagacttattgacaaataaaaattggttcttgattagtttgagctcaaagaatagtgaggaatttatatgcatttcttgggttttttgttttttggatgaaaatgcataggaaagtataaatgggcaatggaaatttgatgtttttggagattgaagagttagaatatgaatagaagaattatgaaggtttagtcttgtaagggtttgtagacttattgacagaaaaaaattggttctttgagtagtttgagctggtgtataatgcttgtgaaagagtttcaatattaatgtaagtgggcaatggaatttagctgtttttggagatttaagagtgagaaaatgagtagaagagttataaagtttcagtgttgtaagagtttgtggaattattggaaagaaaaattgtgtttctttaattagtttgagctgtttttggaggtggaagagtaaaaaagaaaataattagaagaattataaagtttcagtcttgtaagagtttgtggactttaatgaaaataaaagttgtttctttagttagtttcagctgtttttggaggtggaagacatatatatatatatatatatatacataagaattataaagtttcagttttgtgagagtttgtggacttggtgagataaatttttttatctttaattagtttgagctagtgtataatgattgtgaaagagtttcagtcttctctatactaggaattttcatattgttctttaatttatgtctttataataatttaaaataactacattgttatattatatttagtagaacttgtttgttagctatagccctatttgttctttagcttccattgtcattcccacccaaaagaaaaaaaaatggaaaattttgaaactttgggtgaaaaaagcttcaagttttggttcatgcattgatgtcaattctcttccatagttagtaaacttagtttagttgagctaatactcgatttctcttaagaagtagaggtctgctgattggaaagcagcaaagagttacaatgatgatcggcgaatctatgaaggcaggatcgaaggttttaacaatggaggattgctgataaaatttcgtagtttagtcgggtttctcccatatcctcaattgagcccttcacatttttttaaaggtactacttttacttttgctcattctcttctcttttagtgtgttagttacatattgtcttctttcaacttatactttcattccttcataagatttccacaatgaattcgataaagaaaagctcggtgtgttaagcttgttacttcttttactctaatgtctaaaatataaaagcaaaaggatatcccaaatggtacatttatgtcatctgtttttcgggttttcctttcccttatttgtctccgaatatgtgatttgtaaacttttgtttggtaatgtaaaatttgtttcaacctcttttattctatcacttgtagaagaaccacgccgaactccccaagatgtggctagaagtttaatcggttcacttatagcggtgaaggtattgaatttatttccctagaatttgactcaaatcataaaatattaatagtagaagagatgtatagtgaaattttgcaaaaaaccgagatgtgaatcttttcggttttgatattttcaggtgattcaagctgatgaagagaacagaaaattgatattttccgaaaaggaagctgtttggtctaagttttctgatcaagttgacataggagacatttatgaaggaaaggttggttctgtggaggattatggtgcatttgttcacttgcgatttcccgatggtaatattcttttttccttattcacgaaattcataatcgatcaacatattctgtgctcggggctgatttagacatttctgtttaacaatgctggaaacaacaggtctttatcatctcactggactagtgcatgtttccgaggtttcgtgggatttagtacaagatgtaagggatattctttccgagggcgatgatgtaagggtcaaagtccttagtattgataggtaagcttttgctgttctgtgatttaaatgcacaatattaaagtttcgaattgactggtgatatatactcgattagggcaattctcccttaacaagacggttttgttaggttgagttagacccaataactttcctaatacacaacttacacatatcttgtctcgaaacatactttaatcttagctcgtaagtacatttaaccaatggatttttctcgagtaagaaagtctttcgacttgccctagtttcccgtaaaagttgcattatcttgctacgttcgccttcaattcccacccatttttttcttcctttctgaaaatgtagctctatgttttgatccttggtaataacgtcatcatctcgagtttcattctttgatatgttatcttacgaatttcgctatgtagctagaaactagaattaatcgagttcttctgtgtagacaaaagccgaggatgacactgtcaatcaaacagttagaagaagatccacttcttgaaacattggataaagtaataccgcaggtttgttatctgataatctcggtgtataggatgagtgttcgcctttcggtcttcctatattgatatttaatggttgtaacatgacacaggatggagcagatggttctgattctttaaatacgagcagtattagtaatatcgaaccacttcaaggactcgaaacaattttcgaagagctactaaaggaagacgggtatggttaagaaaaatctatatgcattgatcttatgctttttggtactttcattaagaaaagtctaacgcgattttgacaaacttattcagcgtatatgacgtgagaattactcgccaaggattcgagaaacgggtggtttcacaagacctacagctttggctttccaatgtgtgtagtacctcttttttccctaaagaaaaaaaactgtctttttttctctttttcccgaaacctcatttgtttttcgctactattgcaggcacctgctaccgacgaaaagtctactcttcttgctcgtgccggaagacaggtgagttaacaatattgcaagttgaaatgttaagagtcaaacaatactctcccgaacaaaatttgggagaggatcagtctaagacaagtgacctcggtctcttttttaacaagcatattttgtgtaatattttcggggttttaggttcaagaaatacaactgacaacatcactcgatcaagaaggtatcaaaaaggcgttgcagcgagttttggaacgaataccgtgattaaaaacacgaataaaaaatcttctatctccaaattacacgatttctccttgtcccgcgatattcaatactcgaaatttcggagaggagaagtgtaatttggaggcagaagatgatttcttttcgattcgagatatagttatatatgtaattctctttccttcctattattgttgttgtgattctctgtttgtacagaaatttatttgtaacattaaccattttgtcctaatgagagctctacttgaggttgatttgtataagaacaattataatgaaggaagctcattttatttttatctccaattttttgtcacatcacattttaatttaaagtcattaagagttaaatgttaattaatttcaaatttattgggtggacaaaaaatttattacatacaaaagaatgaaatcaaattataattcaggacttttaaatactatttcatcaatagtatgtattatgcaaattatatatacatattttaaattaatagcaaattttatttcattatatttgatataatatgattgctttcactaaattatttgtgattaattatataatagaaaacaatgaaaatgtcaaacaaatagtgactctcacttgcaacaatttaaaactccattattttaacataatatattaaaatctagatagttttaatttaggagaattatctcatatactattttttatttttttttaaaaaaatttaaagtttgggttgttccggtaatttcactattagtttttatgtgggttgctatacagattttgattgcgatttagattgctctgttagttgttatagaaatttctgtgtaaaatttcgtaaaaatgtaaaaaaaaaaactattttgaaaagtaaaaataaaaaaactctttaattaatttattattttttataaaataatatacaactgttttaaaaaatttagaataatttataatataaaaaaaaagatttaaacattttatttcactcgtataaattaaaaagacacacatgcaataaattatttgaactttattttcaaaaaaataattaaattttttacaaaatatctcaaataattacatcacataaattgtcatataaaacaaattaagaattaaactatatggatatggaaaacacaaagatacaatcaataattaatacccctcttgatatatttatatatcttatcttcagcctcacaaaattgacccctcttttgttttcttgccaaaatttcaataataagatctaaataacaaaacaaactctatctcataaaaaaaaaatggtgatcacaagcatagatgaacatccaaactatgatagattaagtgagctacaatgttttgatgacacaaaatctggggttaaagggctaatagattcaggaatatcaaaactccctcttatcttttatgatccaacaaatgatttgagtaacaaaaactcaatttgtgaagaatcccatttgagtaataataataataataataatattccaattatagaccttggaggagttactactcaaaggaaggagattgttgatagagttaaagaggcatctgagacttggggttttttccaaattgtcaaccatggaatttcggagagtgttctcgaagcgatgaagaacggggctcgacggttttatgagcaagatgatgcgaagaagaaagagttttacactagagatgttactaagaagtttgtgtataatagtaacattgatttgtttcattcttcagctgctcattggagagactctttttttagttatatggctcctaaccctccaaatccacaagatttgcctgaggcatgcaggtatgtgtgtgtatatgtatgagttaatattattttaaactgtaaaaattactgataattagattatttattttgttaaatgataaaattgatcctatatttttaaaaatagataaatagaacattcgatgattttttttagtctaattaacttgaatacaattccaatcacaaacagatacaataaatgtaatcagtttgtcatatctctaaatcaggttattattaagttttattatgacgaaaaattagttaaggatactatttagtactattttaaaaaatataaagtctagctaatttgttatttatcaaaatagagaattaaattagtaaattttacaaaatacatgtctaatatagtatttactccatatataaatcaaatgaacatcatgtaatgtaaacttgtactaggcttaggattttatatgatttcactaggataaaatctttcttgatttggatttcgttttgtgtacttaaatgaataataaccgtttgatcaatctaattattgattagagtgtgggataaacgtaatttattctttaatggaattgatgttatcactaaaaagttcatggttaaaatattggagaatttttaaaaatacctaatattaaaaataaggtatattacaatgatacaaattttatttacaagcatacagaatttgtttacaaaaaatatggattacaagtttgtgaacactttttacatatttgtaaatatctcttacgaaaagttagatattgtatatttgtaataattaattaattatttttgcagtaaaatgttatttttatcttcttctaaattatggtacgtaaattttttaaaaatattaatcacaaaaattataatctattaatttttagtcatagcaaatactgttactatagctaaaacgaaatttgttaaaaggtgaatctaaatgttactttatagttataaataacatttttgttgtaactataaaattattactaaacagttatatactttacattttgtagtgtatattaattaatatttatctagtgatggctataatgaatggatgagaaataatgatttattattacgattaattgattacaatattgcaatttttttaggaatgagatgataatgtacacaaaggaagtaatgaaactaggctcttgtttgtttgaattgctgtctgaggctcttggtttagattcaaactaccttaagaagatggaatgtgatgagggattagtgtttataagccattactatccgccatgtcccgagccagaactaaccatgggaatagccaaacattccgataatgacttcctcactgttcttctccaagaccacatcggcggccttcaagtcttgcatgagaatacttggttcgatgttccaccactggatggggctttagttgttaatattggagatcttttacaagtgagtatgtttttatttcgattgaaaacttcgaatttgttagacactattcgtcttgcagctaaatgtatagaataagtgttttgtgcacttcttcgtactagaaattgtcagtaagttagttatatttcagttatactaattttagtaattttgaaaatacattggttagacttaaggtaatattatgtgtcgatatttaaaaaatgtaaagtgaatttttagtaattctcgtaaaatacagagttcaaaatagtattttaatttagctaaacatgatctttgtattgttgacatggtttcgtttggattatgcaaatgcagcttataacaaatgacaagttcaaaagtgtaaaccatagagtgttggctaaccgtaaagggccaagaatatcggtggcatgttttttcagcaccagttttcagccctcttcaagactctatggtcccattaaggaactcttatccgaaaataatcctccgatctacagagaaaccacagtgcaagagtatgtttcgtaccttgccacacatggcatcgatagcccgcttcaacggtttaggatttaaacttgcatatgtcgcgattttgatgaagctacttataaacattttggccattatgtagttttggagaataaataatggacttttctttgtgttcattaggaaaaaatatttgtatacttaacatatggtttgtttgttattattatgttatgctcaataaaagtgaaatgttaggatttagattcattcaaatatttgaagataaatattaaggaagatcttctagacgatttggtgaaatctaaaaattctacaacttctccccatatctttttcttttgcaataaaatatatatgtatatatattttttttgcaagaagatactatttcaccaatcaaattatatattttgcattttatataatttaggactaatttagtaggccgtgtaagggttttatcatattaaataacattaacgtttggataaaatattatattgtattaattgttataagtataagttttaatataatgtgaattatattatttaatatatagtgaatgatatgcattgatttatattgtaatatttacaaagggcttggggttggggactctaatgccggtcccagaccccagaccctaaatctagaattagactcggactcaggccttgttcttggctcttgatccgaccctagccctggaccccaaacccggacttggacccggagctcgacccaaacttggccgctccagctctagacctagcctcagccccgaactcgagccttgacctggaccctgtccctaaactctagaccctgatctcgacctgattcgtggacccggactcagaccttgaccctaacccagccctaggccttggactccgaaccacgacccaaacctagactcgcccccgaacccgaaagagataagtcagagttggagtcaagtttatggtaaagataatatgattttatacaagttattaaagtcaataccaaacatagtattgtcttacataatattaatacaatacaatataatctaacacaatacaatacaacacgaccaacccacgagctattacaattttttatattgatcaacatcgatatttcaactaatttattcccttaaatgatgagtaattccaaaactcaagtggcaaatgattaaacaagcttataacagatacaataatatagataatcaacaatagaattattagcgtttctacattgatgtttacaatccaattaatacttttcatcacatatatataatcctctttttatttagttcattcattattaattatttataataaaagcaaagtctcaaccctaactctacttcattcttttttggtgagcttgaaacgatccaagggcttagttccttcattgcatttttcactaaaataagaaatatactcttgcactgtggtttctctatactttggaggatcattctctgataacaattccttgatgggtccatataatttggaggttggatttacatatttggcaaagaagcatgcaatagaaattctaggaccctcatgactcgctagaactcggtgttcaacacttttgaatctatcatttgttataagctgcaaaacgtaacaaaaaataaaattattaataatttgatcgcatcaaggaaaaaaattatggtgtttttaagtcgtaaaaaaaagctaacacttaaacgaataaactctagacataacatcacactattccagacacaactggacctaatttgtcagcacagaaaataatattccagacataactatattataacgataatagtagtttatacctgaagaagatctccaatgtttacaactagagctcccggttgaggagaaacatcaatccatttattgtcgttgagaacttgaagaccaccaatgtcatcttgaagtaggattgtgaggaaattcatatcggagtgtttggttgctcccatagttagttctggttgcggacatggtggatagtagtgacaaaagagtatttgaccctctgtgcaatccatgttgtacaagtgatttggattcaacccgagagcctcagagatcaactcgaatagaaaaattcctactttcattacttgtttcgaatactccacaagtatgtccctaataaaaaaaatacacataattcaattgccaaaaagaaaagaaaaatcctccttaaaacaccatatagaaaaaaattagtgtgcttgtatgatgatcatattggttttcacacataataattttattctcaaatctcaagtagctagaaaatcgaaattgtcctaccaagaaaatagaacaaaatctatagttgattgttacaaaatttatacaagactacatacctacaaacatggggcaattcttctaagtttggaggattgggagccattcgataagtaaaagtatctctccaatcagcagatggagaggtatacaaattgccattggtgttatacaacacagctttactggaatctcttgtgtaaaacgctttcttcaccttagtttcttgctcgaaaaaccgacgaacaccttctttcatttcttccataacacttttcgaaatgctatggttgataatttgaaagaaccctccattttctgaggcttctctcactcgatcaacaatatcttttcctttaagatctataattggaatattaaattggagatctcttaaaataggaatatgatcatcagatatggatttgtgaaagaaatgaggaatttgagtaattccagcatcaacaaggcctttcactccagctttagtctcatcaaatgctttaatctctttccctcgatcataatattcttcagccattctatttttctttcttgtaatgaattaagtcttttgttatagattgaatttgatccaattttggtaacgtgacaagattgtaattaaaaattgtactacaatattcattgtaacttgtgtaaagtttgtcagattatattcaattggtgccaaaaatattattggtgattagtaattttgtaagagcattcttattaggcactagtggtgtataatactttctcgacatgtcgctttacgattagctaacgatattctctaaaagctattatattaaattatatatacttacttgtaccaatagcgatattgacacataaaatattaaatattactattgttacaattaaatattgaattctatataatttaatatataagtttttagaaaatatcacatgacagtatgatctctagaagatatttgacaccaatattaattaatgctattttttttattaattgtgtttaatggtaggaccaacactctttaataagtcctactaacaggtgtactaccattagtttctatatatataatatgatataataattttatttgctttgtggacccaaattttgaatggatctattattgaattgcgagtcacatttattgctaatgacataattttcatttcaactctttaatttttttaattaacttaaaacaacaattcacaacatgatgagttgtgagtgactatataatagtcattaataattataattatgatgttatattttgttatgatttattataacaagttataaaaaatttatttttaaactacttaaattaaattatttttaataaaaatattttagtaattaatattcataaatatctattttttttttgaataaaaggtaaatttttattaacaaatacaatcctctattacaataaacttaggagtgaaatctaactcccggataactcgacttggcgagaaacaagaccttctagcaataatatggacaactttatttacaaatcactgaacaaaagaaacaacaatattttgacaactgagcaataaagctctacgatcttcaaccaaaatgccaaatttagaaagcatagaaacatcactataaagtgcttggacacacacaagactatatgtttccataacaatatttgaccacttatttctataaacccaactaaaggcttccttgactccaaagatttcaacaattacgggatcaactcgaccagccttgccacaagaaaacacctccaaaaccttcccattgctgtcatgagccactaaacccacaccaaaacgacaatctgcagcaaagagagccccatcctcattgattttcacctagttttttccaacgctcatctccaattgttgcagtcgcaacaaacaaggcatcgtgcctttttgattgagaaaatttccattgttcaagtgaaattttagcagagaacctgttgctgcattagaagttttgttattccaaaccttctcatttcgggcactccgaattccccaagtgtaacgcc

SEQ ID NO: 189132 - DNA, 4576 bp, Cannabis indica
ataaataattggaataaatcataacaattaacaccacaaagatcaagaatttgacacctgtaaaaagggacaatctcgtttttaaaaggaaaggggactacagccgtggccatatataaatcactttattaagatggagaagataaacgatgacgaagacgagaggagggaatcagccatagcttcgtcactgtctttgcagcctcatttcaagccgcctactgccctcaagcagacccagctttccaagttccaggtgacccaccttttcttctctccaaattcctcttttctcgctttcaattcccattttcgtatcgttcaatcaatcctattaggggtttctttattggatgaaaattgggctgttctatattcaacgggtagacagattttgaactcatcaacagtcaacatagataattagtttttgatttgtttatttgtgctattggctagaaaaacacaaaaaaaaccatctttcatggacgacatatttgattcctctctaaatttagaagaagcccatttgaaagaaggcttcgatgagggttacaaagatggtcttggctctggtaaagaagacggtaaacaagtgggtctgaaaactgggtttgaggttggcgaagagttaggattttacaagggatgcgtggatatatggaactcagctatccatgttgacccgacccagttttcttctcgggttcaaaaaggtattaagcaaatggaagagttgattgagaaatacccaattatggaacctgagaatgagagcgttcacgagattatggacagtttgaggttgaagttcagggcggtatgtgcttcaatgggtgtgaaattggagtacaatgggtacccaaaatcttcttcaggtgcaaatgagatgggattttaacagtaaaaaaaattgtgatgagttttggtaacgtttaagaatcatctgtgtcaaactagctttcgagcttgtattcaaaactagttctacagctagattgactccactaccacattaccatttgatcctttttgtgtttctatcctacagtgtttgtttagttctaaattattcgaagcaataatacaattatcactcagtttagaatttcaaatagattattgtctttgtctcatacaatacgacatgttggttactggatgttgcttttttactcttgtcttgacttttactgcaatgtcctttgtatgatgacacgtgattcttagaaaatgttctcttctttagtttatctaaatatataacgttgttgttgagtttgtattgtgatatgggcagttgagaaggaaaagataatgttaaagtcgatgcttggttgctgtaaggtgtacatatctgaaagcagaaacagggcagctctagagtccattgaaagagctgctaagctattcccaaaagctcccattatcaacaaatttgtagatgagacttacaacagagttggctacacacttgtttccaagttggatccacaaccatctttggatccatgccccttgagaacctcagtcctagccatggttaaggctgctttggagtccattgaccttgagttgcacagtggcagtcatccccggcttggtattgtggaccatatatgcttccatcccttgctctctacttctctgggccaggctgctaacattgccaagtctttggctgcagatgttggttatggtcttcaagtacctacttttctatacggagctgcccatggagagggaagaacgcttgatacaatcagaagagagttgggttatttcaagccaaattcaagtggaaaccagtgggttggggggctaaaacaagagtccttggcactcaagccagatgagggtccacctcatgtgattccaacaaaaggagtcattgtcatcggagcaacccggtgggttgacaactataatgttcctgttttctctaccaatctctcagcgattcgcagaattgcaaagggtgtaagtggaagaggaggaggccttccttcggtccaggccatggcacttgcacatggtgagactgtcattgaagtagcttgtaatttgttggacccaaataatgtgggaggagatagagttcaacttgaagttgagcggcttgcaaaggaagagggtataagtgtgggcaaaggctatttcactgatctttcccaagagaaaatcattcaaaactacttgaagttggactctgcgttagcggagggtttattttaattttttcttttgaatcagacataaaaaagaaagcattattccatgcaatgaaaacatccatggaatgaaatattagagaatttcgcgttgttatctatcttgaacataagaatgaaatgaaagcatttcaaactcagctctactctgtcgtgagtaaaccatacttgaaaacttcaatccaattcattttcaatgtacatttttggtttcaatcaaatgtacacaattgtgagaatataacttacgattattcttaatgggtaacagtagctaactagaaattcttcattaggtttttgtagcacaagtgagtgaactacggtgtaagacacgaacgataaggcgtttgggggatgtgccccctgaaatgtgtgctaggggatgggggaaattcctccggccaagctgggaatgaaggaacgtattccaggggctctcccatagctcctcgttaacggaatggtccctttttcttatttcgtttatattgagaaatatatagagcaattcggattctttatgtttttattgattcttttccgatcaagatgtatgatgcaattgggtggttgcaattatggtttggctatgtaattgtccaagtggtatggttcccctatgtcttccattaaggttaaaaaacggaagagtgtctttgcaggctttattatagaaagaaataaggggccaattacctcattggcgtttaaagttcttacttttgtattaaatttggatggttttaacatggtgtaaggtcctagcttaagaacaataacctagaaggtaacgtttcagtgacaagttctctgacgataggaacttttaacaatctagacatttttattaaagcactttccaggaagagacgttgctctgttgcttattgtaattttgcattgttattcttgtttttgtctcagctttgttgcaacattcacttctaaattttgtctattattgtaggagctgcaccggagacgtttagaaataaagtctaaatcaaagttcaaaaagaaacaaaaaggttcttcattagcttttatattgtatatatatatatatatatatatattattattatctagatgactagatgtgctttgtttactgctacatatgcagagtctaactcattgccattggggaatattgcagatggttgtagcaaatcacactgcaaagacgtaataaccaaagattgtgaagataaagaaccaactgatcttggttataactacgacaacgaaaacagttcctcatttcagcaagaaagtggtgcagcttatcttgttccaaagcatcaccaaaagttacattgggggtatgagtaatggactttatttagtatttaacaatataacaaaacattaagccaaaagtcaacaattgaagataaaaaaacattaacatttgtgctctacaactacaactttgtagtctgaactaacatcagatgtgcatgtacaatttatttttaaggggttattataagttatcattatgaattatactgttacaagaattgttattattttcagctttgatagagacaagaattctgttaaataagaaatcttcaaagtgaaaaccagtcaatgctaatataagtctggagttacacaaaaacttaagaattatgagttcttggaaatataagattcctttctctcttaatttattagagcttgagaattaatagcttctggcaagctagttttggctttgttgcttccttttctcgttttatgtttgatgctagtttaaccttcttttggttgctttttttctaggctcgacacaaaggaaaggtgggaaagaaaagcaaacatgtaaatatcatttgctgatgttgtttaatttgaaactggaagcactctgaaagtggtctctcgagcttagtggatgtagctgaaagcagatctaccttaacaagattggatttcttagatcttgagaaacatattcaacatttttatccgggactttatttgattatgaagtgattaaataaaatgaaaaatgtaaaaaattgtacttctcacacaagaagattttgtaatgatctttaaggaatacatttcaatcaatcatgacatttgctcgtaacatgttaaatatccactcatatttaaaattaatacttttgaaatataatatatagtgatttgtgacagtgccaacaacaattgtgcttaattttatatagatgattatattttattccataataataaatatacattttttatttacttttttatcatttattaacgtaattaataattttttatattttatttttataattaattaagtttttatacttttaataaaaatt

SEQ ID NO: 189133 - DNA, 2798 bp, Cannabis indica
aactgcaaaacaaatacttaaaataagaagaaagtaatacataatttcagctaggcagttaaactaaaaatggaaattaaaactgagaaaagaaacaatgtcagcttagtagggaattacctggaatgtgacaaaggcattacatcgctgctttttccaacaatgagtttgttgagctaatttcaaggacattactctctgtatatacataatctcctgttatttattttttcattttttttttgaaagattatttgtttagctttttgtcattgggatgacaaaaatttccgacggacgtctgtttatgataacgaaaaactattaatttacagtgcatcgcttatctcaatttaatttgttaatcataatggttttactttggcgtatattaacatagataaagattcattgttctgaaatcactagtttccaaatgtatcatgactcaaattgaaagaagaatacaactgaactttcacaaattttgattagaatacagctgaacttgccgtggccaaacttgaccataaacatccttcttgtaatattttcggtcccaagaccagggcacatctgcagtgcagcagaataaaagtttgagatgagtaaacttttgaaagggatgatgaagaaaatactacaccaacctaaaagaagaaaataatagtaaaattatgaccttcagaagtgtatggctgaggaggaagctcatatggcacaggaagttttattacttcatcagatgaggaaactgtatttgagcttctttgccaatttaaagtcacaagctctaccttttgtgctttagaattctcagatgattcacagttattctgatgtatgtatcgtcaaattacaaaagttcaaaactctgcctgagcgtatatattcacatatttaatataggactttgtatggaatagaagtcacgaaggtgagatacctctacaatttttcttgtagtacaagaaaaaccagaactgcgccttttgaaaggtaaaataagcaccccgagctgaaaacagcacatgaaaggatgttggaaatggaaaccaagcaactcctacgtgtgtatcgagccacacatatcttaactcgaatttgaaaagtaatgtatttaccatacagcctacctcataagatcggatcattagttgagaattattcttctgcagagctccccaggcagctttactgagattagcggaagttaacaagaaccaactgttggggatttgtacagtgaacagtcagcatgagttggaaatcctaattaatggcagaacattgaaggaaaaaaaaaccgtgacaagagaaacaaaataaatgagtttaaaaaacactcacgcaagtttctgatcattataacgagtgtatgtctttatatgtggcattgcacgactgaaatgaaaaaggatatgcatgagtatatataaattaaacgttgtaaggtgtttcattctaattccattcaacaaagtcaaaacactggaagtgactggttatgtaatatggtcattgaaaatgtggcagaacagcagaaagaaatatcaaacacacaaacgataagtcaagtttcactgcccgaatttacgataaagagaagagaatttaccagcggccagtgtggcttgccttccacttggcccaatactttttcaagaatgctttctcgacatttttcagtggacttggaacagcattcccagctgcatagccctattgaagagtggaaacaataatattaacaagaatagcaagaagacaactgagcaatatactcttgcacacgcattagacagacacactggaccttacaaaggaatcttaatttcaagttgcactataactaaatgaaattgtcaaatgaagtcaactaggaattttttttataaacagagggaaaaacaaggatcacccttcttatgttcgtcttaacgtgccccaacttactgaccccgaaaactgataagtgaaactgttcttttttttttttgggggggggggggggagggggtgagggcgatggggaagctagaatgttgaattaccacaaaattcaaccaaccaagaaggttgttaaacgtctgtgagcaactcttataatatccaatggttaaacagacttaggaatcaattatccacatagattcttggatctttatccaaactctacttatggtggtaattcaagcttgtaaccttgatcatcttagaattgtacctaaaatttaagaccgtaatatttcaaagaatctatccaataatacctctaaagagcatctgacatcttctacgctgggccatacaattagtggctccccagggcccaaaggagttttatcttctgataaacctgatgacattgaagccgcgagttcagccatccacttctcatccaatgaacccagggaggagaactgtaaaaaggacaataatatttcaaaaaaaaaaatcccatgaagcaaggtttctactaccatttctctgctttcttgatgatgtttacaatcaattcatcacaaaaaacatgttttgtctacctgataaacaagaggagatctcttaaactcgcgatcaaaggtgcattcttggagtgcagtacgtaatttcatgtgtccccacttttttaaattattacccgtgtgatatccaggtacagatgcaattaacctcacctgaaagcaaggaagatatttcccatatggccaacaaaattggattagacagaaaagaataacatacaaatgaaggagacagcaaccatacctctgcattgctgtaatcaaacttct

SEQ ID NO: 189134 - DNA, 4179 bp, Cannabis indica
aaatagagttcctaatatttcaatttatcacacgcgttcaaaaaatttcaaatatatttttcacactttaaactagtttacgaaaattttcaaaaaatttacaagaataatgttattagcataacgaacaccgtacattacaaaaaaattaaaaaaaaaatatttcaacatgtattttcgagcacgaatattagactaaaaaattataataagagattgacgatagtactcctaaaaaaaatagttgttttgttaaatcaaagtcaacaatgtcaacatctaaccataaacttgttcctttcactgttttttttttcattctttaggtgttgggattgagatggaataatagttcattttttcaacccctaaaccaatagagttggagtattggactgcattgatattgaatgaaagattattcctttgaaactactgttaatatttgggtcaaattaataattatttgattacaattatgatatatataggtaccatatttaattggtatagaaagctcaaaatctcttgatcagccgtgaaagcaacagttagtgtttgtgaaaatgtctaaatgaatagatatatgatgaataaaatgtcatgtctaataagatggcccttcacaccaacaagttcctttcagggatatatcaatggctgccttttcttcctctagatatgcatgcatttcaaattcacaagcctaagaacctaaattctttgctatagcatatttatgtactacactaatattcttcaaattttaaattttagctacactgttctacgtactataataaaaccaatagtgcaattaaagtgttttgggcaactaaatactctcaactatcatttcaagtgtaattaattatttaaacttaaattttagtggtaaaactattcgaatttctaaatcgttaataaatttaaaatatcatcaattttttttagttaattattgacatgaattgcttatgtgtacaattttatacacgtggaacatatgtattaaaacatgtaatataattatttaaaaattataaaaattattgtaaaattaaaaagaataatataaatttctaaatttattaatataaataattgttatcctttattcttttatataacaaaaagccaaaatcttagttttcgaaaaaaaaaaaaaactaaatctttttccctcttgcctgaatgaattacattcggaccttcatagtcgtcccgctcgaattcaattttgcccagatttttcaatcgccttcccttctctttttccacacccaacactccatccccacctcattccatcttgccaaaccacttcccagctagctcacctccaccacccaatctcacctgagccacgataccctttcaattctagacctccaccactccctcttgcatgaaatcccatcgagccagccaccgtatccttcacaaagcactcccatcatctttctcgctctctttcaccactgactgccagttcatttggtgatatatattataaaagcaagtcccatgccgatcgaaaaaggattgagattcatgactgataaagtaaagaatgtgaaaaagctcgttagtgaatgagttatgatctgctggaatctaactggtatggtaaaccgctctaccagagctggagttaggaaccagaaggtctcgtgtgattcaaacattgtcattgttcaaatgggcatctcctaaaagctttaaactactcaaagtcagggtgtcgaagttgaattcagtgatggcgccaatcaaaattgcaaaacatcgatgtaagataatgttatatggaagaaaatgtcgttcgcccattcattgaaatgaagtcagagaacgaagatatcttagacccgatgcagtccaaagaattagtgaggccattgagaagattcgttctcgtatgcttgcctcacaaagtaaacaaaaaaactatgttgatctgaagcataaggatattgagttccaagttggggacttcgtcttccttcgagtatcaccaatgaaggggattcagagatttggaaagaaaggaaaactaagtgccagatttattggttcgttaaaaaaactagaaagggtaggccagatagcctatcggctagcttaccccttgctttatttagagttcacaacgtattccatatttcaatgctcatattctaagttacgaggacattgaacttcaaacagacttatcatacgaggaataaccagttcagattttggataagaaggagaaagtgttgcggaacaagactatttcgctagttaaagtgttgtggaggaacaacaaggttgaagaagcgacttgagagttagagtcacagatgcgggagcagtatctcgaattattcaggtaaattttgatggtgaaatttttgtaaggaggggatagttgtaatatcccaaaaattataatcatgtgaaattggaaaattttataaaatatgtaattatatgaatattagagtaagattataatcttactgaagttaattatgagttaattagtgatttttgagtaatgaataaattgagcgtaatttattaattacgaagattttatcagaatatgtgggtaatttatatactatttttgaaataaaatattttcaagttcggggacagtggaaactcggtgaattagtcaaatatgtcacgatgataatagaatgaattatattggaaatataccagactagtttagaaagttgagttgacagtttagttggagtagttagaaatgaccaaaataccctaaagttgtattttagcttaagtattaattaagggtaaaataatatttttactaagttagatgttaaattgtcttatatgtaaattcctagtaacttctagctgattattaggatagtttatttgatttattattattagatttgataattgaggaatattaggaaaaatttggataacttactctctctctctttcttcttccctttcgaagccctaagaccggtaagaacccaaggtaatttttgcataaatcaacccgtttctagttgaattaactaaccctaggagctgtgcaagcttggaagtaagtttctcatcctttctctttgatttttaaggtccaaggttaagttttgttgggatttttgtatagtttcaggactgtgggttttgtttgagttatgagtatgcttttaggtttaaattaagattgtctaagtgtgatttggatgattccatggctgttattttttgaattgggtgaattgagttcaagaactcaaatttcactcaagtatggtgattttgtcattttgatgtgtttttgagttttgaatgtttgtgtgtgtttattttatactgttctggaaagtttcattaggtttagaggagatttggttagtttttgaagtaaaaaccagggttttccatttctacagcaaaagctgatcgaccgattctacaggatattgagaaatcggtcgaccagttggccagtaggggaaaccctagtttttttaaaaaaaattggtttttttgttcggtgtgtttttcaaaacctagtttagggcgttttatcgatgtttaggttgtttccaaacctatattgattagggtttgttcgactttgattttagatcctatttcaggattagttaagttatttatcaagttttgttgtcgtgacttaggatccgagatcgtcgagcattattccactcaggtcggcccacacacctaattttggattgaggtaagaaaagccaattgcactgcttagcatgtcaaataagattcgattattatcaattgtgactcgattataatcgaggtaaagatacaataattagcgttgttataaatgagttattactcattattggaaaccattgataggtttcgtacttatcggtttgtcttataagataattaattgattacctttacttcattatgcttgaatgactgcttagtatatatgatgtattgttttaagattatgctttatgtgttaattatgttttatctgtttttcttgctgagtctttgtaactctcgagtgctctgtggtccaagtaagggaaaaagaaaactggaccagccatgagttagaggtctcccgacaatgtacataccagtcgccgtgtcttggttcttagtggacaagatccatctttt

SEQ ID NO: 189135 - DNA, 5016 bp, Cannabis indica
actgtaaacgtactactctctctctctctctctctctctctctctcttattgtgttatgtatgtatgtgtgttgattatatatatatatatttctctaggccctgaatcctaaaccctaacgaggcagtgatgatgatgctcttgcatgttgtaaaactcagactgagagaaaagaccacgttgcttggtggggtcgactcggtttttccgccggaaaatggatgggtcagcctttttcaggtggtgctccgtcgtcgttcccagccactggtagctgtttcttttctctgtttccttgtctgagaaaaggcgaatctgagcctccaacaacccttttcccaaaacctttacttttcatttttgtatatatataaatatttatatatatatatatataaattataatctgagtgttatattaaagaaaacagaaaattattgcttcattgattgatcgttatttttgtgttaatccaatttagcagacgaaagaggtaaaagaaccaaaagtttataataaaatttactggttaaataagactgtcatagtataaaagctaaatcaaagtgtttactaatggcacaaatttataagtaacagaacaaatgaagaaaaagaaatgagaaaagaagtagaagaagccacactgactgagccaattgttcttgtttaatcttttaagaacagaatgtgagcagcaaactgggtagtattgctgccactagagaaaggccaacatttgcagcacttgccaaaccacttctggacccacctctctgaggtagattttccacatcttttggttcgttgactttacccagaggaggaagaggcgggtcaacaacatctttgacttccagaggttgagctggagcttgtgctggtggttgaatctcaggtgggattaagctcaggagagagcctgcttctgctggcaatatggcatatggtatgttggcttttggatcagtatctgtacatgggcaccctgcaaatccccgcaccctgcaaatcccccaaagagagcacattaaacttgtaagatagtaaaatttagatttatagtatagaatggagactagtatggcaagtattatatatctattaatattgtttactccattcactactaatttggttttttgtgaaagatgggttatgcttacttaatctttgtgaagacactaattgatagtaggaccaagtttagagggtaggaataggatgtgttaagagttgttagatattgcttacttcattttcaaccaattttgtacttttgctaaaggttttgttgtgttgtgattagtaagtgtgttcttagtctctgtgaagaggctgagaatagagaacttactcatgtatttacttgcagttcctggaaaatcagtgatgagtccatcagcttgaacagattgaacataagtggcaatctccactattgggtcactgaagtaatcgaaagccagagagacgtactcgttcctgaactgatagacatatacggagagatttgctgccttcatttccttaacaacatcagtgaaccccactgtaaagaaatcattgactttgactatggagcttctgggaatggtcactgcctctgcatacttctttatttcgtctacagaagctttaggtgcatcccctatcttctccttgattttcaacacccttttgtaagctgggattcctttgaatttggatagaacagaagtgtcatctgattggatcagaacttgctgagttgattgcttgtcgaaagtggcattggttaatgctgtagctactttagctacaatgtcaaggtttttatttgatgctatataggcagcattctgcgaattagggggtttgacacgaaatataaagtaagttcattagatcatcttatgtagaagtatagaaagatggcaatcaatgtgttgtttgagatgagagttcacctcaatattgatcaggatcccagaaactgcctttgcctttgcaaattctagaaattcggagagggacacgaagctccccttgttcttgttagcagggtttcttataatgctgctgttaccaaaaggactcaccagttgagctgaaaaagggggaaagttcataagttaggagctaattactatatcaaaccagcaggagttaacatttctctgcaaggacagttatcaaaatgaacttacattgcaatgtttgaatctcattccatgtaagatcgaatgaaaacactccttcttccggttgaatttcagggatgacagtttttctatcaatgaaaggcaacatggcagtagtatctccggctagatctgcacttggtaagcagaatgctactccgtcttgtgacaattggaccgagcaatctattatgtcagccccgtcttctactgctctctgataagcaaggtcactgctgccaggatatatcccactggctccattgttactaatgatcaaagaggctcctgcagaagttacaagaaactatcatcagtactttgcattgggattaggaaaatagtatgagtcatgacagtaataccatttttaggtttgctttcattcttcttgtgtgcaaaacaggctgcatttgaaacaagcattggcaaggttagttcattcagagcccccaatgaaaggttttcggaccattacaagaaataagaagctctgataatctcacctatggcttctgatgctgtaggagggaaatctgtaagcaccccatcaacagagaacttagagttatctacaaactgggtgtactcagctgttggatcataattatagtcataactcatgggaacatcgtttgcgaaaccataagcataaacttctaatcctagtttgtgggcatcgtccacaagagtagttggttcgtccaaatatccatcattgtttgtaggccatatgtattcttttgggacaagaatcccagatacatagggcttgaccaaagaatcaagactctgcaggattgatttgtacttatgattgattgttggttcaacatcttcaaggcccaggaactgaaataccagctttgttttctttttatttactttactattcatgagtttcaagaaacctatctcaggagatgaaatgtagtttatactcatatgttttgatgctgtgtcgatgtatgctgccgggctaagtttacgctcgatgtagaatctttcgtactgccattgaagaaaaagaccaagcaccccaaaattatattatgtttatatacaggtattcattcattattaacagtttttgctcattgcagattgtagaagaaaaatgtatctgagaaagatcaacctggacatgcaaccaaaactttggtggcttaattcctgtgacatcttcaacagtagagattggtaattgaccatcgaacaaattggatcgagagtatacattctgcatcactgtaaatcaaaatcaaaactggttatcactaaatcttatcagagcttgtctgtttattgaaacttgtttagtaaaacttacatgtaacattgctcaaaagttgatcagatgtataatccactgtgaaccacccacgaacactttgaccattaatcttgtagctactttgtccttttggatagattgatgaaatagtagttgaattgtcaattcgtatatcgggaaggcataatccaatgccatcttttgtgagttgcaggttgcaagaaacagccatgtcggacaaacttgtagagacgcgatttgatttgcgaaactgctcgattctgggaacagccctgaaaacccgcctcgggctataacaagtggctgctcacctgccataaaaatgagaagaaaagaagtttttttactcaagaaatcaaatcaatgtaatgaactttatcgttgagcattttgttacagaatttgcataagttgatattgattataaaagttcttgctatttgctttgctgttattaccgtttaaagtttgccatttcgtcggagacgactgagatggcttctgtgctaaagttgagtgtatgaacagggaaacaaaaatcaaagcccttatcattttccttctttaacctgtcacatagatttacaaagggaaaaaagcatattagtcaagagatttcatgataatcatattagtttcaaactacttcacattataaaataataaagtaatcttaatataatgtaatttcattactttttatagaaaaattatatattgttatatatcaaaatgccattccaaagcatcatttgaagaacatgaaaaatttatataatgaaacatacaaacatgtcttcattaaaaacaaaaaaaaagaacacacaagaacttactcaaatcttattagatgataagaatgaaagtacacattccctgttaagtttcccaagctaattctctaggaatctaatgaagaaagagagagagaatgagaaagaataggggtttaaggagaggtagaaatgaaagactaagaatagaaataattacttaccaaaaaaaggtattttttattttttattttttaatttttattttaatatgttgtctgtaattacttccattcattttctcggaattataattggctagcatttacttaaacaaaaggagaagtttttggttgaggtctaatgcattcatttactattttggttcgtctttcttggaccaacacctttgtgtttgtttcccgggaaattagacagctcaagtcctaacggtctttaacttggttttttttttttggttttttttttttgttgttttattaaattttggttaaagatgtgtttttattttatcataaaattattaacaatgttgaatttgttttcaaaataaatatacatctttcagtcatcattctaaatattgttttgtaaagtatatacaatagattattaatgtcatgaaattcatttaaatatatattatcatatattttgtttgtaggttccactatgatgaaaaattaaaggacacctaaataggaaggaagatgaatttcttc

SEQ ID NO: 189136 - DNA, 1261 bp, Cannabis indica
gtattaggtcgtattgtattgtaatgtattatattgaattgtattttgtgcaatatttttatgtaaaactatacgtggtattaacttttatggacaccaaaatatacaatattttagtataacttaaagtttgacatagtattatataaaaatataatgtataatccaattcaatataatacaatacaatacaatacaacctaatacgacatttcaaacgagcccttaataaatattttaacctatgttatagtttagtgaaaattttgaatattttctgtactacaaaatatattcaactaaggtttcttgaataaattaacatccaatatagttgaatttcaatctacttttgttttttttttttttttctttttttcgttcatttatgtagtaatgatggtagatattagagaactttctcttttattttctatttttgttaaagtgacatttttgggaggttatacaattagggggacatggggtcaacatcttattgtataaaaaagcgctgtggaatggtgtatggcataaatgatcacattggatgccagacagacacattaatctgtatgagagaaagaaaactatggttcttgtttcttttgccttacccttttttcttttgagagctttgatttttccacatgcaccatatattgcctggaaagctagcaatgattaggtgaaatcatgtgaagcagataagcaaaaaataaaataaataccttacaaaaaaaaaaaaaaaaaaaaagaaaaaaaatgtcccatccaacttggttggttggttcagttttgattaataagtagccatattgcccattttcatacttagtccctgattttgagtccaaatttccaccataattttcgctctacaaaacttattcatccactaaaagtcaagattacaaagaagaggaaatatagattgcgctttgtataggtactagtactataaattatccataacttgtgcttcttaattgaatgctttccaggcaataatactatacatgtacatatatatagatatattagctggactttcaaatagatttgcgttgattataaagataaaagctttgtagagctggttgaacatattcaaaaaaaacaaaactaaaaagggaagagaactcatctcttgatttatcattatgaagacaacatcacatctacactttccctatgtagtgggtaaaagcacctcatgttcttgctcttttcttatcaacaaactacattgatattccct

SEQ ID NO: 189137 - DNA, 5609 bp, Cannabis indica
ctgtcctgtaaattctgtaattaataattttctgaccaccaaaaaatgaagaaaaacaaaacattctctccaccttgaagcactacatctatatttcacattacataatttagttggtcaacggtcataacatgttacataacatgttacatagcttgaatcagctgtttccaaccttaaattgatacattgaatcccctttttctcttttgtcctttttgactgccaccacatttgaaattcttgtcataatgtataacaaatatctataatgtttttcttcacttatccccaaatggaacattaatccacaaaatcaaaacattatacttacaagttacaacaaataaacagatatgtttatttatttcattagtggagaaaatatcttcaacaatgataataataacacttattccctttttcttattttttcttaataatcatcagaaatgtttaaacaattatagatttaatagaggcagatgtataataacaacaataatagttagtgcatacaagtagtggggcagcatacataatacatatttacaagccagctttgccatatctaccatttgtaatactagtaaagaacaaatgggttttgtttttctggcatttctgcaatgctgaaaaaggaaaaggagtaacctttactcagttctctcccaactcaaaacccagaaaaaagactacatttttttcagttggtaactatttacatcttgtatctactttgaatctacagtctttcttttaaaagttgcatcttttcttcttctttctctatattgggtaccttttgctgccttcttaagttttatctttagatatgtttatggctttttttcttttttgcttttgtgtttggtcatgatcctttcaattcctttttgacccacattttagtattagtatcaaatctactgttccctttcttccccttgtgacccacattgccatcagcatcaaatccacagtttctcttctcaaaactttcctggcttattttggagtcttcccatttaaccctccctacatatttttcatttaatacaagaaaacagcaaaaaataatttctttttgaatacttcctagtacttgtccttgtaaagttttagcttgggatgccttgtatgtgtcttctgtgactagttagtacactgttattgggattttagatttttggattctgggttgtgattgatttgcataaatctgagtatatctgaactagtttgaataaatgttcttggttgacttggctaaatctatgcaattttcatttagatttacttgtcattccatctgtgtttagctcaccaccttggcactagagggattgcttcaaggcttcttcttttcccatcaattttttgttatttcactcaatcatcatgcaagagcaagaaaccatggatgagatgtttgttccatttagaggaatcaagaatgatcttaaaggtcggttgatgtgttacaaacaagactggactagtggtctcagggcaggtttcaggtaaacatattctgcttcccaagaaattttcaactctagttttcaatcaactggttgaaagtattgcactttttttagtagtgttttgttgttaacatgtttggttttctcaggattttggccccaactacatatatcttttttgcatcagcaattccagtcatttcatttggagaacaactagacagaaacactggtaataaaagttcaaatgttgtagaaattaacctgtatacagttcaaatgtagtaaaaattaataaaagttttgttctttctcttgtagagggtgttctcacagcagttcaaacattagcatcaactgctatatgtggaattatccactctataattggtggacagcctttgttgattcttggagttgctgagccaactgtgattatgtacacatttatgttcaatttcgcgaaaaacataccagatttgggaccagaactctttttagcttggtcaggatggtatgtcttttcattaatttctcagcttgtttacattgttgtgtgttttgttggaaacttctttgatgatttgttttatctttatgtgtagggtatgtgtgtggacagcttcattgctgttccttttggctgcactaggggcttgttctctaataaataggttcactcgtctcgcgggcgaattgtttggctttcttattgcattactctttatgcaggaagcaatcaaggtaatgaacagatttctccttttagtttatcatttatttatgcttctagtcttttcattgtttgttactagtactactactgccttgtgatttgtgttttgaaccatgaatgttagggagttgttggcgagttttacatccccgaaagggaaaacccgaattctatcgagtatcaaccttcatggagatttgcaaatgggatgtttgctttggttttatcatttggccttctactcactgcactaaagagcagaaaagcaaggtcttggcggtatggatctggtaagtatgattaacatttaaatgtgatgttatgtatggaaatttttagagacaaggcaataaattaagtacatgagcatcatgtaatatgaaactcattaaagttaacagtcaagtaagtggtcttttgaaggcattgctaatgaacaattctgctaataaggttcatgaaaatcatgcaaacatataggactcatgttcaaatttttcgtcaggttggatgcgaggcttcatagcagattatggtgtgcctttcatggttttggtgtggacagctgtgtcttatgcaccaggcaaaagcgttccaaaggaaatccctaggcgcctctttagtccaaatccatggtcgcctggtgcttatcagaattggactgtcatgacggtatggctatgtgattgttgttatacctgttgaattttttacctttagaaaggaagtggttcccaatattttcctctctaaaactacaggaaatgctacaagtgccgattctttatataattggagcaattattcctgcaacaatgattgcagtgctgtattattttgatcacagtgtagcttcacaacttgctcaacagaaagaattcaatttgagaaaaccaccttcataccattatgatttacttctattgggtttcatggtatgcaaactcagaactttttcccttctctttgacataatttctcatttatattatcatggaaattatgtttaattttatggggtttcccttatgtgataggtcataatatgtggtctccttggtattcctccttccaatggagtaattccacaatctcctatgcacacgaaaagtctagccacacttaagcaacaggtagattcttcaaccgagagacgaaattcttgttgtgcatagatgcattcttcaactatgatcatctgaataactagtgagtcttgttgcagttgcttcgcagtcgattagtagctgcggccaagaaatgtatgagtaaagatgtaagcttggggcaagtgtatggaagcatgcaagaagcatatcagcagatgcagagcccacttcaccacgaagcttcagctacggtataatattttgttttcgaacatagcttaacaacaggccaagatgatttattagtacacacttttgattttacaagcctaaacatacttataattacagggattaaaagaatttaaagacacaacaattcaagcagcttcaagcacgggcactgtagatgctccagtcgatgagacaatgtttgatattgaaaaggaaattgatgatttattgccagtcgaggtgaaagaacagcgtgtgagtaacttgcttcaatcgacaatggtagcagggtgtgttgcagcaatgcctttcttgaaaatgatcccaacctcagttctctggggctatttcgcctatatggccatagaaagcttaccgggtaaccaattctgggaaaggattttattgctcttcatagctccaagcagaagacacaagtaagtaactatttcagtctttgttttctttcaataactcatccatttagtgtcatattcccattttattggtgattggattaatttacttgcattgatgctcttgttcagagtgcttgaggaatgtcatgccacctttgttgagactgtaccttacaaaacaatcgcagcgtttacaatcttccaagcctcttacttgcttgtctgtttcgggattacatgggttcctatggctggagttcttttcccattaatgatcatgcttctggttcctgtgagacagtacattttgcccaagtttttcaaaagtgttcatcttcaagatttagatgctgccgagtatgaggaagcacctgctttatcattcagccaagctgctgtaagctactactcatatctttcggttttttggtgttgaataatgcaatgtaatatttctttattttctcatacaaggatggggacataggaagaacagcttcgtttgctgacaatggagaggtgtttgatggcatgattactcgaggcaggggtgagttcaggcgtatgtgcagtttcagggtgtcaagctccggttcaacgccatcaaaggaattcagacgtgtgcagagtctggtgacaagctccacagcaacagcgtcaaaggatttcaaacgtttgcaaagtctacagattccacggcaatcagacttggtgcatagcccccgttcaagtgagctgagtcctcggcttggtggaagagggtctccaagaaccggagaactaagacaatcaaatctagggaaaggtggttagcattggaaaaaactcatttgtcaaatgaaatttcaatcaccactagcaagccttcgaaagcgaaaaaaatatacatagccaatgttttctgacttaatgagcccttattattaggatgaaagttgtctgaaaatgcagcaagtctgctggccatttttctagtcttcatttttctgagcatgatgtttcatattttccaaatgcattcaaaggatgctattattttgtaccacaacttatatcaaaggatgattctaagtaacatttaatgattggtttttattctttcccttgtctcatggcttgtttatcattattactttcataaaattcaagactaacaagttaagtaatgcttaagcatgcaacaacaacttatagtttttatccaaaaaaaaccacttcaacaaaatagccttgaaagaaagctacatttatgattatgactctgttctcataccaaatctcaaatgttaaaaaattaaacaagaaaaatatctcatcgatacaaactcgaacaacatcaagaagtcttgctgaatttacgaccagacatcttctcggactcgtacaatatgtgatttataagtccccttgctgcactgcatatcagaacacaaaaaaaataaaactctctaaccaaattgctgtgatcaaaactatctctaatgagcttttacagtttacttcaagctgtcagatgcataggaactaagaactaggcaaagcaaactaactcatccttgagcttttgaatttttctctggatctgtctcatgcattgttttttttgaactgctgccttatcatt

SEQ ID NO: 189138 - DNA, 691 bp, Cannabis indica
tgaataagaatcattgtattatttaaaaccaaatttacatccggccaattacaaaccaaacaattcaaacacattacatatcacacccactaattatttacacctttgagcaaaccaaactcttatctatattttgagccatttttgacattagagtaatttgtatatctcttttgattttctgtactttatacaccataatttcttattcaaaaatacatcatttcggactctccaaatgtggtataccaacgctgtcagggtagcatacatgatattttttttaataacactcaattttttttataaatccattatactagctgcagatagatttaatgaggttgtcgtccaatcaaaccaatttttgatcccctataagtatttcctgttgtactggcagtgaaagaataagtgagttatgctctcatttttcagctccacataatagatatgtttgatcaactaaaggatcaaacttttgaacttgatctctagttctaagtatttgcaacattaccaaccagagcactattctgtgttttggaatgctcaatctatcccaaattatcttacaccaatttacttgaaatgactgatcaaatagtaaatcatgaccaagtttgatatcatatctcaaagtagcaaatgaagagagatttatcatagttttaaaggcatttttgacaac

SEQ ID NO: 189139 - DNA, 2747 bp, Cannabis indica
attaaaagaccatattttatgtaaataaaattttaaaaactgtgaaaatatttaaaattctgaacaatcttatttttataattaaactttgttgtttttgtgtttttctatttttttgaaataatcctttttttctcttcataatctatataggtctaatgtttaagttttatttttttactaattaatattatcttattttagtcttaattattaaatatttttaatcaaatgatgtaaaattagtatgaaaaattgtgtaaaaatgtatgttcatataatctatagtatatatatttatataataaagatgagtaagtgtacaataatttatagtttagagtgatgaaaataatggctaaataattttactataaaaatgaatgaaagacaaacattttgaaactacaatataattgttgagaaattttttaaatgtgtagtatgtctaatatgtatatcatacaaagaaaattgaaatttctactatagtgcgcacaatagcccattgaaatctagatacaattcaaataaaggcaatctcacactaacactaggtaaatactaaatagaatgtctttttaataataaattaaccatgattagaaaattaataaggtttgaattaggggtacacctaggttgggttggctgggttaaagatattttaataggccaactcaatgattgcggtttgaataagctataaactatttaatttttttattatacaacccaaccctacttagtacaataatgtaagggtgggttgggttgggttcattgggttgagatgaatattttaaactttaatatttatgttacaaacagaataaaattatttaacctagtgcatacacaaaaaaaaaaaaaacgatgcatatttatatgtgtgtgtaatatagtgctttaaaaaaattaagattgtagtggtatcattgtgtgggtagcaaagttaataatagtaattgattctcacattaagcttgttcgtaaaagtagtatggtaactatagcctacatgttaattatgtgttttggttaattcacgttcaaaggttatcacaatataatttatttatgtatgaaaatgtaaaatttatatttgtatatattttgtgaatataaaatatattttatgtatgtaaatttagaacatcttttaagaaatgggttggtttgggttatatagagttaaaatgtgtctaacccataaccaacccataattatatgacctatcacttttcaacccaatgagtcatgacctactcttaacataatcctttactacaaaaaaaataaattgggttggctgggctaaatagtttggttcatattttgtgcacccctagtttgaattggagcgatattttcaattttgatttgacaagaaagaccttttcttgtaggataaaattaaaattagtgtaaccacaaaataaaaatgaggtagtagtaatgtaggtaagctaaaccacaactagaaaagtgcacgtgtccgttggtggaggggacactttggcgacccgcaggtgagtccttgatgaccaaaattaatgaaattaataaagaaatgaaggcgttgatgtgtatatatgtgtgtcagagtagaaagtctaccttaattaataatttccaattttattttctaaaaagaaaagaaaaaaaggaaaggaatcaaaattaggaaagctcaactgccaaaagtgacaacccacacaccatttttgtttctctctctttctcttcttcttcttctcttctctgttcatctgagattgttgaagaggaaaagagaaagctgagtcgaagaagctggtccgaagggaaggggatgcagatgatctccagggcatcctcctgtgcaatggcctccttaccttgttcttctagggtctctctctattcccatatcttatatgattttctctgtttgcagaattgtggtttaccctagttttctttttcttggttgagaaataattggattttgattaaatgtaggttcaaatctaaacttttatcgtttaaaagtaaagttggttgctttcctcagccattttgatcttgttttttccttaccctgtgggtgtaccatatgattttctctgtcatattctggtgtataacataatttagtggcttttctctttctttattattattattattattattttaatgggttgaaaattattataagcaagagacattgtgaaggctatctaattcttatcactttgaaaagggtttttcttttgaaaccctttcttgatatttttgtattctagtattagtagtctagttttttaactttcactgcttttttcaaattttactgctttaggtgaggtggattgacttttgctatgtagtaagttaagttggattgatgcagaaataacgactttgttatgacatcaattgtgaatgccaaagtgttgaagttgactagagggctcataattttttctatttctaaatcttttatatatctttgatacaagatctaatctcatactaagaatgtctacaatcttgtcaccttgttgcttgttatgaaataagaatgtaggatgttgctttaggtctcatcaagtcctcccttagatatgaaactcgtcccactaccttacctttaattgccatcctaaacatcttaattaatcataacacatcacctgttagctgtactcttgttcttatttcttgtaaggtgattgatttttcaatttttcttgctatt

SEQ ID NO: 189140 - DNA, 3360 bp, Cannabis indica
gccaaagaccccagaatattagcattcactcttgagaagtagtcatgtggtaggaaatgtatttggacccaaaacggatcgagttaaacgataattccttagccccgaaccccgatgaccacgagaggagaaccaacatatctcctttgacgcaccacgggccttggtccaagacccttttgctagccgccccatttttaaagataaatctaaaagtgttagttccagccagagtattatccattggttctacccaaatccgggtcttccacatagtggagcaagcattctccacatccttggcattaaaggttttggatgtgataaaatttgccaaataggcacaccttagagaaaatcttagtagttaatacactaggggctagagagatggatacctcctttaaagagaggcatctacccttcttaccattaacagagtcaacaacctcttccatgatcataaatacccaaatccgtccaaaacaaactcacacacaaagacaatacaactatctaccaaccacctgaaataaagaacacaaccccccaccacaaagtcaaaaagaccccacaaagaaaagacaagaatgcaaaacggatgaccaaaacaaggaccagggacaaaaagaaaaggcaagatttcaaaaggtcaaaaaggaggggaacacaccgtgagaaccagagctaaagaataacagaaataaagcaagcaggaaaagaaggaaaaaaagacacagagagaatagtaaaagactattctcccctcgagacgaggcatcccctcaacatgccagatttaacataatgtaggcttattgtatcttaaatgaaaagacataataagctccatgttattttaaatatttttttcttatttcatgaagtgtgtcaaattattgatagtttcttgtagtgaacaccacatttctacattaaatttctctagtttaatggttaaagatatttaatacaaaatactcaaacatttatattaagaatataaaagatcatcgtgaagtgacataataacataaaatagtaaaaattctacaatatatgtcataattcttctttttcatcatactcaatatataataaagaatcaaccccatcatttttacaataacaattctcacatgtaaaatctctttcaacatttacaaattaatcatagctccaaaaccaatacaaaagagattgaatcatcacaaattattctatactaaaaaaatgatgagtgataaaaactatgggaaaacactctcgtagctatagttccaattaacaatctatagaaatgcaactttgtgcaattgtagtaccatccactttgctgacaaaggggttaatctttacccagacaagagagaaaacagaggccaaaagcacagaccagagcacaacaatggttggtgtcctgttttggcgtcccatgagacccttgaggaatggatagagatgaaggatcacccaaaaggcaaagaaaaccttaccgaaaagtggtccccaagcctcgtaccctttgttcaaggcatcagagaagcctgcaacaacaccaaccaagttaacaatgagaagtgtcgttggagggatcaaaagggttgtccatttgatgatgtagagttctccaaactctgaatcgtcagcagattttgttgtgactgtaaagttggtgtccaaaccagccaacattttgagaaatccttggaaaacggcaaaaagatgagctgagactcctccaatgacccaaaactgctcgtttctccataactcttcaatggttacaccactccatcggagttcaagtacactagttgagatgatggagaagaaaaggcaaaggaagagaagacttgccaagtttgagagctgtgaagaatgagtacatgcatatatatagtaagttcttttggcttgtcatggctcataaggctacaactcatgtaaaagttactatgaaaatgtttacaatattagtagattttagtattacacgtgtgaatctatcttatatatgaaggttgttaatatgtgaattttgacattatttttagtgtttagagaaaatgaacattgacatgacaacatatatagatactaaccaagtgagtaatttctcgattttatttagatgtgtacatatgtatatgaatgtcagatttgtgtgaagaataaaaagtaaaagtaaatagttaccgttggtatgatgaattttccagtgagaaggcaaatggcggggattaagcaatacgcaacgagagggaaggatgtgaaaggatagacaatggtattaatataagcaaaacgttggagcaacctaagacgaccccctgcaaaaccataccaaagtggacaatgtctactaaagaatatctccactgatccaagggcccaacgaagaacttggtgcaaacgatcagacaagttgattggtgctgaccccttgaatgctggccttatgggcatgcagtagattgatctccatccacgacactgcatcttgaaacctgttaggatatcctctgtaattgacccatatatccaaccaatctgcgaatacaaagcaataattttgtaattaagaagaaaataaatgtcataggttatacattataatttaatatttatactcataaaaagtgtatagaataatagtcatcttacttctcttccccattctgttttctcctcatagccacaactaatgacatgaattgcctccttgattaatgtcgaagggttaacagaatcgggcactcccccattctccattagtgtagattcaataaagacagatgacaagccaaaagttttctcaaagctcatctgggagatcagcattgacctctcctgctcatcataatctgtaggaggaaaccgaaaatgaattttatgtattgaaaattatgtcatgatgatatgtcgaaattcaactttataaaaactagacttactatctatctccttgaggttaaaaatggctgcatcaagctcttcacgttttgcatctcgataagcctctgaaatacttttggagggcttctttgttggacaacaacatgagcaacatccacaccatgagcatgatgaagaaggttttggtagggttggaatagaagaaggactgtatccataaagtgcttgtctattaaaacaacaacctgttcccacatagactggtccttgaataccatctaaacctttcatgttaacctgtaatcagaccaattagaactctcataactcaatatgtcaagtccacaattttgtcacaaaagttaatgacaagagtgcttaaacaaaagacttggcttctagtccatataatataaaggttaaacttacgtcaaagaaaac

SEQ ID NO: 189141 - DNA, 2264 bp, Cannabis indica
cacaatagtatgtacctaccttagtccaacttaaatatatattaattagttactagctttcctctatatctggatgtttagcattatatatgtgcaagagaatttgatagaaatttaccttgttccaatagtctttgtccatcttcatagaagtaacaacaacttttgggattgccatgacacgcttatacacttccgttctacatttcttggcttgtttgctcagagacaacaaaaaactactcctagttccactctcagccacctcctcgacccgttccagaaagtaaactaacggttgctgacatgggtcgtcgctcacgggtcgggtattgaaagtgaaaggcccgtcactcgaactccgccacgttttgaacgtctgcaagggcatttgaagttccgaagctgctaacatgaaggggtaaatctgcaaagtatagccccaagatatagatattgaccatttacgtttcttgtcgtagcaaaaacattgttgtaatatacgtcccgggtcgacccgatacgctttcattaaggtctccactgattctatttgggtttgccccgggaacaagggattcaagtaatcaagatggtgcagggataccagtggaaccaatggatgtgctgctagaagaccatacgggtttcctttaatatccaactgaaatattatcagaaaataaccaaatggatcataaatacaccttagagaaatattttaataagtaaaaaatgtgataataaatatactatataaatctatatactccatactattgaagttgaactatagtccaaaatgatcacatttgactaagcaaaaatgtgcaaaggaaacaacccatgcaccatggtccataaaagcagggtacccttttcatgaaaagattgtttatgtaacgtgtaggccagactgtctcaattatattactctcctcttcagaaaaaactagggtgggcttagcaatagcaatggatgttaacaaggacaaacaagttgaaacaaagttacatacgagccacatattatttttatttataagatcatttcgtgatatgataatgagagtaagattgggaccaagcagtcaaattaatggatgtttgagagacgagtcatagtataccacttgttaaataaggggtaacatgggtcaataaatcttcattcggcggattatatttagctacttctttgatttaggtatcggcaaattcatttacaaaagagtagttatgataaataggagaattgttgtaccaaaagattacaacagaacaaaacgcaccaaaattacctgctagagaacttttatttcacaaatatcaaagctccatgtaaatttgccacgtctcatgacaccaaaggctaggaatgctaccctttttacttctttattagtttggttcgaggagcttttacagatggcatctttatttagtttttttttgttttgggggctatctttctctgcatttttttaaaagtaatcatatcgaataaaatactaaaaagcccagtctatttcattctgtctataatccaatcttttattcgtttcacgaatcacgccgtgatactcatttcccttactagcttttctctcaccaaaacatactcacaacttctttaaaatagagaaagaacatttcaatagaaattttttaaaatatttaaaacaatatactaagaccatctttaattatacaacttatttttaaactaaaatagaaagcgagtcttaaaaaaataagctctaactataataaaaaaaaaactcactacaatagaaaatggataaaaaaaaactctttaaatatagagctctatattttttttgctaaattgttttaatattattttaatcaaaaacagtattatttttcattattttattaaattagtttatatttaataaatttaaattataaaatattattaaaatgactaaatattaactaaattaaagaacataattgagcaaaaataataaaaataactttctactttaactttttagttattttagttaaaatttaagtaaaaaatatagaggaccattagagatgctctaaaaacacactacaatagatgttctaattttttttaaaaatttatcattcatgttttacatttataaaatgatatttattactctaaatatattttattaataattatttttgttttaatattatctatttaaaataaatataatatattaaaattaaaaaaaaagtaaatttttagtgatgaattt

SEQ ID NO: 189142 - DNA, 2965 bp, Cannabis indica
tagttaaatgatataaagaaaaaagataaatatatggtgtaaatgtaaaagttaatgtaaaataaaaaaaaataataataagactttggtaatgcattttgaaagacatagaaaaaaagctattgggagtgctcttgagggtgaaaactaacataatagtacaatgtttactttaatttacagtcctctgttttcggccagtcatttgttcttggctcaacctgcatactcaagagtgtgacatgtccataaataatagtaataagatgagaatgtgaatgagaaaaaaaaaatggaatagtcattccattaaaatgataaatattattttcttttcaagggacaataatataaactttgtttattactaatgataatgacagtgtctacactaaattatgacctgtgttaataagagctataatagatggatgagataaaaagacgtttttcctttacgatctgtaaagaatatcagtaccatgaagtatgaatcttcgatatacataaaagactaattattttaagaaagcacacaaagatgataaaacatcttattaatattatcattttaagacaagggccaaaaggaggatacacataagtcattctcctcacgtggcattcccataaattacaaattgcaaacgacacacacttttattttaccaaagcctccattcatagaaagcttaagcttaacataacacaaatcacaaacccaacattaaaactctcccatgctttatttaatactagtacatattcagttgttggtttcacatgacaccgacacaaaatagattaaagataaaaaatagcataagtttgcctcaaccccaccattggtggacagcaactccctcgtctttaactcttccatacaaatccaagcattcccaataagccctcttactcttattttctcccttccaccattggttgttgcactctaaaaacaactcgtccaccaaatgcattgttttcctcttcaccatctcctctaccactcctgcttctgccttcatcacaacatactcttcttcacgcacattcatcttcagccaatccgggacatcattctcttgaaaaatcactccactactaatagccccttcttcaggctccaaatcaaggttgtaaacctcaaactcttgctccatttttgggtaatcttgatgaaaccattgatttacatcccttttatcttcaggtaaccccacattaacaaagactcgacgcctaaaaccgtcgagagagtttcccatcaaatggggcaggaacttgatcttccttgagtagttcttcaagttttttataggccatctcggtggctcgagcaatgcttcttccaaatcttctaaagctgcggctttcgtggcctcagttgccaatcctaaaagccgtctctttggggaatagctagaagctgaagaagcttctgtagagccaattttcctcatggctacaatggtggatgaatatcgccttagataagcgatcttataattggtcatgtcccgtagagtgattgccttctcattgcttaaggggaatgccaaaatcccaccaattttcacaatatgatccacaaactcaacgtcaacagccaaattggatgcgtagacaaaatcaaacaactcttcagagaatgagctttggccctccaaagccgtatccattaccatgtccatttgattagcatcaaagtttttaagcttgtgaacggtactaggaacaatggggctaacaaccaaagccttattactcttcaatagaagcccctcgtcgaccaaatcacggagaagcacatctaattgctcaaaatcaatggcaccagtctcgaagctggaaccagaatcagcggagctccatctcattatggacccaatacatgggaatgtaatgaaaatcacagccagaaacactgaccgagaaattacacgcaaaacctttggatcaggaagcttaatgaccaaaagggtatttgaattcaaccccattctttcaccatggacatgcttgctcatgtttttgttcttggctctaccactcccaggagccaattccataactgtttccctattaaacttttatcaggtaaacagctagatccgatccgtagcttagccaaagcagagcttgagaattgaatgatcaattaagctttaaattttttcgtttctcaacagaaaaaagtaaaacccagaacagcaaattgttcgaaaatttgatatagaacagagacaaatgaatctaacaatcgggaagaaaatgagggaactagcgagtacaaaacctggaagcggtgtggtttccacccacgagggctactcgagtgattcggattctacaccagaggagcaatagttctctacttctctcaaactccatcgtagttttttcttcttctttcagctctttctctctctctctctacattccactacctacccagacgatatgaaccggatcatctgaaacccaaccgccatgacccggtagaggaaagaatccggcaatgtgggtaagcaaggaaaatgaagagagagagaaagaaaaaaaaaggcaataataagaaaaagatgggtttgtgagttgtgagatgtgaaaatgaataattggagaaaggagggagatgaagatagatttatataaggcgaagggtgaatctgtggtgtcccatgcaaaatggaggtttatttagtaaaattttggcgtgtaagaacagtgttagtttttttttgggtgtttgacaagaaataatagcagtaataatataaaaaagagaatgatgagggttaattatagattatggtggagtcccattattaatttaagcttaattaagtagatgacagtactttccaattcacatgctatttattgctttgctaatgtaaattccttggttctctcgtcagatatttcttcaattaatatttagaatttttcagtttacatg

SEQ ID NO: 189143 - DNA, 2630 bp, Cannabis indica
aaaaaaaaaaaaaaaagtttaacctgtacaatagcaatatgtaacagaacccctttcagtcctacagcaatagaggctgcagccatgactgcaggacccataagaaatcttacagccatggcaaaagtagcaactgagttcccacaagcaataatcctcggttgtaaagccataaacaaacctgtatttataataataataactcaaatgaatatttgtactaatatagtaacttaatcaagtcttcagtcttgccaagattttaaatgttctcttcaacttaccaagactgaacatggccattccaaggcctgcatcagataaaattttgatggaactggctatgatagcaggcattgcaacatgccacctacaatataaatacatacataatagttatagtgtgtggtaaatggtataagaaaaattaattggtttggcttaatagagttttcatacttgaatgagaccaacgaccaggttaggccaatgaggctagagtaagtgtttggattacggattagttttctccaaaccattataagaataagccttgtcataacactggctggtggcattgctgttggctttaaatcagcctgagatgcagccttggggtgaagctcagccgttgagctagaaccaagcttcgaaagcaccggaccttctcggtcgatgccatttgagacctgtctatttgcaaaggtgaactcatcgcgaccatactcgtcatagtctaaacacagccataaaaaagaaagtaattaaacatattgtagaaaaagacattacttgtcactgaagatgacaaataagtaagaaacaaaacaaagaatattggggatttttattttggagcgcgagaaaaacaaacatatatgttttggtaaaggttaggtaaaggtgatgggaccatatatatgagtaaaaacgcataaaacaaacctaaagatttaaaagcacaaataaatgaaaagaaaaaataaaaccccacattggcacattggatcggacaactaaaactaagttagtaaacaactaataaggtcaaagattagtgttttcaaaccttttgggttatgaggtaccccaccaagctcattcccatggccgaagtctccacctctgaaaacatcagatacaggcgaagcgctggagctccatacgaacatgtggagatctttaccaccaccatcagcagcagtagcaggaggagcagacccatttggtttcttcttcccaccaggtccagcaaccggagaaaatataccggcactcggcggagcaggataacctccattgttcccttgctgaaaaaccacaccatttcctctcccaccaacttcttcatcataaccaatgttcccaaaattggaatgccgggggctcacattgctcaacatgttcttcccaccaccaccgttgaccatggagtaaaagtcagtgtggttaaagctcgagcctcgtggggttgggtttctggaagactgaagtgaatatatctctgcgttggtcaagttagaaggtctgggagtcaacgacacaccagagttgggaccatgagaacgcctggagaatatctccgaccttgagctcgttgacttccgaaccgtcacgtgtagctttccatcttctccgacttcagcatcggtctgtagtggctcttttccatctagagagatgatatcagagtcaactctgaaggatataatggagcctgccgtgtctggaaactgctcgccgatcaagatccgagctcctctatattcgaacaagaagagcattaaggtgtaccagatgatgcattggaggacaacgatttggaccattaagcttccagaatcgtgaccgtacattccttgaagtaaaggaatgcccataacgagtgtgtttgggagagtagagagtgagaagagtgttatggaccattccaaggaccctctagcactggctctggaccaaactaaaaggacccccaagacgatcactttttggagcgtatctgcagctatgaatctgaagttcatggcgtacggattattggtggagatgaagtggaaagagaggagtggtacagcgaaaagtgccacaaaacgattgattccagagcactggtcagggctgaagattttccaccattttacagagccgtaagccaagatcatggccacatatagaggcaccacagctgtcaagacatggtaaaggtctaaaagagtgatcatttttgaaagggtttaaggaatgagtttgaaaacccagatgaggggtttgggaggaatatatgagcgaagagtgagttagtgagatttgaacaagaggttgtcagagcccattttttagggaaagtgatggagaatggaggaaaggagtattaaataaatggagtttgagttgcgttctttctggtgtttctcttgtcccgttagagagagaaagagagagagtaagagagagtggcaagtaggggaagaaggaaggagtgaagtgttatatttatggcgtttcaatggtagacaaggtaataaaagcttcaagcttttagagtcttttggttggaaagctaaaagaaacgaggtgaaaatattaattatatcaataaaatatcaaaattaagagagagagagaga

SEQ ID NO: 189144 - DNA, 514 bp, Cannabis indica
atatttatatatgtttacgctatgtagataatatccctttgattagggtaatagtttattatctttagttagttgattgtgtaattatctcattgatatatagtcatgtactgtttaggaataatataacaattcttcaatctttaattcttgattgagtgatcttatgggtttatgaattaaaaaatggtgtctgattaaggaacgggtctcttttatatacttttgacttaagattaaatttctatatataaacatattaatattagttttttgctctaattttcacatctgtccctttctatatatatatatcacacttatgtcaacatttgtctagattaatgacatttttctttcattcttatcaattaactccctaatatatttacattaaaaaattaatcgccaaaagtggcattttgttttatttcctatccatcgaaggcaatatatatccctgaatgaactttcaagagtaaaacaaaaaaaaaaaaaaaaaactacatgatac

SEQ ID NO: 189145 - DNA, 1633 bp, Cannabis indica
tatatatatatatatatgctgcatgtgatagtgacaaatattgtgatagcacatgtttttctcacagccaaactgaatatggaaacatatggaaaaacggtcccccactactgagcaaaataataataactaattaaatttggttgtttattgaatttattaaagaaccaactcctctctatatagtatatactagttagtttctttgttgttcaatatctcattattgatcataaaagtgatctgggtacaaaactagagtagtagtgatcatgaatgtgaattgtcaatgaaataagaactatgttataactgcaacaagtttctgattcttcacaatcaaacaatgatgacaattttggtatagtcacaacacacaatatgatcctaccttgtatgagaatttgattgcccacctaccaagtcattcaatttaaagttcactggaaagagataaggatgtgtagataaaaaaacacataagggatggtgattagttatagtaataaaaaaaaaagcaaggaataatgttgtggggcttgtatataaaggaataggacaatgtgggtagctttggaaattgaagcatgaacaaatgtctcatgtttacttagctatatgcattaaatagtgaaatggacctcataagaagatgaggtagctaggcaaggatagctgtgtagtggaatccaatccaacacagtggtgggtaacagtattgctgtcaaagaaaatgtgagtgcttaccaatcttatcatgaagtggaagggtaggaatccttagtcacctttttatttgggccacaatgtgtgatggtgaatgaatcaatgagtctgcatcaaacaatcacttgatgtaaaagtccaactccataatccccaaaaggatggcaacagcagaatatcccaaattcagactaaatccataaagggaagatctgttcctcctttgtgtctccatttttttggcagatcatgcaaaacagatcacatgtttgagcagtgaacaatataaattaaaaacacaaatgtgatgaattctcatttgataaggtcattgttatagctatgaaatacgtggaaagtaggaaactaggtctgcttttaagtagttgaagtgttgtaatgtaagtctaagtccttctaataaataagaatttgaacattgaaaattctcctagaaagtttgtccattaaagagcaagtgggatcatagcagacagttttttgggctattttagttatacattatcttggtctgctaattgggatcttcagcccatatgcccatgctaactgggccaaaccaagacagaaaatggccaagtatcttcaactatagagatcccaaatcacagccaatattgcagcagcttaactaggcaagtttccacctggttaaaccatatgaggtccactgatgctttaccttgtaagcctctaaattggaaagatcagtccattctaattgggctaattcaaaacaatgaatggctacgttccaccctgtgttttggcagagctcaccagatcagtccagacagcctctggtaaagaaagtttgtcactaaaggcaaggactattgcttcccaagaccttagccgaggtgccacattcttgcaagccattttt

SEQ ID NO: 189146 - DNA, 1100 bp, Cannabis indica
atcttattagtacataacaaaagaatagtaattaatactttcaagataataatcctcacagtagacaaacgtacatcttgggattcttacataagaaaattaacaaagaaatcatcatataatatattgcatatattactatgagagaccaaggtgagacatacgtacggccttcacatacctaaaaccataataaaaaaggatcaattattacaacaagatcatgatatcaatatcataatttataattaactacacattttctttcttagggtttacctaacaatgagtattaggaggaattggaatgcgacacagagcgggtagttgcatggcaagattgcgatcgacaccaagaacgcccattaggaaagagttgttcaagtagttgcaaaaacataccaagttagcgccccttagcgcatcacaacattttttggtgaggggcgcaggttgattcttcactacggctggtcgacatgcattgaggccatcctcactcatgttgcatacccccaatgccccttctaacatgcacccaacaattattgtagccataattactactttcacacctaccaatttcattcctttcatcattttttgataattataattagtactttgttattaatgtatttaaaaaaaccaatatgcaagctaaattttaatgtttgggatatggaaatatcgtatgcttatatactagtgacaagactcacaaccaaaactagattaaacccacaattttgagattatgtaacctattttatctatttatagcacactcatttttattttatgattttttttattatttattagtcaaaatttcgggtataatatggtctcattgattactaatataggttaatgatgaacttaaatttgtcaataattagttattaggtaatgggttgtttaataccagagtttgatttacttttcttcggttgttataattatgttaattgatgacgtgaaatcaattaatttttataaatagtgtttttgttcttgtaattagttttataattttttgaacaagttattagttttgcaaatacctaattgtaatctatctaattaagaagaagaaa

SEQ ID NO: 189147 - DNA, 2060 bp, Cannabis indica
ctttctcgtgtgtcaattcccaaaatgaaattctcatacgatgttgatgctatggagttacttgaagaaaatggattaactttgcccttcactgagggtaaagcagatttctcaaaaatggtttactctcatcttgagtctaataatgtttttatagggactatgcttcacaaatcttgtattgaagtgaatgaagaaggtacaaaggctacttctgccacctcacttcgttttgaaatcgaagctgaatgtgattcagattcatctcctcccccacttcctacctttgatgctgaccatccattcatgtttatgattgttgaacagttttccaaccttgtttttacaggagctgttcttgatccacgaaagtaaaaacctttttgtgttatgcaatcattaagtagtagtatctacacttcgttttcagttattttcttctaccttataataaagttttttgaaatggtagtaaaaatattaatatatgttatgttttacagtaaataagtaaggctgaaattactggtaacaaatcaaatatataagtggagcaattttgtagcataaaaaaaattgccatttgaatatttgagaaagttttattaccaagatagttgatccacatcaaagctcatcatgagagctttgtttgggagagttgtgttgattctccaaaaggtatgttactgccaatgatgcatgtaatgctgctccatatggaagaacatcttcattcactgtaaaattatgtgattgtgcaagttcatccacactctttttctcatctttcattccaacgaaaaataagtatcctggaatcacctcttggtaccaagaaaaatcttctgatcctaatagtagtggcatttcatgtatgttcctttctcccaccacttgagttgcaacctttagaaaatgtttatggagattttgatcgtttacagttactggattgaaagcctccttttctgaatcgaaaagaacagttgcattgcatctgtttacactggcttgtgttgttataacctgtagtcaaagttcatggaaaaacctttgtttgataataatctgtacagaaaataaacgcacaacttgattaggatgaaatgacatatacctcttctattcgatgcttaagttgaaggaagctttcttttgaaaatgccctgaaagagccaccaatcgttacagaatctggaataacattaaaggcagaacccccttggaattttgatacagtgactacctgcaagattcttctattcattaagttaaaataggcttaaaagcttattagttgtagttggaaaataaaatacaattatgatagtttctcatgttctcattctgattcttttcattagaaataaacaaataaaaatgtgtcctgcaaaaacaaaattttaatgagagagagagagagagtgagtgagagaggacctcagactctaagggattagcttcacgtgaaacaagatgttgcaaactaacaattacatttgatgcagctaaaataggatctattgtgtattgaggaatggcagcatgaccccctttcccacttattttcgcctcaaaaaaaccgacagcagccaaaataggaccggacttacaagctactgagccaattgggagactaggagagacatgaatcccaaagatggctccaacattgtctagtattcctgtgtctagtattttctttgcaccgccacctccttcctcagcttgttggaagacaagtaggactgttccctgtaagaattacatcagagaaaatttagaaatactagtcagaagatgacatgaaattaaaccagttagcagctacaataacatgaacaatgactcttgtgagtttgattatcacagtacaaatccagcactagttttgtaacacttctaaaaatttgaccatttgagatgataacaagggagctaatattcaaaaattgagttaattggtactttaattgactaataatcactaaaggtatgttagttttggcaatgttcgtatcagacaaatccaaaagttcaagccaatcatgattaag

SEQ ID NO: 189148 - DNA, 2189 bp, Cannabis indica
tttgtttacactgtgaagttgttttacaaactggttcagtcaacctcaacaattccaaaccacttctagttagagttatgagttatgtgattatagctaaatccacttgttttatatttaatcgacagttatgtgattatagctaaatccacttgttttatatttaatcgacaaaagtgatgtttttgcatctttaaatctcacatagatgcaaaaatgtcactcttggtccattttgccagtggatctctcaagcccaattattatcaggccttagcccactcgctatagaagaacacagtaacagaactcgttatattcgtttcaggcaagctgcaggctaggctagacaagtggaagtctgcttagccatgtcgattggctctgtacaattcaatcctccgttcacagccaaaaggtacacaaattcatcatatccatattcacctgttaaaggtttgaactttggttttctttggttggggatatgaatgacttttgtaccttctttcttaataatgtaccattaaagctcttcagtttgcaaaaccggaaagaacaattcaggctgggctctcctcaatttcccgaaaccgcataatatgagcagaactttgtgtttgggaaatgagaaagtgggattgagtcaaatctcaaatggggttggggataaagacgggattatcatcgtcgaccatggttctcgtcgcaaggaatcaaatctcatgctgagtaaagctctctatatccaaagctttttgtattttgttatcatttttagtacttttgaatcgtttagattatagttgaattttcttttatatgaatttcagatgaatttgtggccatgtttagagataaaactggatacaatattgtggagcctgcccatatggtatggcagctttagttctctatgaaattaatctcaaatttgtaagcttttgccaagtatttattctgttgtttttatgagacaaataggagttggcagaaccatcaattaaagattcatttggtaaatgtgttcaacgaggagcaagtcgggttattgtgagtccatttttccttttccccggaagacattggcatcaggtagtataataatcataatagcaatgatgatacttactttgtagacttcaaaagctttggtaagatgaattttgtttgatgtttacaggatattccttcactaacagcagaagctgcaaaggagcaccctggtatcccctatatcataactgcacctcttggtctccatgaactacttgtggtattgaaacttctttattttccatttcttacactattatttaaacataggcttggttttatggtcaaacatagttgaaatgaataaaaaaaaattgctatttattttataatattgtacaacataaattaattccctgtgatctaactagaacaagtatgaactgaaaaacagcagacataggatcaagtgatcaactatctatggtttcttagggtagatttttacatttagttattagtaaggctgtatttagtaggtaatatagtgcttgttcgcagaatgtggtcgatgacaggattaaacactgcttaagccatgttgctggggatgcagatgaatgtgctgtttgtgctggaactggcaagtgcaggctatactgatctacaaaagagagtgagctgtatatttactttgcattccctgaattcataccaaatgcttctcttgcccaattccagagtcttgaaaacttctccttttctattttcttacttgcataagtgcgggcttcagcttgagcaggggtttcttcttcatatgaagctgacaataagccacatcagtggaaataccttttagtatacagaagagagtattatgcacaattgaattaagtattgactttagtaatgttccatttcagttaaaatggcccttaatgaaaatttatactgtttggatgctggtatctattggttttctgctgttcctgttgtttgttgaaggatttagctgccataaaaacatttttgggtctctcccaccctcctccaaatacaccatagccttctttcggctgaggtttaacaggaactcaagcatcggtaattcttcactgtccacccagtgaatgcaattcactgggcatgaatcgaccgatacctgcaaattttatgaaatgttacaattt

SEQ ID NO: 189149 - DNA, 1729 bp, Cannabis indica
ttattattattaaatactaattaagttctaacacgtggcaagttttgattgcaacaattacgtgtacggttggatctttattgcttcgtaatgatcgtcgagggcaggccgttggattgcgtaagccgcccgtttccatgaaaacgtgatcttatctatttactattatacccctaagtaactaataattaattttttaagtaaatcaatcataaataattgacttgattcgattttaaaaagtcttttggtagaaaaaatggaaggtatatgattcatagtaaagcaccacaattatatacgtaaaagtacaagtgggacccagccaagtggattagactgtactgattaacattttgatttgaagtgtagggaaagtattgtgtacgtaaacacagagtaaccttttttcccatctgtacactgtacggcgtgttactacatacattcataaaattttaaatataaaaaaaaataaataaatataaaatctacgacgatattatagcgaacatagtttctctctctaaaaacctcataatattattttctctctctttaaaaaccttgttggttttctttctttgacccaaaaatggtgtctctcgagcttgaaccatgtttcatggatgattttttgaactttcctgatgatgaagacatatcgataaggagtaatgaggttttggactcgttcggttcaggtgccccttttcattttcatgtaagtttatttttgttcatgtgtatatatacttatatactcttgttgttaaagaaaagaaaccgattccggtggtgctcggccgagtttagattatatactgagttcgggaaatgactcggtttggttttggtaaagtttggccgagttgactcgggcgagtttgccaatgaacacgaacacgatgttaagtgaggattgggtggtgcacgcgtttcattgattgattatgataacattatgtatgaaaagacatttttgcccctgtaaacgtttacacaccatgttataatattcgaggacaaaatcggcatataattaatggggacgatatatgcttttattttttaataattaattttttttttattattatcaaaattattgttgccacttgctcaatgtcacattgtgagctgagctgttattcaaccattttccaattaatatccaccaataaaaaattaaataatgtttaattattataccctatcttatcgaaaagaccataatacccccaaacaatttgtgtatttaccaatatgtacatttttattgaacaggaagaagaacttgaatggatatcaaacaaagattcattcccggcggttgaattcctaccggacattctctccgaccacccttacggcggcgccggcgtcaaaccaaaccttcacagtccggtatcagtcttggaaggagaagaaggcagccacagcagcagcagcagcagcaacgatagctcagtttcagtactcacaagctgtttcggcggcttgaagccgccgccgcgccgtgcccggagcaagcgccggtgccggcgccgccgtgggagctattttgacatgtcaggcgaaaagctctttttgagcatcggaaactgtcaccacagtgtgaagacagagaagaagaaaaagaaaaggaaaaaagcaaatgaaaaaggacaataagacgacgacgatgactttgatgacgtcagcagcaaaaatgagtgggggtataatg

SEQ ID NO: 189150 - DNA, 1068 bp, Cannabis indica
taggtatagtatagaaattgtttaaatcattatatcatcaaagtggaataaaatgagaaaggtgatgtggaggtactggacggcgtcgtttttggtgatttgtgttttgaataaattattattgatcagcgaaggtagtagcagtgatcatgtttcatcatcatcatcatcagtttcagcagtgattatgtttggagattcaatagtggatactggtaataacaacaacaacatcttatctccagcaaggtctaattttcctccctatggtcgtgacttcattggatcaaaacccactggaagatactccaatggcaaggttccttcagatctatttggtacgtattttattttttagttttggtatatgtaacaaaattagtgtaattaatatgttttgatattgttttctctttttgggttcatatttttaagtgggatatatctatctcctattttagaattatatatagtttagtaattaagtgggagtttaataattactgtgcatgggataatataatattaattcttcttgttttgatgttcatttttttcaattacaattaattaaacttgtatatgttttaacaaaacttattaaatcatgtatgtctgtttagaaagtctagatatggttgattggatattttatgtataaattgataatgatttgtttgacataataataattaagtaattatacataaaaataatattttttattacttaattttataatagaaagtttttaataattataaaattagagtgtaaataatagaactccttaattatctttaattacaaaattattgtataatattatacaattaaacaagcatactaaattataaaattacctctaattatatctaaaacattcaattttattttaccttgatttttcaaacacaatgttaaattttagtgagaaaaaaatcatattcggtatagaaataaaatatatatatataaaaaaaaattcaattcaataaaattttccattttgaacttaaaaatattgattttttttttctcaccaaaattaaacttcaaaaaataaaa

SEQ ID NO: 189151 - DNA, 2118 bp, Cannabis indica
ttttttctttttttctttttggtaaattaaatcagaaccattacaatcactaaaactcattcactttctgtacaaatcttttcaaatactattcaatcttccaattataaattacaaaattgattttatgtgtaattatgcactaaacaccatgtgtaaacttttaatttggcttatcctacttgctttacaccccgcatctaagaagattgtatattactatacaaatacgtacttgaaaaataaattaatgctcatgtgtttcgaaacaattttctccaataaataaaagtaccttgctttctcaatctcttcatggttttaaacattttccaagcaaaaatccatttggtatatctatgtttcgaaatgttatatctttttcagtgatcatacgagttgttaccagtagtttttctagctaagtagtaagcaatttttatatgttatttatttatttttatgatatggactaaagaactgagtggtttgttttctaccaagtctgcctaccttattcaagcatttgaccgtgcccctgtgtgtgatgttgccctagagttgtggaacaagttatggagcactaaagtcttgaacgtcacaaggttctttggtggagcattctttctaatgttcttcctattcgtgccctcctcgctaggagaatgcatattgaggaggttacttgtcctctttgtggggagggtgaagaaacgatggagcatcttttcttctactgcaactttacttttcacctttggcgatcttctccttggagagtgatgtcagttttttatttcggcgctcaggtttgggattggattaaatttttatggaatctaaaatcaaaaggggttgatgttgacaaattatttctctattcctcaattgtggaagattcgatttgcagggttcgcaacgacaaggtacacaataattttctgtgtaacattaaacattgtattgactctatctctatctattacgtagactatgggctatgtttatttgcttcgtcaaaagccgttgagtctcctgtttgatcccctccacctaatgattgggtcaaaattaatttgatgtgagagttgggtgcgattccatgtgtgttgtggctttggctagggaccacacagagtcaattttgtgggtggccacaaacttacttaacttctatgatccccttattggagaagctgcagtctgtcttttagccatggagactactgcttcgtttctatacccttttgtgatggttgagagtaactacactacaagaaatatcacttttatcagcttagttcgctactgcgctggtaaaagtaacttttaccagcacatttcgcaaactgcgctagtaaagaggtcaaagttttaccagcatacatttacagtggctaaaatctaacttttaccagcgcatttacgcgctggtaaaagtcatttttgccagcgcttttcattttatgctgacaaaagttctaataccaacattgatttgccaactcccttttgcaaccacatcacaagagtaaattctattttaccatcgcaatattaacttttgctagcacaaaaatgtgctggtaaaagtaacatttcttgtagtttctgagacagttatgaagactctaaagggaacttgttccaattgggaatcgaaaactatgtgcatcattgtaaacatctctctacttttatgttaggcaacaaatttttcgtgttgtttttagaacacatgaataggttacaatcttatttatttatttagttatttttatgtaataaggataatacatttatttggaacctcctttatataaatattagataatttataatataatttgataaaaaaaaattagtagaagtcctaaagcaactacaattaagtggcccaaccaatgagggttaaggcttgctcctacatcaattttatgagtactgttattaggcacgagtggtgctcaacaccttctagaaatagttttttaacgattagttatcgttatatcctaaaaattactagacacaagtgataatcttttaacatttctcatattttatggaagcaaattacaataaggcacactcataaaaaaaattacaataaggccc

SEQ ID NO: 189152 - DNA, 1323 bp, Cannabis indica
attacaaaatgggattattcttgtatttttctatggtgtctcatagtgtttttttaatactctttactcagggcttcttccacttactagtggtgtgggtgttaccttgtttcctcttgaaggctgctcgagaagtttccagaatccgatacattgacaaagactcgtggtggcaatccgccgctatcatacttggtttgctcttctcatggacttatttgaacataattttcctttcaggcagtgctttgttcaatttagtctgcaacttacaaataatacacttagagaattatgggaagctcttagaaagggacttagatgtttctgaatacatcaccgaacacattcgcctaaatcataacctatccaagattagccataggttccgaatttttctcctccttgagttcttagttgtgacagcttcagagtttatggctctattgcagactacaggaaatcgaggaatcatcaacctcatcaatggaggcgattttgcagtaagtttcactagaaagtttgttatgattgaacttttcttgcttctttcattatgtaacttgggttacctttcataaaaggtctcctgtattgttgagcttgttgggataattatttgtctccatggagctgcaaagatttcacatagagctcaagctcttgtatccattactagcaaatggcatgctttggtaacatgcaactctagtgataatccttctcaagttgacatttcagtcaccaatggcactaacaatgaggctgatattaccggaggatcaatacccgtaacctattcggaaaatgatctggaatctgtagactttgtaccagtgcctacaaatgctcaacttgcttcatccttgtccttgtaccacaagagacaagctttcggttagtagactcgggtttaagaatgttaatgaagttgttagtgtttagaattagttgcataggtacttttgcttgaaatttactgaaacatggtgttgatttgttttgacagttacttatatggagtcgaatcttgggggagctagcgtatttggatggagaattgatcggacactggtgaataccatcttctttattgagctttctcttgttctttttgtactagggaaaaccataactttcactactaaatgagtttgttacttttgagtaaaggactgacctttttcactgcaaaaatgtacattttagcatgtttttgcaaccaaagtgtaagatacaaaaacttaatatagcttgcacaattttatttaattattattgtaggtataatacctcaaatctataaatattagtaatatatat

SEQ ID NO: 189153 - DNA, 1929 bp, Cannabis indica
cacattgtagtcaaatagcctcgcaccacgattttgttatatgatgtcatctctccagaaaagtttaagagattgagaggccattaatattgatcttatctgctctaatctaatgttaatctaattctgtcccagaatatgatagaagctcccactgtttgatatcatttatgaggcttacttcattgagtggactccattcaagcagccagtccacaaagtttaagacacatcactttctggataaacattgcttaaataaattaccacacattttgcggcgttgtaaacgtgtcatgcagttttatataaatataataaagaaagaagtcacattagaattgacaattttgaatcacagtttattagaattggataaccataactaaatacacaattacacatttctattgctctttcctatcttttcttgtacacgttctttttcttttgctgaattttcttgtacacgttcttgctacacagatttagatgaagcaaaatacccgttcgagactataactttcagctgcccttttgtgttgtttgaccttatattttatatatatacggggaacaatatttacatagacattgttgaggctgggaaaagtctatcaaggaaagtatatacaccccctcctaacagtagggcaccactgcaaaaataaataaatacataaagaaagaaagagaacgagaaaaagtaagcataattagagatttgagtgtggggaatctcgtataaaaaaagttggtttaagagaaagatgagctgccattatacgagtaacgagagagtgcaaaggtggcctattcaatagttagaagagatcaaatgaaagatgaagaatcacctcactgggttgatccaagctgaaaatttgcgaaatgaaagcaggctctgcacatagcatgagtcaaattatattgagtagattagttagggagcaaagcagtaacctgacttcaaccacccaaaaaattggaatgcagaatagcattttattttgcaatttagacaatgtcaaagttaaaataagtgatggatgaagaaccgcatacctgcaatgcgccagcaaaagaagcagcaatgagcagaggagcaacataaccagttgtataggtcagcaataggcttcccccaataattggatcctgtcaccagggcgaaaaatgttaactagctaggcaatgtcataccatgaatgagctagaatgcatctctgaaattaacatatttgtggtttaattatatttgagagctgctgtgtcaccgcaaaaaattaacacaatcagctagtatataaatccagtcggaatgaatccaacagaatttaacaaatatttaaaataccttggaagtagctacatatgctaacaagctggcgagtactggtgtactgcacggtgaggcagctaaagcaaatgtaaggccagctagatatgcttgcacacctatcaaattgtcccaaaaatagaagcttgtaagactttcaggataccaaactttatacaaatacaaagagcagtaaaaactagactgagatgaaaaaggccaattacttgatggcaaattagcggcagcagcacggggatcaaaattgtcgaagaaagatggaagctgcaattcaattatctgcaaagtttacatgaagattagtcagacaaaataattgtcagaataaatgaagtcagcacattctcttatagcaacatgatacctcaagaagattcaggcccataacaacagctaatcctgaagcagccaaaggtaatccttgccctatctgtccatatgcctttccagcaaatgaggctgctatccctaatactgctagcgtagttgccaatcccaaagcgaatgaaattgaattcccaataacctggccaggaaatatattgaaattcataaaacaaattcacgtg

SEQ ID NO: 189154 - DNA, 2023 bp, Cannabis indica
tttgattaacgtatttatattgtttaacgtatttgcattgcaccccaaattttaataattatttttttatataaaaattatatatttaacttatactatttttctaagaaaatttttttcattaaaaaaatatctttttaaaaaatatatattaaataaaaataaaatatattttaaatattaagacaaaaagaaaagaaaaatatatataaaaaaaagtgtgaagaaaaaaaaaccaattttttcaagtgatatgaaaatttttgttggcttgagtatttttctaaacaatttttcattctataccaaatataaaaattcattattttttatttttttacatttttttagatataaaaattcatattaatatatattagatattttttgatcgtttgtttattttatatgccccttatttttggaattataaataaaaataatagcagggatataattgttgattcgaaagagctatttacacatttaagattatctactctaatttttatttatgtaattttttaatctacattatttttcatttttaaaattgtgaaagattatgatgtaataaatttaatgaatgaatttgcaagacaaatactaagaatttttctgtttagttcaaaataacatctctttgtttattatttatgaatttatttaaaaattgacagtaaaaatacataaggtactggtacatcttatatatggcacagggctgagtgcaatataaaaccatggaaaaatgtgttggcggacataaaagaaggcaacaatagaacaaaatggaaagatagggtaccctatgcttattggagaggaaacccatatgtggctcctacaagaagggaccttcttaaatgcaatgtctcccaaaaaaatgattggaatacccgcatctatattcaggttacaattatacaaatatattcgcatttttctcctacaaatcatatatccatttcatatctaaattttgaaatttgactaattagagctgggaagaagagaaaaaacaagggtacaagaaatccaatttagaagaccagtgtacccacaggtatagttttcaaaatgacctccctactactaggtaattgttttgttcaaataaaacaaattaatgaacgattatatatgtagatacaaaatatatacagaaggatgggcatggtctgttagtgaaaaatacatattagcttgcgactcaatggccttgtacattaagtcacgttaccatgatttctacataagaggcatgcaaccattgcaacactactggcctattagagaaaacaccaagtgcacctctctcaagttcgctgtagattggggtaacaatcacactcaccaggtaattaattagttttctaattagtatatataatggtctccatatataatatgcatttatatataatatatgtttaggcagaagcgatggggaaagaagcaagcaagtttatagaagaagaaatgaaaatggagtacgtgtatgactacatgttccatctgttaaacgaatacgcaaagctttttaagtacaaaccaaccatacctgccggagcagaggagctctctgcccaagccatgctgtgccaagccactgggacctggagaaatttcatggttgagtcgatggtcaactctcctagcgactccattccctgctctttacccccaaacgatcctcaggccatttctcagttgcatcacaaaagggatagttctatcaggcaagtggagatctgggaaaatgaatactggcaaaagcagtcaaagcccaaataaatgggctaattaattagttgaactttattctccctagtcggcctggcccggctttcatgatcagtgggctcacttgtagcattttattttgtgggcccgagtgacaatatccaattttaaacagtagtatttgttcctaaaaaaaaaagaaaaaaaagtggtatttgtcctcatgtatacagttattatatgtgtatagtttgaattgtttattgtcattatattt

SEQ ID NO: 189155 - DNA, 576 bp, Cannabis indica
ttatattttagattatcataaatgtaattagtcagctagtttatgacctttcaattattaatttatgtcacaggataagccctaccttcgagaaaatatcatatatgtacatcatgtattcgcgattaaaatttttatcgtcaagttgtattgtatatggatgactactttttcttatagtaatatatatttatataaatgtatgtgaaacagaaaattgatgtgctatacataatattatatatatatgacttcagacttcatctaacatattgaattggacaatttatttaatgtattatttgatgagtcatcacgttattatcacattataatctccaaaatgcatattactatcttactctccaagagtccaagtacacatctgttctctcaccaaatacataatatattatttgtgtatgcatgtaacagataaacaaatatgtaagataattttcttaaacttttattcattaatttagtttttggaatgcatacatgagaatagggttgtgaatattgtgatcgataatagacaaattatactttttctctctcaaatatatataaaga

SEQ ID NO: 189156 - DNA, 1962 bp, Cannabis indica
atatccctatttatatatttatataaaagtgtaataatatttgcaactatttttataggaatttttcaacataaaaaggttcaatttaccaaattatgagtttcagtagaaattaagaaaaacatttattcttgtatatatgtactttaaaaaaaataaaatcccacaccacaccaacctgatcgagaatggatcttttcgtttcatttccctgcttcccaagtaaccaaccaataatcagcaattaaactcatttaacaccaacatctctttcaccctaattgatgatcactcctacctacccaaacatagaattaatacacacaattcatttttaactatatattattactacaattgcctttcatgtccaacatctctatataagaacttgataatattgctccaatacaaatcatcaaatattatcaagaaaacatcattcttgttctacttaactagattgccatcttgcactactaaaaaaaataaaacaagatgaacaaacaactcatcatttacttctcattcttacttctatgtttccactactctaatggagcaactttagctcactctccagcccaagctccatccaaacatgtagctatagccccggctaaggctaagacgataaccccaaccaaagcgccaacatctttgccagtgtcggcggtggagccaccgtctcaagtgccacttgtcccggcaccaccccacaaagcccttcacacaccaacagacgtcaccaaaatcctcgaaaaagccggtatcttcagtgtcttcatccgcctccttaagagtacctccgtaagcattcagattgagaatcagcttaatgtatccaacacattgaccatttttgccccaacaaacggggcgtttggtgctctaaagcctggcactctcaacacactttccaacgaagataaagtccaacttgtccaataccacattcttccttctttagtttcactccaaaactttgagactctcagtaaccctgtacggacacaagctagcaatactaatgactttcctcttaatgttactgttgaaggaagctctgttaacataaccactggaattgttaacgccactatttctggtactgtttatgaggataatcagcttgctatttacaaggtcgataaagtgttgcttcctcttggaatattcggtcttaaaccgaagacgaagcagcacttggcgccttctcccacaccattgaagccttctaaagatactaattcgtcttcttcgtcgtcgtctttctcctcttcagaagaatccattagcccagacgcggcagaaggggacaagtcgaacggtgttttcttgagtaaaaatgctattataaacatgggagtctttatggtttctgcaatctctatgtttggtcaattttagtttttagttgtgttggagactttatactgtgtgttgtgttaaattggaagcggtcagtgtttggccatggaattttgatttactgttattgtttgttggttttgtcatgagatttccattttaattttgtgcatatattgtttgaattgaattttaatgcaatgattttatttgtttgatcaattaattcatcatgatataaactaatttaattagtttttgcataaattaacttaagaaattgtgattttattacaaaaataataaaataaaataaaaaattgtgatatgctgttttggttatccaaagtttaaacaaaataccattatatatagatagcacaaaaaggagaagaaaaaaaaacatgcaaaaaccaattacatatacattatggaaaataaaatgaagaaatgtatacagaatttaaagataactcatctgtcacttcaaaccaatttctatctataatacttattttttttttcatttttaaaaaggaaaaatctttaacgaatttcctttttaaatttttttacatacttatgaatttt

SEQ ID NO: 189157 - DNA, 1425 bp, Cannabis indica
aaaaaaaaatgaagtgagtgatcaatatatgtgtgtgttttatgcttcacatatatattatattcaaatgaatattatataaccgacatatatagcaatgtttgttatatgtccattattttaattaaatatatatgtgattgtgtggaatgcaaatactaactcagttgcaaacgaaatgtgatcagtactgacaatactataaatcaattagcggtataaaatattagtggaaggaatcattaggtgtctactatcatacaaacgttttttaaattgataataataatcatatgtcaaatatatcatgcagccctaacttgtttctatcataatgttatgtataaaaataataacacttggaagatagttaacaagtatagagtgtctcttagaaaaaattactactaaaaaaaacacaaacacaaagtgctaagacagagttaaattctcattactacctaagcatcacctgctacatgtggagaccataaaccaataaaaaaacacattgtagagtaagagaaagagcctgccaacgatttacttataacatgtaaaatcttctttgaaaatttaattgtcaaaatagtatttaatttattacagatatttaacataaattttagttttatagctgtcatttataattaggaaagttttcataatagagaatgaattccctttatgaatagtttgattaaattatttatataccttataattgatcctaattaattgtaatttatccttttggttttgcaatgtatataataggttatttaacccttttatggaaggtgttatcttaattttcgtacagggtaatgtggcactcaatagggtgacacgtggagttcattttaagacttgaacagaatatactcacatgaggttccgtctagaacaattcagggttaaatcgtcaaagtctagttcttcagcagggagaatccgaacaggtcctgtacctcgcaatgttctgagcagaatacgtgtatccacctgagcatcgttatctgcgtagaaggatgcgacatttagagattttctatgatattttccttaaatgttaccataattatagcttaattagaatccttatacttgtgggattgatttgtacaaccgagagatggatgggaattaatatttagtttttgattctttttctattattttgggtaacacacccttgtatagtggagccattccattatttagagatccaaatttcaactttttagatagctattatactaataaatacttgtaaacattctacagaatattaaaaaactcacctagtcagatcttcgtgatcttaataattctttacgtaatacaaagaaaatgagagtaggctattaccattatcatagggtcaaatctctagaaatttcttatgttctcatatcgctttat

SEQ ID NO: 189158 - DNA, 6954 bp, Cannabis indica
agaaggccataacaaggagtgatattcagataaatactaacgcacaactcattaaacaccacgagagtgttcatcaacagtgctaacgccaatattccattagctcaaaatcaaaaacattaatcacttctctataattgttctagctgtcaatatatacagtctcaataacattgactacaatagaagtatgtctgttcaataatggttgaactataaaagacactctatcgtcctatcttgttagttgatgaaaaaaccaaacaacagtaattattcaaacaatctaggctattagaattttagtcatccgaacttgtacatgttacattagaatagtctttctttctttcttaaaatggaatagtcattccaccaaaatagtaaaaagaacattccattaaaatatcattctaatactttaaaatacaaccaaacaaaagaatataatgaaaattatttcctttccattccatttcattaccttcaaacaaatgccacctaaatttttaatgtcatctcccctaatctattgaatttgttaaatttaaaattttttattcaattttaataaaaataatctaacatggataaaagtttaaccgacatgatttaattgaaaaattttttaaccgtcagaaaaatttaagaaatataatttgatacatgtcaaaatttatgagcaaaaatccaaattagccaacaatacaaaacacattttttttaatcttatactttgttggaagaataataaaaacttttatttcaaaaaaacaaataataaaaacttagccaaaagttgaatacaaataatcttatgtgatattattatattggtgggatatgtaagagagttgaaaattttatattttttcaaagagtaagaacttttagaaattagaacagtaattgctgatatacttcacaatactccccatttatattccaagagaaagaacaaaaaaaaaacagaaacaaatactttttgtgattctatttctacttggtcgtacacaaaatgcaagaactgaataaccatgttagttaagcataattagtcattttacttgttaattcaactattgaacccaagtttctagcttgaattcataatatagttttttttttattggaataaatagttataatatagttcgttagaagaaatacatatttttgttctatttaataatataaaaagataaaataaaataaaattgacaagcttgggtggatggatacattattcctttccctttttcctatatattgggtaagcaatggtggaaagaaatgatcatagtgagagtgaaaaaccttcctggaggcattctgttctgatatcttgcatctgacgttgaagcagagttgggttgcttgtaacaatggcgtccacacgttcaaataacattttttgcatggaacttacatcatcaaccgtccatgcatacaccttcttatttctcctgtcacaagctcatacatgaatttattaataaactcctccatgctaattgattaccctagcaaatgcaactgaatctaacagagtaaatttagtacccgtgcacaattctgacaagctttttatcaatcaatgggtgatacacacccacaacatcagcatctttcatcctcaacaaattggttctaagtccagtagatggttcaatcatcacaatgtagcctacctgcaagaatttaacaattcataaatgctcaaacacaaattcagaagctaaacgttgaaattttttccgtacatatttatggttctggcattctatctgtacatatttaactggttctagccacgatcatactcgtttatgttgggtttacttgatggctgaaaaatctgatgttgaaaaattatttaaagaattttttcagatgattgaaactcaatttaaaacaaaaaatgacattcttcacactgataatgggacggactgaatatttcaatcatgttttgggtaattttttaaagacaaaggcataatacatcaatctacttgtattgacacccctcaacaaaacagaattgttgaaaggaaaaataagcattttacttgaagttgctcgctctttaatatttttatgtgcatgttcctaaatacttttgtatttaattaatagaatgcctactcatgttctaaactatagcacactcctagattgttttaaaaaggaatttcgggtatcacacatgtattctaatttgcctttaaagattttaggctgcattgtatttgttcatattcctaataatactcagtccaaactggatccaagggctgtaaagtgtgtttttatagggtatgcttctaataaaaagggtacaaatgctatgatcctcaaaccagaaaaatttatgttagtatggatgtttctttttatgagaaacgatcttattttcaaaaaaaattctcttcaatgggagaatgaaatgcaagaggaagataattttttgaattttgcatctaatccgttgcctaacttaattgtttctaatcaagagcagccttaattaacacagataatgtggacaatcatagaactgtagtgccaagtattactgtatctgaaacagggggagaaacactacaaactaatcctgaactccgggtttacactcggaaaatgtttcctcataaaaatcagcagcagcaaccaaaccatattagcactgatcaatctcaacctatgggagcgggacctcaaaaatccacaggtgattctaatccttcatgttctattcctatatcttcttctagtcaagagaattctgatattgatattcctatagctattcgaaagggaactcgtacatgcacaaaatatccctaagctaaacatatctcatacacaaaaatttcctccaatcataaagcattacttcaaaaatcgcaaacttgtttattccaagaaatattctggaggctcttgatgaacctaattggaaatcagcagtgatagaagagatgaatgctcttgggagaagtggtacttgggaaattgttaatttgcctaaaggaaagaagatagtagggtgtagatggatttttacagtaaaatacaaggctgatggtagtatagaaaggtataaagcaagattagtggcgaaggggtatactcaaacacatgggactgaatatcaagagaattgtgtccctgttgctaaggtaaactccattagaatcttgttatctctagctgtaaattttaattggccgctttaccaatcagatgtaaaaaatgccttttctaaatggagaccttgaagaagtttttatgaatctatcaccaggatttgaaggaaaaaatgggttcaaaaacagtttgtaagttaaagaaatccttatacgggtgcaaacagtcggctagagcttggttcaagaggtttggaaaagctgtaaaaatttgtggttatatatactatgttctacaaacatagaaaagagggcaagatagttatcttaattgtctatgttgatgacataattttggcaggaaatgacggtcaagaattggaagaactaaatgcaaagcttgcagctgaatttttgctgatcaaagatttggggacagtcaaatactttcttgggatggagtttacaaggtccaaagaaggtgttttggtaaaccaacgtaaatatgttattgatatgctttatgagacgggaatgaccggttgtaaaccagctgagtctcctattgaacccaacttaaagcttaatttgtctaaagaagaagacgtcttaaacaaagaaaagtaccaaagactagttgaacggtaaatctacttgtcacatactcagccagatatagcatttgccataagcatggtaagtcaattcatgcactcacctggacaagtgcactttgatgctatttatagaattctcaagtacttaaaaggaaaaccgggaaaggcttattattcagcaatcatggccatttacaattggaagcttatacagatgcagattggcctggaagttcagttgattgacgttcaacaaaatgtcgtagtaaaaaacaaaatgttgtagcaagaagcagttgcccatggcgtgtgtgaagttttatggattaaaagtttcttatcctttacctatgaaagtgtattgtgataaaaagaaagctgctatttctattgctcacaatccagtgctccatgactaaacaaaccacgtagaagtggacaaacatttcattaaggaaaacttgaatttggactagtatgcatgccatacattcctacaacaatacaaaaagctgatatacttaaaaaggatcttccaacaagacaatttgaaaaactgatgggcaagtggacaagctggatatgaaagacatttttaaaccagctcgaggagggtgttggaaaataggaaataaaatcataaatataaattattaatttatatttatgtgaaatatattgtatagggaaacagatatttacttttcttttctatgtgatttattctctgattcttaggcttacttttgacctacaatatcttgtaattattagcagatttgtacagattctttctattcttgtaccttgcctatttaaaggctattttcctatcaataatatatatcgaatacctttttccacagaattattattgagaataataaattgtagatttgtcattaccatagtatctggtgactgttggataacatctcttgctagtttgtcacttttagcccatacaacacaatttttacaccttgtcctcccaacctgaaatgataattcatttgaaaattcaaccaatgaatcttaaaatactaaggttttaggcacaagttattcttctagagtacagaatcaaatatgtttcgagctgatcatatatggttgaaacatactttttctggtcacagaaatacaagagttggggactagcaagggcaacgtcttgaacaacaagcaattacacagatcaattacatcaagaaagtcgatttccattaagaatattgagcacaagaacaaagttcatgaaagcattaaaaccattagcttaagggtaagaactacccaaaaataattatttcagttttcaggtactcttgtcattgattttcataataatacttcacggcagcaacaactaaagctggctttggatggcaattgcatttgcattcaaacacaggggtaggagtaaactcaaccttatggcatatgtaagttgtaatttatgtgttactgatgagtacatattttatctactcattaccttttacactttgaaaggttgtatttttcttcagtttttgtatggatttgatgtgttctttgtagttcagtgtttaattgttgattctatagtgaatttggagcataatggacataatcgagtgatatgtcaaaactgaagaatgaaacgtgatgaaaaattgacaaaatgccaaactagtgttccagagtccagacgatatatcacctggaatggggctacatgtcgcctgtatctgatgtgaaaaatcccaaaacatcacaaaaatccacctttcaaaactctaggggagtactaggtgatatgtcgcctggtgtacgaactttaaatttaaacccaatttcaaattgatttcaaagattatctttagaggattacaaataggggttttgcgattcatttttggacaactacaaagcatatgaaactcagagaacacaagggaaacagaaatttaagcaattgaccatcataaatagtttttcttcttctacttttctgttttagtcgtttttttttttaacaaaaaaaaaaacgagaaaaatgacacttgtcttggactccccccaacaaaaaaaaaagcctacagcaaccaaagcagagcacacaaccaaagttttaaaaagcttacaatagagtttagttttgatgggattattttagttttgaatgatgaatacagatattgataacttaatgttggtgattatgaactatatattctgtctagagtgttgatggaattattttaaatttatgaaataaagttttgatattatttaaattaggttcttctaatttgttcatgctttcttattattaatgttttctttttaatacttcatcatcattagatttaattacagattatacttgagagagaatattaatttgaatctagaattcatgacatagactcattacaagcgtgtacaaatcattgctaagacacttgccaccagaatttgaggtgtgttgggagagacaatctcagatcggccttcgttgaaggtcgatagattctacactcggtataaatggcgaatgaggttgttgaagattacaagttttgtggcaaaagtggatttgttttcaagattgattttgagaaagcatatgatcgagtcgaatgggattttttggacttggtgttgagtaaagagggttttggggacttatggcagaaatggattagagggtatatctcaacaactacattctctattttcatttatgggagaaaagagtaccaggggactcagagaaggagattcactatcgcagttccttttccaatggtggcagatgttcttgggaggatggtggatgttaaaatatattagctatattaaattattaattgtatttattagtttcctattgagtctctctaacttagttagtttcctatttactctttaattttttatataaatacacattattctattgaataaaatacacaattcattcaccatatcttacatggtatcagaactgattttaggattgggaattcgaaattcgaaattagggttcatcacaaattggggttttcaattaggattcatcacaaagttgggtttttcaattagggtctttttcggaaaccatctttttcggaaaccatcacaaagttgggtttttcaattagggagggagaaagggagggagagagagagagaga

SEQ ID NO: 189159 - DNA, 732 bp, Cannabis indica
atgtgtgtgtggtttaatttacgtaccttcattatggatattatggagatgtaattgataaaagaaattaggaggaggtacgtgcttataatagtatagtaatgagtttattgaaatttttttgattgggagaaattcaggtaatttgtggattgtaatgatggagggtttctataaataggggaaaaatctatgataacattcattaataataattaaagcataacaattcagttttatttactgggtcccaacccaactatataaatatatatatatatatatatatatattattacatatatattgtgatctgctccctaatctctatacgaaccttaccagaagctggacttgtcaatttatactagtatttttatacgttgcatgttgacattcaaaataacgtacgttgacgtacgtaaataaatttatacaaatcatctttatttttgagaaatgcaataaatattaaattattaaggaaaattgctacatataggattatcacttttgctcttattgtatagggatatttttattttgtatataaagagttttctatcagttttcttttatatgatgatatatatatatatatatattatagatattgttgtgtttgtttttcaaaaaataatttaattatgatgctaaaaataatatttaaatagttaattgcacacttacttattttagaggaaattatactccatatcctttttatattgt

SEQ ID NO: 189160 - DNA, 895 bp, Cannabis indica
ggaattaagaatgacataaacctctgagtaataacaaaccgtaaagggatataattaccaatcaaacaaacgagaatatattgtcttggctaagccatctctgctaactgttgcaccgacaggatcgaggcttctcttaataacttcttctggcgtgatcattatacgcttacaaagtgcatcttctaatgcattaggattgcacctgtaatattaggacacaaatatagttcacaacagagttaaattataggaaaacactaagcatgtactcacatgagaagttctgctgtcatttggagatggaataacgacatttcgtttttaaccaccgaagaatcattatcttctcccttagcaaattcgatattgcccaaatgaagaattgctgcaacaactttgaaaattgcatcctggcaaagagaaattactctcggatttgcttttaagtgacacttattaaggaccgaaacaacctttgaaattcactttcttacctgttctttttcacttattccaacaatctccatggctctcttggttgtgagataatcatgagcatcacttacaccaaccaattcataacaattagattgattaaggtaatgaaatgatctaggatcccccaatttatatttctctttctcctgaaaaagacctgaaatatgttaaatggtaattatcaggaatagacaatacaaaatagaaaaggtcatctacctgaggaggagctgcacatagacgataaaaacaatgatagttgcgctcgggatctgatatttggcaaacacgagatctttccaaaagataagttctaatggctgctcctgatattctcccctggttgtcaaactgaatctccacaaatttcccaaaacgactgcaaagcacattc

SEQ ID NO: 189161 - DNA, 2901 bp, Cannabis indica
aaaaaaaaaacttaataaatacaggtattcattttcatatacacactcagtcacataaatatttatctagtaatttcatgcaaactataacaaaccctaaattatgttagcaccatcaaaacccaatcttatagtttctcatcttatgtcatcacaaacccaatctaatatttgactttgttgcgagactctttgtcttatgtcatcataaacccaatcttatgccatcatatgtattgatgctagtgctctttgttttaatgtgttttgtgaatgttatttaaatgtttggcctccaaattgcatatcctatagatgagtgaggactaataatagcattaatgtgaaactttcaatgcagatgtgttgatgaattagagtctcaattatcaaggcatggcagtcttaaaaagttgtacttctaccatcagcacctaacagcagtgagtttgagctctttgtatatgaagtcattttcttcattctttatgattatgaaggccaattctttaaactaaaatctgaattgttatgatgttttcaaaacacttttttgacttaaatttaattgttgacaggtctttaggaacactatgtttggtgcggaaggacgtcctcagcattgctgtgcttggcttggtgttgctagtagttttccagagtgtgcttcccccattgttccagaagaggtgatacatggaatattaactctttgcctttctgtccatctacatcccaaagtagtagaagaaatttacacctcatatttaagtattgtctctttaaattgcatctattaacatcataattgaaatgaaatccaattatacatttacatacgcagtaatatttttctttaagccactggaagagaaaggaaattttaaaatcttacttagaagatagatagatgcattatgatacgatcctagcaatactcaaatagaaaattatagtagaatagagaacaattaagaaatcctactgtgttttgaatctgaaaaggaattacaagctagaacaagttaactgtagaaataattagtatttgttgcattagttagtggttcatagttgagatgtaattttgtactcaacctatttaaaggcttttccaataatgataaaaacaacattcaagagtatttctacatggtatcagagctttagaagctcaaagattgggaaaaaatctcaattttttcagctcctcttaccaaaaaaaaaattagggtttgaaactcttgaggttcaattttagaaaatcactttgaagtggtcttctattctcaccattggcacagggagattgctcagtttacgatcaacaaaaccctggcccttgacctccatatcatcggtgaatactgttcacgtgtggtacttttcgttctcacccttataaggcatctcgtcctttcactctcattcatagtgacatgtgggggccatcctgtgttaaaaatatctctaatactcgctggtttatatcatttatagatgatcatactcgtttaacttgggtatttcttccgaaagataaatctaatgctgctgccactttcaaaaagtttcattccatgattaaaaatcaatttcaagctaatctccaagttttgctcactgataatggtacaaaatattttaattcaatcgtaggagattatcttatctctattggcattgtccaccaacgttcatgtgttagtacactccccaacaaaatgagattactgaaagaaaaaatctggatttgttagaagttgctaaggctctcatgtttacttccactgttcctaaggctttttggggagaagctattttgacagcaaggtattcaatcaatagaatgccatctcgtgtcttacaatatcaaactccaattttttctcttcttaagatttatcctcatactcacctactctccgatattccattgaaaacatttggttgtactgcctatgttcatgttttaggacctaatcataccaaacttgatcctcgttctcaaaagtgtattttccttggtattcttccacaaaaaaaaggctacaaatgttacaaccctttgactcgtcgccttattgtctcttcagatgtcacatttaatgaagagcaacctttttatcccaacactttgtttaagggaaggcatgttagtgatactcattgctgggattcttgtttaccaatgataggtcctgaattcagtccacccatggagttgaaagggtaattttatttctgcggagggtttggaattggacaggagcaattcaggccaatataactacacacatcaagggccttatacgttgattttggctcaaaatgaacaaaggtttctttctagaatccatatcaagctcggatggaactctgtaaatagcagaaagagtgagactttcaagatagtcgaggaggaatcattacctctagtcagaaagaagaacatgacttagaattctttgatggcatcctcaagtctgttaggccaaaaaaacgataagaatttagaagtgcaattattaaattctgggaagattttgatccaagaagaatagactattcaaaggcagtgatgcaagaatctgaacaatcgccagcgagcttcaaactcattgttgctcagctttcacctttgctttacctacacataaaatcatatctgcagtcgacaggagaaaaacataaaatatataaacatatcattgacctgcagctaggcgcccatacacctatatacaagtcttaacagatgaatcaagaacgttcttaattgaagtacgttctctatatcatatgcactaagtatttttctaatactagtgttggtagggtttgctcgtacttcgagtacaactgattgttatgctacatacacttcgtacctcgattgta

SEQ ID NO: 189162 - DNA, 1669 bp, Cannabis indica
tttttttttattgaaaaagagaagcgatcaacttatccagaatcctccccgttatttattagaaagccttgcttatggcggaggaaaaccatggttacaccagcttctaaatatattttgtcctaaattctcctactcctaccctaaacaaatgatctgcctcctttcaacagccttgcaaacgatccagggaatcaaaaagagaaaaacacgaaaaacacaaaactcatattggcatacttgtaccaaaacagcaacagttcaatatcaatctatccatccgggatggtatttcctcacactgtcacacatcatatgttcattccagcatgtattcatacaataagaaaaagtaaggttcaaggaccaaaagggcaactataacaatgatatgcgacctacaattacacataaactttaaccagcaacataaacagtcaaatcgttttttttttttcattttaataaaatagggattagaacccattccacacgcccaatcacttgagacagcctcacacttaaatgcagtacatctatatcttaaaattagtttgaaagaagtcagtccaattctaatgcaaaggaaacacaaacatgcttggtggtcacagaaggagaagatataaagttcgttatttaaagacaaatcttgcaatttgagaactatttataaagatcaacttatttgttttatttgtgagcataccaggttagataaaaccgaaagctatagagccattaaggatggaacagtgaagtgagcaaagggaaaaacaattagcaaattgaacaaggtatttttaaagagcttgtagtgttaaggtacaaatgaatttgtcaaagctcccaaagtttcgagaaggtgtcataagatgtatcaaaaaatactaagtcactaagtttactgacccaaatgatacccacttgaaatgtaactcaaaaaagcgtttagtatgagatttagacttaatgggaatatcaaacttaaataactttttttttaaagtcaatctttgtgtttcaaagtgggtcccactttttaaattaaaatggtcgtaatgttaatcccctccaacactttgtttcatattctctctaagtttactctatccaactcaaactcacataacaaacaccatattaggtggcatttggttggaagaaatgaaaacataactagattatgatatttcaatactttaaaatgaagccaaacaaaggaatagaatagaatagaatagaagttgtttcctttctatttcattacctccaaccaaacgtcacctaagtttattaaggttagctaaagtggtcatatagagggtattggagtgtgtgtgtggttggggggggggggggggggggggttcagtgggaatcccagctatgtaactcaaaatgtaaatttaaagactacttcaatcaacaaaagaaatactgaccgaaatgtatttagtttttaagaatcaactatttgtccttagaaaaattgctcctcttccacatcacaaacaaagaagaatacaattggattgcccaattaacagatttatttggaataattctcccaacatatatgcgaaattatatattaacccgtattcactagaaccaaaccaaattaaattatagcagatggtatgaaacagaagttcttcttcttgtc

SEQ ID NO: 189163 - DNA, 1382 bp, Cannabis indica
atgttaaaaaaatgttagacactactaatgcttaatagcaatgctcatatttatatgactctcacaaaattgttagatcagccaagttcatagttgtaattaataatgactacacattaaattgtaacacaagttaattaaagatcatacatacaacacacacatatttatataaatatatattcttgtcataagttataattacccttttaaatggggcaataatattccaaatattgaatccaaataatgtatatccattaatgaagtaaggaacacggattttgttttaatatatcattgtatcaatggatatatattatcaaaagtagtggatccaaaccattattaccataaatatatatataaaatatatttatataaatatatatggccctccacatgcttcacacatgacattaagaattcttcgaaaatagcttccacttccacatgactatataactaagaaatcataaaaggacccacgttaaaccaattattattattattattattattattattattattattattattattattattattataaacatttacgtgcaatttaagcttggttgtgagtacatgcatgttaccacactctccaaaaccttatcactctatactatgtagtacttataaatgttctgaaatatcataataaatttaaattgtaatcagtactatatatatagtacacttatattataattattatgtagtgtagatactaaggaggaaatcctatataataataataataatacaatgtatcaaaaattatttcgaagggaaaaatgcttgggagggagattgaggcaaatgcttccccaaagactataataaaatacaatagtaaaggtagtacttgatgagaagatatctataagttaattatatctatatatatagctgccaagcactatatatatgttgccatgatttcatatcattaattatatataatcccaataagtactaataataatgatgacaaaaacccaaaaactttgataagaattgatgatggtttcaacaattaatgataccattatagcaatatatatttatgcaattaattccatttgtttttcttacatgatcacttgtttgtggtttttgaggtccaaccacttagagctaataatgatcacacaagaaaaatgaactatatatatgtctagtaataataatatacatatatactcacctatagaattaaggtctaccaattaaatatgtttaatattcaccttatacataaaatatatataaccatatagcaaagttgaaattatatatcatttatataaataaaatatatgttcattttattgttctcatcatttgcaagataaatatatatttttttt

SEQ ID NO: 189164 - DNA, 754 bp, Cannabis indica
tacgaaattctaaatagaaactcttactgttacttgcgctgcaacttaaatcgcaacaaaaaatcgtatagaaagccctattgcaactagcgctgcaaccactttagaaatccagaccgtaaatttgaaaaaaaaaagttaaaaaaataatatatagggtaattccccttgattttagtaggaaagaaaaatcaaaattatattggaaaagtagttgatttaataaaatttctcataaaattaattttaagggatacacaagtgcatgtgtttgtggggattatgagattgaatctcaagttgtataactctaatataagacgctttaataaataaaataaaaaattcataccattatacattttctacaattttcttattttttcactaaattttaacttctaaatatagctttagtaataactaataaataatgaaaaacaaaaaactaatttgtgacagagagcttattattataagaaagaaaaatggaataattagtttgtttagagatagatggagtcatcatttccttataatgaaatatgacatataattatacgaaagataagataatttaacaacttgcatatttatcacatatcactaattgaatatgctaagcactattttggattacccacatttatgaatgctccaattattaattaattttaatttctaagttgtccaaataaaaatacaaaaaaatatattaatatagtattttaatatcgagtcttatatattttaa

SEQ ID NO: 189165 - DNA, 3689 bp, Cannabis indica
tttttcaatggtttataatgtgattattagatattattaatatttaatactataacaagataacgctttagtttatgtttttaaataatagttattaaattaaatataaagaatgtgatattaagtaacataatattaataaagtaatgatgtgcattagtgcatacacataaattatacatatatttaaataacaaaaaaaaaacaactataaaaaagactaattatagtaaattaaaataagtctcactaattaaaaataatataaatttactattcaaaatatatataatttatgtgaatatataaatgtttacacgaaaactaactctaatgttgtggacatcatttttgataagtgacaagaagaaaaacactccacgtcttacgtccctagtcacaagcatgctagaggcatcataatcactttcggaacacttctcgttttaagcacctgggctcccagtgcccaagttgacctggtggtgcacccaacacccatgtatgtcaacctaatgtttgctgggaattttcttcgtcttcgtccaaaatgaagataactttggggaaataaatggatcaacctggaggccatagaaagaccactcaacgcccaagttgacactaggctagagcatcagtgcccacattgaaatattgccaacttgggccacttcgaataacaattatgacaaagtacgtctttcaggcatattctcagctttcatcaacaattaagatacatgtgctttcgagaaacaaatgagccatttgatggccaataaactgactgagcacccaggttgacctaggactaggctccagtgcccaaattggcactttgtcaacctgggctatttctaaatatttcttcctggaagtctctcgggtattttctttgttttcgtttataacaaagatacaagtgttctcagagagaaaacaagaacatttggaggccaaaagacttgaccagcgtccaagttgacattgaggctggtcttagcacccaagttggcatcaacctagttcgtatggtttttcttctcaaacacaaattctgatccagacattcttcttatcttggtcaaaaacagggtatgagatctcgttcgcgatctcgaatgtcatagaaataccaaaacaagttacgggaagctcaataatgagcaatcaacacttgagttgacatatgacatggtgggatgtgttctgcttatcctatttcagttttgtttcgaccatctggctattttttcttagtaaacaagagctacttgtgacaagttaaattcacacttaaatatttcacattttttggaaaagtgaaatattgacaatataagttcaaatcaggtagcttcgagtctcccgattctacaaatatacaaaatctcccagaattggtaaacgacttcaccaaaaccaagaaattagataagtgatgtcaattgtttacccgaaaattaaccctgatgatgtggacatcaatgtttgatatgtggcaagaaataaatcatcccagagatgagtagcctcgagtcatggcaatcaacctgagaggggcccctagccttgcacccaagttgacttcgggaactacggaatgggtgtttagatcccgctaagttatttttaactcactatcttttgatattctataccacaaagacatgaagaatccaaatccaaggcctagaagctaaaaatacacaaaacagtagcccgaaagtcaacctaggtgcccatcacacaagttaacaaccctactagggtttttaagccaatattagtacaaatgagtcaaactttgtactgtgaaatgaattaggttgtcacgaacatatttgaggcaacgaaattagaaccaaagcacttttagttttgagcacccgaagcaccaggtgccctaggcaccaagcgctcaggttgacatattgtcaacctggggaacttgtgaccacaatgctgaagaactatcttaataattttcttcatcttcatccaaaatgagaaaacaagtgctatcatgtgagaaacggatcgacctagaggccaaaatggggacccagcgcccaagttgacacttttgtcaacctaggccacatctattagtagttctattgggattttatgccctaaataaaattcacttcagtataatcaaatttattaattaataaagaatcagaaatcattttatattacacggttcgcatgattactttcatgattatatgcttaatgtataaattttatcaaatctagaacaaacccctaaaaaatcacataaaaacatcaacaaccaaaaataatcacaaacacatcactttcaaaactcaaaacaattacaaatacataaagtgtaaaacaaaaatcaaaaccatcaaaccgtaaactatcgatccatcaaaacaacgagccaaacaaaaaataaaccataaaatttataataaaacacaaagtatagataccttaataatatctggaactccaatctaaaatcgtctctatcatactcaacatcatctttttctaccacatgctttatctttttcaaaggtcgatgtgcacatttccctttcttagattcattactattcttcctcctcttcgtagaaagatcagactccccactatcactacccttagacagtgtttccttcgtttttctcttcgagttcattgcctttgacgacacagatggagaaagagaagattgtattttcaccgttactaaaaacttagagaaaaaaacaatgtatactagttcttatagatgactaaggcggtttgtaaaatgagatttataatctatttttttggcaaaaaatattttttttaaaaaaaaaaagtgcccacacgccctgttagacgtgacctaaactgacgttgacatcagctatcatctcagtgtgtccaccaagccatcttaaatgacttaaaataataataaaaaaaaatcagtataaactgacggtaattttaataattatacaaactatgttattattagtattaaatagacaaaaatgtgtccatatgtaaatttctcattttttaaggcagcagagtagttataacagaaaagggtaaacacaatgtttggtattgtgtttttttttgttgagatcaaaagtcatttacaacaccagagataataggattggaaaatttcaatgtttgatatttaatctatcaaaaaataaaatataatatataaatgtttaaaattaaaaatctatagtatttattctacaaatttctcattttcaatttaatattctcttaattatttttttaacgtaatattctcttaaattaagagacctaataaccaaaaaagtcattgaaatgtgagatgggacaattaaatgataaaactattaattttgttttttttatatataatatatattaattttggcatgtattgaatattattaattgtttagttttttttttaatgcaattgtttagttaaataaattattttcaattaataagcaaaatccgacaaagatgatactgtcctaaaggtcccattcggctaaagtgtggaccccacatatcaagactccgtcatcggccgttgaccaactgattcattttgtgggttccaccttccatttttgctttaaaaaaatttcaatacatttgttttttcaaaaataaataaataaacaatt

SEQ ID NO: 189166 - DNA, 891 bp, Cannabis indica
tattattggattataatgtcccacatgaaacaaatataaaaatattgtattagtaaaagtatgaggtactccatttgttataaatagattttaatagagaaatgttaaaaagtaacagtggtgtctaacacttttttacatgttaatattgttattaataacttttagagaataccactaaccaatcataaaacgacacttctaaaaagtgttaagtactactaatgcccaataacaatgctcattttaatattaaatgtattaacaaactatatgtagactagatagtatactagggggctaatttaagatttaagagggggtgtcactctcatctcatagtcctcctagagtttcaactttcaagagtgagtagtaataaataatattcaactaaaaagagtagtaacaataaataatgttgtaacttatatagctatttaatagtgaaataaattaataaaagaaaaaacatataagcaaagacaaaaaaaaataaatcttaggcatgaatgacggaagactcttctgagtgttgtccctttggattggaaagtgtcctatcaatttattgaattttactgcaatttcggactttcttgctttcatttttgtatgcacgtgaaatctttactctgttttagtatactatatatatatactttcatgcttattattatttttcttcttctttcttctttctattcttgacatttattttctaagctttttcatgtttgggctgaatcaaagtgttgtatatgttttcttagctaagagaaagatttcaatatcataaagttttgatttttacttcttttatttatgttttcagtcttttgtcatttctttctttcttctctaccctttgcagattctagcctttgaata

SEQ ID NO: 189167 - DNA, 3071 bp, Cannabis indica
atggtgaattaagatactaaccctctttggttggtactagtgaaaagcttgttgtttgaatatttactctgttattacttgaaatgaagattcagataggcccaagaatgacaaaggaacaatacttacagactcaattcaaatgctgaaggatttaactgctgaagttaacaaattaaaggcagagtatgcatcactttcggaagaatcgcgtgaggtgaaattcttcttcttcttcttcttcttatgtattttcttcatggttgttgctgaggcttttatcaattattgtttgttacaaacagctgactatggagaaaaatgagctaagagaagagaaggcatctttaaaatctgatatagaaaatctcagcattcagtatcagcaaagagtgagggttatgttcccatggggtgcaattgatccatctgttgtaatgggtccaacttactcatatccaatgcctgttcctgttccacaaggtccaattcccttccatccttcatcgcagccattttcgttctttggagctcagaatcccggcgctgttccaaattttgtccaatacccaacaccagtccatcctccgatcgaacagcccacatctcagaatgcttccacttcccatatttcaagcaaacaagattcgagaagcaaatcatgtgatcaacgaaggggcagcaatgcagaaagagcttctgatggttccaccgatgtagcaacggatcttgaacttaagatgccaggttcttcaacccaacaggtttgtttctagagttgttgaaaacaactatttgaacaaacgaaaagcccttttaatgatggggacttgactgagtgagtatttgcaggactcgtcttctggagtaagtaagaaaagcaagcaatcgcagaggaaagaaaggactaccacgaacggaagctctacaagtaggttttcttcccaagctcatcaagatagctcctccaacagtgtgggtgacattccaaaatctaacaactgaagttgtgttccaaccaacttccagataggaaaaaagggtatctttgttgccaactaacaaagtcgaattgagactcttgacttttttcggtttccttaagagggacttgagaggtgtctagctcaattttgagaggtgtatagttcaatttacaggatggcatgtcaaagtttggtatctttgtaaattacctgtacaataatgtttttctggtgtagctggatattccacttccaggtcataaattagtatataaaactaatcaaaagcagcattttgcctttgttttgttcagactatcatatcaaaaacagtggttaattaataacactctaaactgtcaactaaaatttgagaagaccatttgattaaaattgtgagaaacaaactatatacagtccacaaaatccatcacagtttgatttttttttcctctctctctctctctctctttctcattttctgtttttatttatgtcacacattacaatttgtaaggtacaagaagaaaaaccccaacactcccaaaaaaggattgtatacaagtaataaccacaacacatggagccatcttctgtcaatatccatctgcattccacaccagctctatatataaccgattgcagaagattgctatcattgaattcctagcatttgacaaatgtttccatggaagaagaagaagaagaagataagggcctttcttgacttcagaagtagataaactaggaataataaggaattaacttcccatctcttttactattcattctcatttcaagtttcaaaaaaaatctcaattttaatctacagctttttaaaattccgaggaccaccagtggaagggctgggaacatttcgagaactaatactcgcagttctgagaagtctgcgaaattcggataagcttatcttcccatctctgtcaatgtcagcttcctcaagaaggggatcaatggagcctcttaagccagtgtgctgcaaaagaaacaaaggaaaaatcttagtaaccgcaaccaaagggcaagcaagcaatatctcctcggataccataaccactaaccattctaagttcctctgtagttatgaaaccgtctttatctatatcaaatttgtggaaagccgcttgtgaacgttgctgccacttgtcagagtcatgttcttccaattgatgaacatgtagagtggcggcaacaaatctcggaaaaatccacaagcccatctgtgttgctatcaatctggcatcaaacatatcaaataaagaaacaacttcagcaaggatctccatcaatgaaaccgttacgctactagtatggggcaacaaaatttaaaaaacatacagcttgcagtatctccaggacacgcgagtctttcagtttccacggaagatctttcgcaagagcctgcaagaacatcatatttgttacaaaatcaatacagtgcatgatagtgattgcttaagttcatttttgtcttgtgtcgaaaaatgacctgtctcatttcttcaagactaatagcaccatttttatcaacatcgattgcatcgaattgatctttgagatcggaaagctcctcttcatcaagtgtgctagccaatgcctgcaataccattaaacacaatcaatactcaatgagccttttacttgtcttctttaccgatcgaataggtaacaaaaacaccttacccttagagcaaactgtttcaaacgactgtatttcacaaactggcgcatattattcagaacagatatatcaatcggtatctctgatgatgcagttcctccttctctgacccacgggtgagctgaaaagttgaaacaaatcagaacaaaaacagatcaaaatactatgattttctaatattctttctaaaaacataaaagaaaacaccatgtttttctaacttggctatttatggtaggaaatcacaaggaatattataacttagcatttgtgaatcaccaaaacaatcagagcatctatttcaaaatgaataaataaaagagcaggcacatacatagggcctgggcagcagttagtctcgctctaggatcctttatcaataa

SEQ ID NO: 189168 - DNA, 4636 bp, Cannabis indica
ctaatcggcctaaattcttctatcttttggggcttgtcaactttaggaatcaaagctaccatcgtatcaatgagacaactaaaatcagccccattattcagtacattcaagcacacaacaatgacctcatcttttagtttagaccaaaacttctgataaaaaagtgcaggcaacccatccgcacccggtgccttagtggattcatcctcttcactgcttgcacaacatcttcatcagtaaactcaaccattaaatcctcattcattgccaaagtaactttcggctataccacatctagaacctcatgcaatatatcctcgtcgatgtctgaccccgtaagcaaacctttgtaatactcttccacaatttggcaaactagcatcttatcatcttgccaaattcccattcggtcttgcaatcccttaatctcattcttctttctacgcgaggacactttgtggtgaaagtatttcgtgtttcgatccccccactgcaaccataaagctctactcctttgtctccaatactgctcatccttttccagcaacccatttaacttatcttccatttgttgtatagcctcccacactcccggttgttgaaccattgtcaattcatgtaacgtttttttttgtcttagcaatctcattattcaaccgcgccttcttcttcttattccaatcttgtaatgctttcccacatttattgactttgcatctaaaagacactggccgaccccttccttgccattcctgccacattttatccacaatctcagtacactcctcctcatgacaccaagcttcttcaaaatgaaaccggtttttccttttagacttaccacacttatccccatccaatctcactgggatatcaatcactaaagccctatgatcagattcccaccaatcaagcaacttaacatcaacaccctcaaattgtctcaaccattcttcattacacaaacctctgcccagcctctccataatccgagaagatctatgctcattacaccaagtcaattcatgcttggaagaaccaaaatcaataaaccgacaatcatcaataacctccttaaatccatccatagctcccgaaagtcgatccctaccaccaatcttctcagctaaactcacaatttcattaaaatcccccacacatagccacggtccctgtacctctttcttcagatttcgtagcaattgccatgaaaatctcctcaaattagcttctcgatttccataaaagccagtgaagtaccatggcgaaaacccattccccgccaccgtagcaagaatatgccctggagaactatctaaaacttgcacttttgcatcacttttccacattaacaacaacccccactcatccccattctatcaaccgtccacagtgaatcatacttaagaacattacaaacacgctccgcttgacccctcgtcaacttactttcaattaagaaaatgatgctcggtttagcctcacgtacatgggattgcaacgctctcaatgtccagggattcccaatcccctggaccttccaacttagtagtttcattgcgttcggcggccttgaacaccaaggctcgccgcttcattttcagataaagaaataggtaaatccacacaattagaaacacctaccttagaagaatttcccacatctccatcctttccactcgcaccatcatctccagctgtaaatataacaacctcacccgtccctctcaccccactcccactgaaattgccctctgattgagctccgcccaccctagcttttgcccgagccttattcttaatggatattcgttttctagactctccccctttctttcccagccccttaccgcccatactcttccccacttcgaaccgctctgtatcccccagatccacagccacatcttcaccatgttcacaaagaccccccccccacatcgtcgccatcaactcggcctgaactcgcacaactacgcctacactttctcttccttccttcccttccatcctcctcctcaatttcgaatccagccgattccctctcccagcttcgtgtcccctttcctttgcttccattactacttccatgtgtctgtggtggaacaaacaaagaagacccttctttcaattgggaagtagaaaaaagaggcccattgtccaccggcccaagattagttttaccaactggtgggctttgtgcattatttttaaaaatgccattttggtctatttcagaaaaagtgtcaattttacctttaagtttatcagactcagttgcaccattgacttcactcccacgatcaaccccatcacccactctttgctcaacctgcatcaaccgagaaaactgctccttcccactactcacagcctgatgggaacccctgtgctccgattgaccaatctccggccgactagtctctccgtctatcccatgaccaccgttgctattaaccttcctcctccttgtcgagccatcaactgatcatacgccataaagcaattgggagtcgggtcttcctcttttaaccactgcccatattttggaaccggagtcccttgcgaattcatctccatcaccaacgcctttgtacaaaccgactgatcatgaccccagaacccacatttaaaacaaagcaatggtaatttgtcaaatttgaattgaacccatcttttcccaccatcaaccggaatatatcggccaacaaacacctcccgttgaatcgaaaaaccaatcttcacacgcacataaccattcagaaatatttgttgcggattgttccacactatatcttcaactttccctgccatattgcccaactgtttgatattgtttagagtaagagctttcaaaggcaaacctctcatcctaacccaacaagaaactgaatccaatctcgcgtctctccactgaccactagtcggccattcctccaacatcagcattcctccattgaaaagccacggctgcttctccaatgtcctcttagcttcagctctactgttaaaagacagcccaaaatattgatattctttatcatcattcagacttttgactttccattccccaattgatttccacattctagaaaacatggtcttgaataaccccacactcacactctgtttggatacaattctccctaccagggacttctcaccaaactcagccacttgctcctcattcacttcccactcctcttcttgattcattcccaattgatccgtcaactgcacaatctcatccactgtactttctgccattgtcataaccatgaaaccaacgatcataaaacattcaaacatgttaagagtcacaaagaccattagatatcactcagagccctccagaccatttttttttcattttaaaactcccattaatttaaacatattttttatcaaagtatctattaaatgaagaaaataggtggcttaaatttattggtgggatagggtggagacatggttttggggacagaaattttttttctctttaactgccccttgtgtattcaagcttctctaacttcttttgatacgcactaacttgtttcccacatagccaattattgatctacaggtaccccaagtaaaaaaaaaaagtcctctaaataatttgaatcgaaattccctttacaaaatttgagtactgaacatttattacagtattatatttcacctcagttttcaagcacctttaagatatatagctgctgatcaatacaactccataagttgtgtcgggcctatttctaatttgtcaagaatactatcaggcccgaccctgaatgatcaacaacaacaatatgcatgaatgaatattaaagagatttctaggattgttctccgcaacgtaagcaatgacgatagcaactataccaacctagaaagataccttgttctttacacagctaaggaataataaatttcattaatttgttactgaaaaacaattcatataaaaagtttactaaaaaaatacagttgacatatattccgttgcgccagcattttggaagctaactgttatatatggctcacttaacaatggccgtccaccacaacgtttcaaacaatagcaattataattaatcaataatatattatatatatatatagactgatgaattaattaaccagtgaaaaataagatcaccagatcaattatggcttctaaagtaaagacaatcaaacttgggttgcaaggccttgaggtctccgctcagggcctaggctgtatgggcatgtccgccttctacggcccaccaaagcctgaaccagagatgatcaatctcatccaccatgccattaattccggcgtcacctttcttgacacctctgacatttacgggccattcactaatgaaatccttatcggaaaggtcctaattattacggattctcctctctctctctctctatatatatatatatattttttccgcgtgctttgtttcttagattataattttggtattgagtatatatatacgtgcaggcgcttaaaggggaaattagagagaaggttcagttggctacaaaatttggagtgaaattgtcggaggatttgaagatggagattcatggggagccggcttatgtgagagctgcgtgtgaagccagcctgaag

SEQ ID NO: 189169 - DNA, 1507 bp, Cannabis indica
atgaatatatatatatatatatatatatatatgtggagaaaataatataatcaaaagatagtaaatcatttagctcaaatgtgtggtatgaatgaaaaatacaggcttccaaagctgaaaacaggataaggaggtggggaggaggagcccattctgaatctcatgatgttgaaaaataaagtctacactactctgctttatgtcatatttatttctcccaataagttatcattattattattattattgtttttatttctttggcttgaatattagagttgaaaaagaaaattaaagaggttttaattttattttttcatcattcattattctctaacactttcattaacaaactagaactaaagggaatccaaagatatggtccctcccctccccactgaagtcctcaaacttgatatgttgattttagcttcaccaactagattgttctacaaaatacaagagatgtctcttaacaaaactgaaattgcaaatctaaaactcacaacaatcttaaggaacagagaacaaagagccatcaatagtccaatgaggaaactttgtagagttaagacctctgccactagacatttggccaaaggcacaacaaccaaccccatataactctcttgaaagaagcatctacaaataaacacaaatcatgattttttgaagtagtgccaacaacacatatcactagggagcaagcctcaatcaatgtcatcaagtttggaaaatttgaaggatctctattcaagtctgagcaatcaaaccataaggatcaactctattatccttaattaacgtttggtttctactctccatatgaattccatcacacgagaagtataagtaaaaaaattatctccccttctatgtggggatcgaattcaccaactttctcagaatcgtagaagtatcttgctcatccaagtcatccgtcctcaccatatcctccataccacactgcacaagccagagggcatcgccaaaagtgatgatcaacgctttcttctgattcactgcacaacaagcaatccatataagagagaaaataagtttatcatgagtaggtaaagcaccatcagacgcttttcagagcatcaggttgttccttggatgcaaatttagagaccctatacacttctacaacgactgatataacgcattaattacttaggaataagggatgtcatgtgtgtgattttgtaaactagcttataataataagttcaattttagagtatgatataacgcattaactacttagaaatgtcatgtgtgtaattttgtaaactagcttataataataaactcgattttaaactatgatataatgcattaactacctaagaatgtcatgtgtatgatttggtaaattagcttatcataataagttcaatttcagactatgatataacacattaactacttaggaatgtcaatgtgtgtgattttgtaaactaatttattatcaattttagttataaaattttgaataattaaa

SEQ ID NO: 189170 - DNA, 2099 bp, Cannabis indica
caagctctccgaccgagacacgtatggcgtcgctgcggcggagctcgactctatagctcggggactcgagcctaactcgcttggagtcttcgtctcatgcatcaactccaccgacgcctccgacaagtcgcccgtgcggaagcaatgtgtccggatcctggccgttctcggcgagagtcacggcgacgctctctcgcctcatctcccaaaggtgctctccagcgtcacgcgacgcctccgtgacccggactcggcggtccgatccgcctgcgtagatgccgtcaccgccctccggtaccacgtcagccggccaccattctcgtcgtttttgagaccactcgctgacgcgttgtttactgagcaggacttgaactcgcagatcggtgcggcgttgtgcctcgccgccgccgtcgacgccgcggaggatccggagacggcgaagctcgcgaggctaatgccgaggttcgagaagcttctgaagtgcgagagttttaaggctaaaccggcacttctagtcttgtttgggagtttgatcaacgccggggcagcttccggcgagggaactttgagaagcttggttccggcagtcgtgcagttcttgagcagcgatgattgggcggcaaggaaggctgcggcggaggtcctgttgaagttggcctctgtagagagggactcgttggcggaattcaaatctgggtgtttgaggacattcgaaaatcgaagatttgataaggtattcatatgcataacatacacttaccatattactacgtgtatacgtgtcatgacttcttgttcttcttctttttgtgcataatatattttatgtattgattggattttgatgcaattgtgatgaattggtatataggtgaaggctgtaagggagataatgaatcagatgttggaggcttggaagcagattccagatgtttcaggagatatttctccaccaccacaatcacaagcttcatcaagaggtattttgttacatagttcaaaggacatagagttgtgtggtaacgttaagagttgttctatggtcaattttattttgtttgcaacccttacaagaaaaactgttacaatcacagttacaataactttgtcatgctaatctttaagtttttcaatgttttggccatctgtggtttgtttaattcttttctaagacttttcgtttaggttctgctgtgttttttgtttcttagtttagctcctttagcgaattgtcttgagcatttgagtttatgattatatttgtaatgagtgtagataatgcgagcgatgggcgctatccaccagggacaaggaattctggtggtgctagttcaaaagctcttcaatggaggaaaaggccggtgctatctaacagggcaactccacctgacagctcttataccactacagctcggaagaaaagttacttgaaaagtgaagaaaacaaggcaaagtcagggatgtttcggaagctggacaagaagaagccatcgaactggaatgtcaatgtagctgttccaaatggtccctcggagagaggagggattcatggtgatgatggtaaggaaagagatggagatgttcaagacaaaaggagtaatgaaaaggctaagttatcaaaaccggaaacaaagagggcactgttctataagagttctgatgacaagggacacagatttggtggattaaggtctggatctcgtgtggctccattccaagaggacagcaatgattctacggttgtagtcagtaatgctactgcggatatccataagaaccataatgaatctgaagatttaacattgattcgccatcagcttgttcagattgaaaagcagcaatccagcctgttagatcttttacaggtttgttttccactgcaagaaaattgttttatatttttaagttatctttagtcatgtagttaagctaacttctgttgatttgtcgctattgcccatttgaaatattagcctatttaacaattgggaggtaacgctttagttacgaatatgaatgtctttaaagtacctctcaagtagctgtaactaaccaccaacttttagagaggagtgcttttgctagaatgcacaaatgag

SEQ ID NO: 189171 - DNA, 5181 bp, Cannabis indica
ataaaaaatgtatattatcaaagatgcataccacatcataagccatactcaaccgacgcctctcatccaatacctctcttgcaccagatttatgcaaaagcctatataagctacctctgcaagaaaccacaacttcacatgttagggaacttataaacaaccaaacaataatatgcaatgatatatctggcacaatggacaaaaccttgataaatattctgtgactatggacaagttcggtggctgtgtcactgctcccataaagagaacaatatttggatgtcgcagatgtttcattattgcaacctaacagaagtacaaggcataagtacacacaaacaagccttaaaaattcaaactgacaaattcttaattgtggtattagtttcaaggaagtagttagtgccagcctatacctccctcaaaaattcattgaagcgttccggatgaaagtcttgctccataagaattttaacagcaacatcctataatttgacaatttttatctagagtttagaacaaagagattgacaaaactagaagaacagcacctccaaatctggatataaaagttaaaaaaattggcaggtagagaaatggctaatgcaaatagaacagataacaaaaagtgcataaacatatggattgatttcataaaataatgattttgcaaaagaaagtatagatgcttaccgagccatgccaatcagcacgatgaacagtgccaaaagaacctgcaaatacacaaattcaaattcaaatatgaatacatctcactatttcagtagttatgaactgtttagatcgaagcatggaccatttttttaatctaatgtacaacaataggttttgcctccaatttttgttgaaaagaagattacctgctccgatcttttcttttattaccagctcactccatggaatgtccaaatcttctatatcaaggttatatttgttactaggcttattgggaataagttgaccacccttactgggaatcagttgaccacccttactgggaatcagttgacctccttctccatgcccaacagatggatctttgattcttgactgtataatattttgggcaggactatcttgaacaccaggttgaccaactttgctaggccgaactgtttcatcaatgtgaccaggaataggtaaaaagctcttaacatctggactattcctatcataaggtttgagatacatgggaaatcgattgttttcttcatcagttgtaggtcctggggtgaaaggtaaaaataaaaatataaaagatccaacatctaatactatataatgcatgatggatgatgcaaaagagtaagtagaaactcaagaatacttggttatcaacatcacatgttctcttttcaaaaaaaaaaacatcacatgttctgaattttcttataatgtaagtataaattcaaccatcacttatatataattgtaaatccaatacaagccatctttggactaaactttcacttaggtgtgcaccaatattgcactttaacaccattatgtagctgttttaaacttttaaaaactcacatatgcactccatacctctttaacacgtccaatttttaaacacaaatgtcactcagaaataaaatttcaaaacaataatttacccgaggagacttcatcaaatgcaagattaagtgactgacaatctgagaagtactgtttggcaagtgctctgaaatcaatgattgtttcaactggtttcagtcgtggaaagcgcaatggtgaagaaattgaaatggatgacggaccattgagcaaggaatcaggctcacataggaaacctggattcccgatcaaatcttaaatactccctgaaaaaaaaacaacaatatgagatgcctttactctttttaacacaagtcagaatgaacctggcccctaaccccaaataacaaaataaacaaatattatatgaaagtagattgaaatataaatacgtacttaaaaaaaaagaaggggcaactaaccagaaaaggcagtagaaagattatagagagaataaaaccaaaagtgaaagaaacaaaattcaataattcagttggactttgcaaataattgagttgacaacagggaaaagagagacaaaatcagtaagcggcaattcaatagctgtagagctaagtgatttggtgtaaagagaagaatgagaaagttattcaataaactagcaacaatgtatatgcaaataattaataatcttcaaatcattgctagcagtatgcacgatagtttaatgtaaggcttacttatcaagcccaaagcggacaagacatgaggaagcatcatctcttcgacaatacttacaccccttggctattcgacatggtaaatcaattatgtcagctaaaacctgcagaaaccatattaaggttagtaaatcactataccaaccttgcaaatatacatatatcaattaatgtatcctcaagcagaacacaaggagggcaaaatgtgttaatatacatatgcatcaagtttaaaaaaacataagcatccaagagctaccttgcaaattaattagattttccttgtgaggtgtgccaatatactaataaactaaagcatactttggggtcttactttgaacagcagagcacgatgcctacacaggccgatggatagagtgcctattggaacaacaacagagcctaggcactctttcaggtcctcactaccctccctccaggctgaaaccaagtcatcttctcctacagacgctgaaccccttgtaataggaacaaaaatttgctttgattagattttctgaaagatagaattattttttaaaaaaacaaagtaaaaagcatttcattgaagaaaaatgcaaacttaccccatgcggctatgtacaagctttgcaagctgatctacaacctcttttgtggttacgcagctactagaaatgccaagaactctattatgcagttccttcaggctgggatcactacgcctatcaacaagaattgcttcaattgaagagccaagcctagaatcaacagactttagtaattcaagggagggtatacgaccattctcttgcagatcagtacacatagtccacacataaggatccattccaaggattgagtaaaatccatctggaactttgtcaaagtatgagaggcatccattcacctgttgcattttcataattacatgaaacaagaaatccacaagtaaacaaagataaacagattgcagcatattttaaacaagtcccacataataccattaccaacctaagaaatgttttggctctaacagacttgttgtttgttcgtgtacaaacaattacaacaaaatctgaatgactttattacatggatgggcgagacagctaatctgtttttcttcaaggtaaaataggataggttataacatatattagtaatactaataacattaactacccccactaattttcttgctttactatagaggtgttcataaatcaatctgaacgatgtctctagctctacaaccttgatatttatgatagagaagaaagaaaaacaatacagaaattgtgaagaaagatgcaattcccgaacatgtttagcaattcttgatactgtccggcttcatttaccatctgctgttaccaggcttcttttttcgttcaaggatatgtacataattaatataactcaaaagtaaactttctgatgcagagcttatagaggcacatattattatgaaataacaaattaataaagtagtaaactctagaagacacatttgtatgattttatccttctggcacagaactacacaataaaaacacccactttcaaggccaatggtcgaaaaggatcacagataatcagtacctgatgataactcctttgaaaaagaaattgaagcacttcaaacatgaccgtactagttatggactacggcaatcatcaatgaaattaattaggttgtcctacgagtaccaaaccatctatgtaatataaggaattgacttcaaacgaagataccgattaattcataactatactttgaaatcctaagcagtcagcactatggtcctttacataaaagttgaaactaacagctaaattaaagctttgttttctgttctaacaataaaaaggtgaatttcgtaatataaagcacaaagtacaaatgtagcaatagaaaactagataaagcctacgaaagaaaaagagcataacatcatcacatacccaaaacctatgtgaaatagcttcaactgaaatcggagatgaggcccttaaagcggattcatcgggcactggatccaagaaattgggatcatcggcacaagtcgcatcagatgacagccgaagcgccaaagctagctgcaactgataactctcttccgtctgctgagcccagctcttccccgaagacgatcctccggtgcccccaacaccgtccaatcccttcccaccgaactcacttccacctccaccactaatcttaaaaacatcatcatgcaaataccccatcgcgtcgatctcattgaccgcagcagtggacatcgtcggcgggtagtactcacccgaaagcgagctttcaccatagctacttccactcgactgcctttgcaaaccgatcgatgacgaatacacgttcccgatccgattcacctgctgattccctctgtgatcagctccagtctcccaatcgaagcccctttcgacccttcctttgttattctttccctctcccgatgccgaagtcgactcgtaaaacgatgtcccggtcgcaccaccaaccccggcggcgaactgctcatcgtcgacttggcttaaaagtgagtagttcgatctcctaccgggcatttccatcgagattctaacaaattcgtcgatcacaaaaccccagaaaccctaaaacccgccattgttgaagaggtaatttgattgaagggaagaagaggcgtttctctctctagaattcgatgtcggagagagagaagaaaataaagcgggtcgattttattcggtggcgaaaccgtaatatttcaattcaattcatttcatttcatgtcttttccattcttttcttttcttcgtttttgaaaaagtcataattacccttaaaaaaagataaaaaaaaaggttgttatcaaaaataataattaagaatcataaactattagtgttttttttt

SEQ ID NO: 189172 - DNA, 2290 bp, Cannabis indica
aaataggacctcgtattttctaaaattgttcaaataggaccctgaactgattttttgtcaaaataaaacttaataatattatgatctagagatgttatgacaaaactggttttattttctgtatttattcgtgttataaattgttttaaagttggttatattaaaaaataaaattgttaaaaaattgagctcagagttctatttttaccattttgaaaaatataaggtcacttttgtcatttaagaaaatagatggtaccaattaataactttgacaaaacacataagtccaaaattatatttatcctttcttttgtataaataaattataattattaaaacaatgttaacactaatttttatacattgagaaatatatgctactgtcaactttttattacaacttgtgtgcctaaaaatatatgttgaaattatttttttctatttttttccacgacggtattcgtgatacttacaatatcatacttgtaaattttagaaaaatttcgaatagtttactgtgccgaaaatgagtttgaaattttttaaacacttgtggtaaacttgaatatcatgaattctatttttggttctatgtaaattattcagaattttttaaaaatttacaaagatgataccgtaattatataaaaaaaaactactatgaaaaaaattaaaaaaaatatttcgacatataatttcaaacgtaaaagttaactaaaatactataataagaaattgcaataaacactcctcttcggctcgtttggaacgtcgtattaggtcgtattgtattatattatattgaattggattatatatcgtatttttatataatactatgctaaactttaatgtatactaaaatattatatatttaggtgtccataaaagttaattccacatataattttatataaaaaaactgcataaaatacaatacaatacaacttaatacggccggactggcgttacaaacgagtacttacacattacaacatacaatattaatcctttcaaaaaaaacatgcaatattaactaatattttttgagttgtttattgtttttaactcatagcaagaattcaatgaaacaatgtatatgattatcattatataaattcagacaaagagatatgaaagcatgcactataaaaactacttaaaaatgttttattttaattaattattaataataagtaattaaaaacaattaaagtgagcaaatccacaaaaagattcatttcacaccttgaatctctcacccttttctatcattaaccctataaaaaaaaaattaaggattaaagattttgtcatggaattgggtttgattatcaagaaattttaatgttaattaaagctaataaagtaacaaatattctaattaattatgaaaagagtataaatattgcacctaggatcttatcctttgatttgatatgttttttttcacataccatgcctcatactttggagacattataataaagttttatttttatctttaattgattaaattaatttaatttaactaaaagtcattaaggcatgtgactagctgcaaatccaaccaaccagcttagacactaactttttgttaattgaaatttggaactgtaatgtaaatgttaataatttttccttttaaaaaaaagagtaaattataataatttttttaaaaaaataaattaaaataatctacggcataagtatttaagtttaattatcggttgtaaataaatatataaattaatttttggcggtaataatatctaagttatatttctagaattctgtaggtacctgactgttaaatgtcaagtcattatccacatgtcattttcttattaatatatttaaattaatttttttaaaaaaaaaaaatcatgacctgtaccaattaagaattgtcacgtggcaatttatttcacttgatagtcaagtacttacaaaaattttaaaattataacttaagtattattaccgttaaaaattaaatttaaatatttatttataattgaaaattaaacttaagtatttatgtcgcaaattactcaataaattatactaacaataataaaattccactcataatgtgggatttttcttctttttcaaattatatacttcattataaatttgaaattattatagttgaatttcttggtttttgtggatcatggtttttttcttctccaaaatcctaaaagttctagtatcaataattattttctttacttcttggataataatgatgattgttgattgttcaaaaaaaaagaaaaaa

SEQ ID NO: 189173 - DNA, 1230 bp, Cannabis indica
gatggtgcaaagatagacccgaaaatcccagaagaaggagaagattctttggacccaaacagctcagaagtgaaggaagaagatgaatccacttgcttcttcccatccattttctctctatagatacttaatcaaacctctttataactattatcaatacccttttaactgcttaagcacagaatgaaaaccatacaatacaactacataaacacacacacacgtatgagatgggaatgaccgaaaaaccaaaaaccccaccgtcaaagaagacttgaaaggaaagaaacggcgataagatttagttttccttttaatgagaaacaaacagaagaaagcacggaaaaggaagaaagaaaagatatgtatatatgtatgtgtatatatacacacaggataataaagaccaaaatattgaaaaagaatggagaaagagagacacgtgaatgaaaagcacacagaacgaaaccgtcactgaaacccaaatttataagccgaaaagatggcaacccatatcaaaattttcctttattttctcgttctttctctctcttctcgccgactaccgttctcattttctttttttctttttttttccttggaaaatttattaaaatatcgaaaacaaaaccagttttttctgtttttctttgaacatgtcgactgagtaaacaaaaaaataacaatagtaaaagaggacacgtggaagaataaggagtcaattgtgggaccttaaaacatggcccaaccttttttttcttttaagcaaatatataattttgattaatttgccaaatcttagtaacatcaatcatgttatgttgaacacttgatttaaaaaagaataaaatgcgctagttagattagcaatcttattagtatacggttaaaaaaaaaatatattatttaaagatacaaaaaattaacaataatcttttataataattcaaattgaagaaaatataaataatgaattttgaataatttggactcctaccaagcaatttaactccagctctacattttgctacagttgagttttaattcagcttcacgcttcttttatatcaattacttcaaccaaatttagtgtgactatactagtaaaattatccaacttaatcatcattaattctccttaaaagtctcgagcgactatgcatgacccgaccttttaatctcaagtattacacaaaaagatctaatctctttttttaattatttttgttt

SEQ ID NO: 189174 - DNA, 2602 bp, Cannabis indica
aacccatgaattttgtaacctgttctactgtccaactgtctttcaattttctaataaatctttgacggaagtctccatgcatgcaaccacagagatttttcagtaagggtaggctaggaatttgtcaaagattaaatattccaatattatgctttaagttatagtcttttgcttatttatagctgtgatcttaccccttttacttgtactggcttccaaaaaattttgttaaatcatctactactataggtacagtatatatatagtaagtttgtagtgagtaattattatcattctttcttttgttctttttctctaatggcttatcaatcaaaaatcaaaataaaccacaaatattcccagttattcatttctaacgtgtacagttcagaatctgacaagaaaaatatttaatgtcttatcgagaattacatttatgtttttgttatattagtattagcagccttaaatggagttaccaaacttagtcctcttacacattaattgagtagtcctcttacacattaattgttaagtccacatattaagtattaactggatagttgcacaatagcacattcagaactggtagatatggtaaattaagtcttcgtaggaggattgtttgactggagagaattaagttgattttttgagtcataccattttgggtatctacttattcaattttataggttccatggtatccaaacccaacacctcattgaaggaaatatgtaattatgtatggtgggtgtacttgacatactcttcattggtcttttgtatataattttaaagtcaacagaaggtgaactgagtaattattttttgctaatagatgtgtgatgaggatagtgaattatgtgaagtcagcagaaaagaaatgttagtaggcaattttgtgttattaattttgagataactacgttgggatcctttttatatgttatgtaaaatattcccatttatcttggataacttcataggtatcaccagtttttagctatttcaaatattctaagttggtaatttctgaaaaatcagactaaataaaattatggtagggaactccaatctctagctaaatcgacaaattaaattcttttgaactctttcacattgtataactaacagcctacccaatttgtaagtttctcccatatatttcgtgatcctcaaaatttttctaagtcttctgttgctcttaaaccagatttgcccaccagatagccattatagctacacttcataacctttttgttttatcttatcttcttgagataaatgaatcaaatactcccaacagtgttgctcaatcaccctctgtatcttgaattctttaagccacctgtttctgaacaactgaaaacaaaatactatgtttcttcatttttcttacagtgcagaccacacaggagacattgattgctatcagtgttgatttgtagcattactagaagtgctatatatataattcaagttaatgtccatggaattagtttctgtcttcatcatttaccttctgtttcttcatgtcaacaatttgtttctcataaataatttggtttcatgccaacagatatcccctggagatattcaatgggtagatgaggaggtctctcatcgcgggggctatggtggacctggtcatgggatcaatagaccaataggaggtcgtgatactgttccaggtgctggaagaggtagaggtgctacaaaaggtcaaacaagaaaagactttttgccatcacaaaatggcattggaaagaaaatgccagatgagatcaaaatactcaacacggatagtttaattaaggaagtaagttcagtaggctggttacttttaattgaatcataggtttgttgaatccttgctcagagcatccatctgtgattgaattttgataggtggagagggtctttggttcaaatcatccggatccacttgaagttgagaaagcaaagaaagttctgaaggtcggtacttgcaaaagtatttgtaatggtgtttccttaggtctatgtttattaatcatgtaccagcactgttaatgtaggaccatgaacgagctcttattgatgcaattggaaagattacggatatctccgatggtgaaagtggtatagtataatctgtcttcatgaattcttcatagcatacttagctgtaactgactaacaatagaataatgtcatcagagaagcagactctttaagcagtttggcataaaattaatgttttacctttctcacctcacatccttctaccatgatagctgttttgaaagtcggcttcattctattttttattttgtaacaagtttagtatcccctacttgattcatttttctgtttgctgtgaaacagatgaaggtggacaccagttcttgcatggacaatccatggactgacaatcatgtattttggttagttggaaggaacaaaaaaggggaaataaaaaaaaatagttggttgatttaagatgaagttgtgcaataagagatggccagcttgataatgatgctgtgggggaacaaattcaattgataatcagtcctcttttgtaaaatcagtcctttttcttatatatataaatttt

SEQ ID NO: 189175 - DNA, 4470 bp, Cannabis indica
actaccaacaactaagttaaaaaaaaaaaaaaaaacttacttacttcctagctgggtttattggaaaaacattgacaatttagacaagtgaacaccagcaaacaaaaaggccggacataattccggtgtacacattatgattcttcctcatgaattttgaatcaattgttggaactaagtactttttcactatatacaggagagctggttttgtaccttaaacctcccaattgccacactcttggggggttcatctgaaaatcttttgaattcaatccaagcaggtcatcatcatcatctccttagcctcaagtcacttgagaaagtggtgtgtataacatacaagaaaacgtttcccaatcactgtattgtccttgtaagcttacacttggaaatgaatagagtatctgtataatttaagctgcaaagcttcaaaagctcggcagacctttgctttaagacaggaccacatccactttgaatgacaaggagaagttttgcggctagaccggcatcaacagccactggtgagcattcctccggggcaagtttgcatacagaccataagattgatagtgcatactgagtacagctctctgaaattctcataagaagtctgaccatattcggtatggtgtttgaacaaactttcaaagctaatattccctctggtagagttgacaatgcatccagaataaaaagagctaattccaagcattcaggatcaagagaaggtaacaaattaaccaattgaggaacagcaccaatcctaacaatcaaaccccttacttccttgtgcaaggaaatagttttcaaaaggccaagtccaggcaggacaccattggtatgcctcctatctttaataagcctcatcagtcccaccaagagactatgactcgaaacaatttcagatctaaaatccttttcttccattagagtttcaatcaacttagtacaactgattttagtctctatagacccttcattcaaaatgtccaccaacaaagaaatcttagcaggctgcatcaaattggtttttgattctgagtcaagggtcaagtgcacaagaattccaatggcttcggcacctactgcgtgggatgtaaatggaccaagtagagatgaaattgcagcaaccccaccatcttcaatcactgtcttcctagcagtggcatgtactgccacaacttgttgaagctccttaagggcctggactctagcttgacccttaactttcttcagtgtctcaagaagttctgaggcccttccttgcacatcctctgacctcttcttcatcagcaagtacttctgtgaaaaccaggtgatgataagatggtacagggttcgatttggggtgactgaatcatcccaaagctcctgcatagttgtggggcaagtaaggtgtcccaagctgaaccatttgagaatgttggacctctcataagtttggcccgtgcaaagggtcacagggtcttgcattggttcaagagagattggacaaatgaacacagaaggtacctcagacaagtcaagctcttcaatcatcttcttcagatccaatttgtcaccaccaccaccagctccaacaactccaccaccaataccacccaagactccatctttgacagctgtgtccagatctagaacatgcgcatctccaccactggcaaaaccagcaaccccatccctctttgagggctgatacatcggcatttttgaaaacccaaagaggaaaaccagaacacccaaaaccaaaatctaacccagaaatgaaaaaccctttaaagaaaaaaaaaatcactgcaaggacaagcacccttcagggcacattacatctggctggcacatgaagtgtgtgaaaagagataaaagaaaaaaagagagagaacagaaattcctcaatttttattttttatttttcttcactcattgacaatcacaagcaaactatactagtctctttattgcacactcacaaacacacacacaacacctgttcctttagctttctctgatccctttttatggtcaaaagcacaccatttccatcatcataaaacacatcataaatacataatcaaacttctttcacttcaagctcaagcttcaaaagggttaaatcaacaaccccttttaaccagaacaaaaaagatgtgccataaagcaagagaaagaaagaaagaaagaaaatttagaccattcaaagagaaataaacagtgcagagagtaaagaccagtaaatcaaaaataaaaaaccaactattttcctttttgggaaggatatagagattttgaatgaaaaactaaaataaaatggaagacccagatcataaaaaaaggaggaacttgaggagccttaagaggaaaaactaagaaagaggccgtaccgccatgggtcaaagaagaagagagtagagaaaagccatatccctccctctggcaaaggcttcccctttggctctgcttttgggcagttagctgaatgaaaacccttcacggaaaataataaaaataattattaaaaaataaattaattaaaaacaatcacactgtaaaataaataaataaataaataaatggcataaaaatgtgtgagactttgaaatatcgggtaaccgggagctacgggctgtagccggtaactttgcccctcgtcccgcgcaccacacgtgcagtcaattaaattgttcactttaatcaaccgtttcccagttatttttacttgctagattcttcccctgttcgtcccccaagggactttcccaaatgacaattctacccctccccccaaattggttaagctttgttaacgtatatatttatttttaatttcctttttataaaggcataatgtggagtaaataaataggaatttcaaatacttgaataacttcaattgattatatattatatagacatggtttgaatattcaactttgaccaaatattttgctttcaatgttttttaattttttaaattatgccacaccatttgtttgccaacggacattaatactgaaactaattacaattaatactcaacacacacgaactttgaaaaggaaatatatatacaaacaattaaatgtccttttaaagaaaaaaaaaaaggtcattttatggggacaatcataggacaaaatggtctttttcttttgaccgcacgtaggaaaataataagaataattcaatattactaaaatccatacaacccacacgggtgacaatactttgggtccgagccatggttaaaaaagtaagaccatccccggtacgatgccacaatctcgatttaccaaatcgaatattttcagatacttttttaaattttaattttaaaaaacaataacccaaacaaaattttaataatttctttttcataaaaaaaaatggtgggcccagtcagcgaggctttattataataatatgattattaatattaattaattacttcctttaaaataataaagtaccagctaagcatttgaccgtgacagtttttgctttgactgtacgcctactgcttggcttatccggtctttgctttgactgctttgctcactccatgcactccaagacgttgctgctccctaccttcccccaccaatcacctactgacacgtgtattctgggaaacgtgtctctcaggttactcttctgtttttatcccaattccttgaccagcgtcacccctccttattacaattttttttaattaccatttttagttataatcataaaaataggttgtcgttttccatttctcttataagtaattttttttctaaaaaactatttgtagattttcttttttcctgacaatttaatttgtcttgctgggttattattttcaggggtactgacatagttgaaggtgggtgggctgtaaatttgtgaattagaaaatgagtgtgtttggtttgataggtaaaatttaaaatgctaggaagaaaggtcagtaaaaaatgaagagagaaatatatggtaataaaatgtttattatttaagtggggggtgtgggttttagggtataatggaggttactgtaggttccagtctggaattttaggttggattggaaattgtaattatttaaatggagcatagatttatgtacattattctatttagactatgatccacatccagggggtgtggccttaatctctgagcacatctttaagattattatataatagaaaaatgttaagataagagttttaacatgtatcagtgtgtatatattatggttcacaacctattggaatcaatcacaagaccatatgctgctacttcataggtgtcacatgacccactaaattcaaatttaataagttattatgacttgatctgctagagttttatattccattgaaaccagtcatgggcaaccttcaaattgttagagcttttaaatggaaggagtatataccactcatacttttctttttctttatattattattatta

SEQ ID NO: 189176 - DNA, 2293 bp, Cannabis indica
gtgatgacatgagaagcaggggaaaccagaaaacaaaaacaaaaactcttcacactcaaccttaaaaccttgaaaaaaaaaaaaaccttaaaaccttagtctcctaagttagagattagcaagaaaacataagaaactactgcaaaattactttgtttttgtggttgatctttgttctttgctaaaggaagtttcattttcaggtcttattactgttgctgatttgattggatgtgatgttgaggagcttaagctagctttgtcaactcgtaaaatgaaagtggggaatgataatatcattcaaaagctgaatctatcacaagtaagaatttgattatgggacattatgtgtttgtattttagataatatataatacagatttagtagatagtcatgtaaaatgggagttaagtgagttactgtccttttacatatttatttctggaaattgcatctcattattaatttattatttaaagatcgttctagaaattggtccataatgagcaggctgagtttcaattgaagatcatttgtttgttattagtttccctttttacagttttgaatactgtatttaaggcagattgtcattatgatcttaatgcctcatagatgttttggaattgaattccacaataccagattcctggaaaatatgttgaggctcttcctaactgctcaatttcatgcatgtgattaggtcacaatttgattatatatacttttatttcacttatgggcatgttctaacatagaccaccaccctccctcattaatatgatgccatactattatttgatatatttctaaattttctgtttctttatctgtctccttacaatcgtatttctgatttttacccaggcaactgacacaagggatgctctggcaaagtccatttatgcatgtctttttgaatggttggttgaacaaattaacaaatcacttgcagtaggaaaacggcgtactggcagatccatcagcattcttgatatttatggttttgaatcattcgatgtatgtttcagctatgctcttactatcaaacttgctttctccatatatataaatgtaacataaagttttgtgccctgtactttgttctacagaggaatagttttgaacagttctgcattaattatgcgaatgagagattgcagcaacatttcaatcgtcatttattcaagttagagcaggaggtaactattttatatttgaacagtaagaatattacttcatctcaccattgattcggagattgttggtcctgcattgtttcattcttttctgatagttgttatatttcttttctgatagttgttatataaatcagtttcagtgtgtataattttttggctagaagataataaataaggaataatacgctacttgcttataaaagccagatttgttaaagtataagtactaacatgatgatgattgatgagatatcacttgcttttggaaaggatgaaatggaatgaggcagtatgagaccttgcgttcaaactcagttcaaactgcactattttattttatttatttggctattcagaattctaatgctaataatatgggtatgattctgaaatgactgttgctaggggcaactgctttgtgcaattatcttgattggcatctaaaactatggtgataaagcatatatacatatgctgaactgtgtttcttcttgaatattttgagttttcattttgggattccattccaccctctactatttttaaaattccttatttatgttgttttgcttcccttgagaaatattaatgtcaatctcatcttattatgtttatttacaggaatacatccaggatgggattgactggactaaagttgagtttgaagacaaccaagactgtcttggtctttttgaaaaggtcagtattgaagcttgttgaatattttccatgagttaaaaatgtatgtaatcattatagagtatcattttcttgatgttcttttaaatccagaaaccattaggactactctccctcttagacgaagagtccacctttcctaatggcacagacttgacatttgctaacaagcttaagcagcatctgaaatcaaactcttgttttagaggagaacgagacaaagcatttgctgtccgtcattatgcaggggaggtatgtttaccttttcacaaatggtcattattctattctcttccattattcaggaaactactgaaattcttgaatgctgttcattctatattatgtttgacctttttgtagtagtcttcctctatctctctctctctct

SEQ ID NO: 189177 - DNA, 1533 bp, Cannabis indica
atcccattatcaatgattgactgaagcacaagtccaagctttccttccaacttgtctcctttccttggtgtataaactacatcatgtatatcatcagccaaagctctctgagcaagaactgaccctacagcagagcaagctgctgaatttctagttgaagccaaatcaaacttcatatccttggatattgaatgtgccacaaccacaaccttactagtggcacgatgaacaatgcaggcacgaacagaagcatttgatataaaaatgtccaagcagaagggttcatggtaaggacctgtaagctgattataagtgggattcctcagcttcttcttcttatcattgtaagtagtgtccgtttgatccaatgcagtaaaaccattatcatacctgtttctcatgactctggaaaaatcttcagaattggaggccagatttggagattgggtgtcccttactgtttcttctgaaccatattgcttcctcttattgtcttctaaatcacaactgttcttggaagaagatgggttgtcccttagtccttttgaatcattcttgttccttttgttctccttaggatcatcttttttcttggacgatttcttcctacgatggaagtcaaaactgtactcttcaaattctttcgaatcacgatcgatcttgtaaaaaaggctaccacggattctcaaattatcaatatcatccatatcagggtcagcttcattaaatggtgaattgctaacacccaagtcaccaatccctttcggtgatgaacttgttgtggctgtaggttcttcctttgttcgccaagcttgggccaaacccgatgaaagttgccaagaggaatcatccacgagctcaatgtcataaccaccaaaataagggttgcaatcagggaacaagggagaaagatggagattactagaacaattagtatgagctaattcactttccttatccaaaacagacgaggatgaggctttggagaaagaactccaagtggttgacaacaaattaggtttccccttcaacacagagctgattcctctccttaagaacattactaagatctaggttatcgaacttatatacgaagagactctcttgggcgaaacatcaaacacctgatatgcaaagctcaactctggatcaaacagtaaatccttcaattgtcaaataatcttacttctttcgtgaacttttggctctttgttgttgttcctacaaagataaatgtttttgaacgtgaatcttaaatctaattgtagaagaggaagaaatgaaatatatgagagggggaacctagtttgattttgatctttagtagccgaaatccttggaggtgagggttgaaggagagctttcacagtagctaagtcgctatggctatactgactacttcgatatatttttgggctttttttacttcttcctgttacagaaattacaaattttataagctttttattggtgaaattcaagaaaaaaattataaaatatgaaaaattaaaatagttaggctaattagttaaa

SEQ ID NO: 189178 - DNA, 966 bp, Cannabis indica
aagaagaatgaaagaagggaagcaaattaatgaaaaaaaagtatgaaaattgagttgtctataaaatcggtacttgtaccgaacattgaaccacctcctttatattgatgatattaaaatattgaaggctattgctaagaatattttgaaaatttcgtcaggtattgtaattttctctatgttaattaattaattttataaaagacaaaaaagttgtgtatcttttccgaatgattaatactaaagggctctttcccaatatattttgtatgtgatgggtcatgactaatagaaaactttttgtctaatgaatactagaataattaaggagagataatgatttgtcaaatataaaatattggaaaacacatttaaatttggaaatcaatcatatgaaatgaatatatgatggaggtgatcactacaagtacaaacaaagttcataaaattaaaccattaaacacaacagaactacaaaacataatacgcttgcttgcttgcttgaccccttcaacatctatatgttaaggattgattaatgtatctaacttaataatattatgttgtctgtagaaaaattaaaccaataaagaactagcataataattaacctaaacagacaaatcaaaccctgccgaagaaggacccgaaccattattaatattattgttgttattattcacaggctcgtcacgttggattgagtcgaccccatatctgagctcgaacggtttatgattggaccactatagtcagtactcaaacctttattaaatttttccatagcaccatttatttgttccaatgttatagcagcaaaaccacgaccaccaccagacccaagtccctcaatgtagcgttctccatgctgccttgaccaggacacaatgtcaccgcttctttcactgtggccgctgcgaaaatcggtcccaaagggtcggttcccggcgacccggccaggccatg

SEQ ID NO: 189179 - DNA, 1150 bp, Cannabis indica
cagtgtttcttttaatctttcttttgagattgagtttgagagataaccaggattctcttgagctttttcacttagtattcctgtaaatggtattagcttttccatgtatgttgacgaaccccgccttgtttttttgcgatatacacaattcctaacattattgcaccaaccaccaccctgcaatgagatgattattcaaataaaacttttagtttaagagaaacaccattagcatataaaggactcctgaaattttcttgaacctctaatgtaatgagaaaagaaacaagaataagaataaagcaactatttttttttcaagaccacaaactttgtcatctgaaatcatccagtcaaaagtattctatatggaccatccttgaccctgtcaaacactcttttcttatatactaaagcaccaaaaacagctaggaacaaaacattgctacaatttgactttttatctcattctatatcttggtaagaatccaaggaaagaaaaatactataaaatggaaattttgtcaatacttatttgaaactagaatccccacctaacccaatatttgagaaccaggactctatagcacccgagagggactcgggtcttgagtcttgagtggtatttttgttaatatcaagccatgcaaaatttatgcagtaacaaatgaaagatataataattgttcaatgtttatatctcacaaacctccaattgtataagccaattatttgctcctgatccatatccacggtgccaatggtatcctggcaaggttccatccaagcagactgtaaatgataaacaaacaacattagcccatcatgtaagacaaagctgttgaataaaatatatatatttaaaatcactgttgtttacacaattcaaacaagatctacaaattcaaaatttaaaaatgacatgtgcagtagacatattaagacaaagtaacaaccaagcattaagaaatggttaaaagaggaaagctaaatgaagaaatgcatagaaaaatatacccagattttcagagatcttagaagaaaaaagcattttaagatgaaaatgagaggcactataaaaatctaaaggagatgtttgattacccagaaacaaatccactctctactatgcagctacttatttgatatt

SEQ ID NO: 189180 - DNA, 2137 bp, Cannabis indica
ttttctttcccaccaaattacaacttccaaacatagcctaactaacttttaagacattcttcagagaaaaaagtttacctgaatgctgagcaagcttttcaaaacccattccttttcagtttggttcaagggttcagaagtatcataatattttaatcacccaataatttcgattgcaaagtgttcatctttcttcagcagataccgaagaatttaatacgttcgaggattctgtatcattcctcaattctttctcgttctgactttcaagctggtcgttaagaatctcgaggacattgtttgggggacatttatcagctggattctttggtgacatctgacagaaacattctggccagggattggtgtagaaagattcgggtgggatccgtttgtgtggcccgccaaagtttgtttggagcatgactttcttaacagcttcttcaaaacctgctgtcttcccattttcccgatcgataaagattggagcaagacctttcctgtcgggtctgagtgtggttcggaaaccatagtacaaacggtgtccaaggaggttgttggcgaagttgcttggaccatcatatgtaggcatgaaaatgtctgataagagacataccatgtaatccacggcagatcctaataatccttgggtgtttcctgctagctcgtctgtttgttccaccgaattgtggttctcaaggtgagggaatagagagcgaaatggtttcatgaacttctcaccgccgaatagttcaccggctgctaggtatatcctggtcgaattgtcgaagcccaatgcacgtaaaataaggccaacctgcagataaaaaagacccaacactttccaggtaaagagatgactttgattttgaaacatgaacttggctcaacagctaaaccgtcatccacaacgatacatgaaagaattacctcttctggagtcaatgggcatttacctatggcccttctttcattgtatatcagcttttttggtgcgaaattatcgtcccgatacttctttagtattttttgctgagcaggagtgaaaatatcaaaacacctgcaccgtgattcatagaatggaaaatcctttaaaaaggtaataaccttcttggataattaagatgtaaagtgttgttatttaccaaacctccctcccacacacactcgtatacacacaaataaattaaagaaagcttactaaaaagagacattcatgtagctatacctgaatctatccgaaaacagctgcagtaatcttatgcataaatagtcactttacataaattgaacactttagaagggacttctatgaaattggtcgctccttaatattctcaagacatttttatttgagggatcttttcttggtaattcctttttaccctaatcgagaaagactgaatcgcttcaactacaatgaaacctaaaaatgttacctatagtgctacggctaggacagacaaagtacttttattaagtatatctggagtgaaaaagaaaagggttgacaagaaaattgttttttcccaactcctatgttaaccttcttgttttattagcaaaaaaaataaaaataaaacgcacacacaattcggttagagcaaataagtcagaagtggtgactctataatatgataacttgatgagagcgtacccagcaaatgccagcatatccatctcaaaacgaagatgaatagacatgaaatgaccttgagtccggagcttatcaacaatagattgactcaatctcataatttgtggcttaaatcttaaagcatgatagttaactctgcaccgcaaccgttggtactctgggttgtcaatttcttctgctaaacgatgagaaaatggagtaaggtagatagcaccgtgttctttcattttctttagagcctctgtagtgtaccaactaacagaagcatccctaggggacgaatctgaggcaataaagaaacagaaaaatgaaaagaatagtcaaacagaacagttaatatctatcaaagaactccaagattttaaataattgtttatggtatacctgtaaagcttttatcttcttggttttcccatttttcttaatttctggaatgctttccacgatgttcacatcatatttcagtgccttgataaaatg

SEQ ID NO: 189181 - DNA, 1484 bp, Cannabis indica
gtgaatcaattacatctaccagcattacgagaggtgatggcttagcccaattatgaagtttcaattgaatcttcttaagaaaagattgcaatccacttactttctattttattggcctcattatcacaatgggatttcccgaatggctagtttaattgctttcatcaaccctgccaaagtaaatgtgtgacttatttgaattagcttagaggcacaagcagctcctaaaggtagcaaaagttttttgaattacatgaatgacttttggcgtccctttactaaacaggtatcaatcatcagcaaagtaaagattgactaactttaaagatttacacattggatgatacttgaaagttgaactatgggcaagcaaaaagtaataaacgagtaagatattccattaccaacacaaatagcaattgagagatgggatcccctgaccttaaacccttttcccctagaaatctaccatgcacacaaccatttaggactaatgaatagattgtcccccttaagcatgtcctgatccaaacaatgaaacctgacgggaaaaagataatgcttcaggagtgcctttaaaaactcctagtttatggtgtcataagccttgtttaaatcaattttcatgagacatcttagagacatgcctttcctattgtacccacgaagcaaatcctgaagaatgagaacattacgagcaatggatccattcttgatgaaggcaccatgttgattaatgaatttactacacatcatttgcagattcatttgtacagtacgtattgtaacaattaatcgacctataatcaatagctttagaagccttttcaatttaggggattaaagaaaaaagtatgttattcagttgtaaaaagatttgtccagtttcaaagaataacaccacaacttttgaaaattcttagtaaataatcttttaatagaaattcataatttaacattattattcaattaattaagacctaaaaatagaaagtaacaagtttactatcattcttaaatttaaattcttctaaactaatacggcgacttacaattttattagagtatctatattatattctggttgttgttttagtttgaagaatattccaactaatttgttatcgtatttgataagtgacttgatggttaataagattatgattttccattaaaaaaattcttctaagctaaaattatttacttcttttgaatttttttaaaaatctgacattaattctttttcagtatattaaatattcccataattaaaatagatgtattttgttcatattaaaaataaatgtaatcaatattgcactcaatgtatgtttttatacaaaggattaagattaactaaacaagagaggtgaaggctagtattgaagctaataaaataataaatccaaaaacaaaacaaaaaaaagttggcatgtttaattttattactattttaattttggctaaatagtaattttttcccc

SEQ ID NO: 189182 - DNA, 3362 bp, Cannabis indica
agttccctttttttttttttaccaagattaaaattgttaattttacgtttacagaaattatatcaagattaaaataaaagttgaggggcagtaccctcctcaccaatatatgtgggtatttcatttggcaggaaaatatttcatataattttgtttattttatttttctttcttctttcttcattttccacctaaattgtctctttaggagttccaaaggagaggcactaaaattatatatatggaatatttttgcctaacaagaagaaaataaatttcactgatatatacgaagggagaaccatataattaattactttgaatactctttcgaaaaggcaaccctgcagatataacaactcttatgaagtacataaattaatgaaacagtaattaaaactggattttaaaaataaataaataaaaaaattaatgcaaaaaaaaaaaaaatacaaatgtgacctttgtctattttgtgttttacaaagcttaattcattgttaattcaatttctctatcactgtcagttacaacaatgatgggtacaggggtacgtatttatatgtatatatatataaatattaatattagaagaaacagtgacaaactttaaagttcatgatattaataggactaagctatagttatatatatttatatcaattgtatatataggacacaaataattcacagtcatgatatcatgatcaggtaagtaagaaaaagaaaatagtgaaggtaggcgctattaataatatatgtactgtttaatctctctctctatatatgtatgtatatgtatatataaaaaatcactgagagtagtactatagtgaatctgtcattctctgataaatcaaaatcaatatagtagtagtagttattaactttacgtgattcctaggattctttgatgagaaaacttttaggaactttctaatattccaattatcagtatgacattaattagtaattgggtttaattcactgctatatttgtgtacatgatagtaaaagcttctgacacacaaaatatttgtttaaccatcttcaatgaccaataaatacagggattcttttttggtagatagtgacccagccatacacaggttaattatctttgaaattaattgttattattttgattaattaagctgaccccttatacatatatatatggtcctctctatacatatacacttgtatatataggattcatcaagctacaagtaataatatataaaaagttttagtatttcttttaattaataaataggttaatgattattaattatatatagagaagagagagagtacgaatataccttattgtatattgggagagcccttctcattaaatgtcaactcttattgttagctaataattataactcaataattaatattagataatatataattaattaaacacatattatttagtatagttagtgattggtgaaggctattactttgatcaagaaaacccatataagtcatgaatcatgatcacatctattccatatagccctacattcattaaattttattatatatatgaatatttattgaaccctaatgatgtttagtactatttagatgtcacggtttatgattagttagcagtattctttaaaaattattgtttttagagaatcactaaaatgcactattggtgcctagcattctcttcggtattataccgctattagtgtaattaagtatcaggtctcatgtaacttaagaaaatagtttctggagaatattgctaaccaatcatagaacaccacctataaaagatgttgaacactattggtgctcataaaattcgatacttaattgcacgaataacaatatgacaccaatataataccgagaatactattaggtactgctgctgccttttaaagaaataataatatgggataagccaattttttatttaatgtttatcacttcaatttacaaaatattgagtttaatatttaaacttgaactctatatatatatatatatacttaaacatgatcttcgtggagagattaaccagatgcatcatgatgcatgagactgtcaaatccaaactttgaaatctattttctaataagcatacaaaactcatcctaagcactccaaatgctaaattctttcagtataagaataagattatatttatacaaagaaacaccaaattaatttattatatatatgtgtagaatttaactaattaagttattgatgcgacaattgagataataacttaagatttatttcttttcttttcttttctcattggaaaaagatctttattaacaaagaaattgatagttaccaatgatcacttatataatttattctaaagccactatcatggtatatataattaaacaaaaacctttatattatggcataaaatgcgcattgtcatggagcaaaatcccctttgtacatggcagtacggacatgtccccttaatggtattattaattttatctaaaactcattagttaatttcacacatatcacatcatgagtatccccaaactttctgccatcttatattgtactctctctctctctctctctctctaccaaaaatgtgtcagattatatattactttttgtaagtgggtacggtccattctatatgtgctcctatctatttcaatatactgttattatgagactattgctccttgctccttgtctcttctttcaagttctctcctttcagttttcttttttatattgttttcatgagaaaatgacttctaaggaagaaaacattgaaaaagctctagattttgatacttaaaacaacacactataataatgtattgtcaaaaatgatgccaaaacaacactattatattttttgcaggtcttgaaagcgtagtagtactatgtaagaaaaaaaaaaaaaaaaaaaaaaccaaacccacatgggcaaaaatcacataaattaattttcagatttgggtctttgaccatgaccaacaatatttataattcatcaaaatgaagaaataatttatacccatatcaacatcgatcgtcacatgtacaaaatacttatcaaaatcatctcaaaatcaaaaccgttatatactaaataaattaatatacaccttaaattcaaatggtttttgcttttggacttttacaaaatagagatcatcaatctgttaaaattctctatttaggaataggaaatcttcattttcctattgggaaatctgtatggcaaagggcaaaagataaatgtgggtcccattcccaccaaaattattattattattattattattgtaatttttttttcagtatggaccacagccctaaatgcagttcgatcagaggat

SEQ ID NO: 189183 - DNA, 3131 bp, Cannabis indica
tactaaatcacctaaaactaaatggtgtcatgcagaagaacccaaactctttacactctccattaattagaaggattagaagctaaaactaatgtggccacaaagaatcaaaagcaagaaattaaacagcctagataggatattttaaaaacataagcaaagatacacatacccaagtgctaaagctcctgaccactgaagcaagaaaccaagaaaagcagacatgagaattgcacttgtgttgataaggttccaatcaaaggagagtacaccaggtggatctaaccaaggtatcaatgtaaccagaaaaaacaaggtgattggtgttgtcttccacataagcctgtccaacaagggatcttagttagaaagagcacagcaatattagcacaaggaaatcaatcagacctttctttagctaaaagtagaagttaatatatgcaacacaacacatacgctaaagctgtccaattctcctgctgctgtagacttgaccataggatcttatttacagcactcggtattatccatgctaatgcaatacaagcaccaaaaagatggaattgtagatctgttactgttgcaatagcaacaccaatagatactactgcaagtgctagaacctgaaagttttaacaagaacaactttaaaaaatgaaaagaaaaaaaaaacgaacatttttactatttgtggcactctaaaaccactcattaaaacataaactaaataagagaacaattaatagcaactaaaaaatctcaatatttttacacagatagatcctaaaagaagtaatgtggatcactttgatgggcacacatatcatataggatatctttaatgcgtttaaatgttctagaaaataacagaactacaatttcaaaatgattgaatccatattggaggtacaaaaacctaatacacagataacgccattatgcagtttccaagtgtgagacatattaaacagatacatatttataaaataatattactatagtattttatagctcgtgcgacagatattaaaaatatataagttcctctggtttcagactgtcagacaagcaagaatgtaatgtttttaaagacatatttctccaagccaccatataggtaaagcaggatatgagttaatgccatatttcaatattatcactcagcagatgaaatactccaggtaaccagaaattcagtgagcatattgacagaaaacaaaaaaaaagagaaagagaggagcaccttaaagagagaaactttcttcttatagagtacaaactcagccagaactatggatggtgtaactgctatcttggacatttgatagaaacccacactgattcacaaattcactaaacttcgtgagtcaagactgaagagaatactttagttcacttatgtaaagtatatagtaatacaatagctgacctattgtacttcaagctgacatttgcaaggccagtagatagggacataacaaatccaagagcgaataaagtagacgaacgggttgattttgcgggagatgcagggaggatagagaatgcgtttagaatggccatcaatagccagcttacaatataatgaatgaaactaaggagtatgggaaaatgaaatccaacatttttaagcacctgacaaaaagaaaaagaaagctgagcaaattactaaatgcctacttccaaatttttagtatagaaagacaataggttctggtataaaaacaaaccaatttattcacaaaaataatgccaacagcaaccacaaaattgaaggtaagagcaatcgcagggccacataatcgttgttgctggcgtttcgcaccgtctgatgagcgaagttcattgaagattgaggctcttaaatcttctagtgctctacctaatgtaattgatgaccaatgagaaaaactgaaacatattagagagaaacaagtttcccatacaacttttcattgtcttcaaagctatatatatggtaaagcataaagttggtcagtgacaaaatctcaaaatagaaagaaatataaaaacacatttttattttcagaataaataagtaatagattgaaactctcaaattaattagcaaatgaaacgttcgaagcaacacttgtttattaattacaatataacatccctaaaacatcatatcagcagagatagttatttacaaatcagggtactttaatatcatcaaccaaagatcccaatgcagtaacatatatcaaggagaatgtagtaacgtttttagagcttaagaaaaactatgaacatcactaagcagcaaattgactgcaaaactcactcatgcaaagttatgaacttctggtattttaaacaaaatatgaaatcaaacagcacaattaatacacacttttaattaattaattaattagtccagcttaattaagaaacaaaaacaaacttaaatcaaccataaacaagtaaagcatgcaagggaactggtattaccaaaataaaagaaaaaagattttgaaaaaacaattacgaaaccatcttccaatcacaatcacaaaaaacgcatccttgtgagccagatcaaccaaaaaaaaaagactttgctccacaaagtgcattgtgaattaagcttgtgcagattcagacccaaaaacccaaatgagaaagatgtgatgagaagcaaacaaatttaaaaaaaggtgtgaaattaaagcagaagaacgaagttaattaatctacactacttagtatttacctctttcaccagcatcactgtctttccgcttaagaatctttctgatatcttttcttataaagaaatttaacattttacggctacacagcattccccctcacacacactctctttctgggtattcttttgttttcttctaaaaccctaaatgacaaaatgaaagacaggagagagatgagacgggcaatgtcgaaatgagacagactgaggcagatgaatgaagtagtagtaccagttggagtccaaattctcccagatatcttttttcttatttttttttttttttatgtttagttaaaccatacacagtgtgaatatagtagaaaaataaaagaatattactaaagtaaaacaaaaagtggaaagataaaaaccatttttggaggtgggaaag

SEQ ID NO: 189184 - DNA, 4581 bp, Cannabis indica
tctctctcatatggtatcagaagtcaccttgcccacaaattccatggaaagaccttccacatgctttgaagatggtgttcctccatccacagctgagcctcattccttagaaatcaatctcgatgtcgttttcgcccaaaatcctctatccttggctactccacgataaaatacgactttcaggcctcaatctcagagttttttctacaaatctagatcatcaatctccagaagatgacaacaccactacagctccatcaagacgatctcatacttctctcgatcaccttgtcaatgacgatgtgttcagtccttttttcctcagtgatggcgatcaccgtggccttgttcttgtgtcaactatcctcaatggtacaaactatcagtcatggaaacacgacattaccatggctttggctgcaaagaacaagactgcattcaagatggatgtctcccttgtctagatgctagtaatccttttcttacttcttggtttcactgtaataacatagttatgatgtcaattctgtttcatccgagatagcacaaagcatcatatactttgatcttgctactgatatgtgacatgatctagccgaaagattcaatgagggaaatagtccttgcatttttccattacaaacacaactcactcgattacaatagagtgatcattctgtcacttcctatttcataaagctaaaatcaatcttggatgagttgaaagaattttaaccaaatacaacctgcacatgtggtgcaatgaaaatatttcttgattactataactaaaattaagttcttcagttcttcactggtttaaatcagttgtatgcataagttcaagcttagaccttgctcaatgaaccaattctaaatttatcctgaggttttttatgattgtgcaagaagaacgtcaaagaactcttggatcctcagagacaccttctatggttgcttctgtacatctctcgtctaccaatcccccacgtgcaaagaaacctcaccattcttgctctaactgtggcaaaccaggtcttttagttaacaaattcttctttatccatgggtttccccatggctatgaagacaagagaaacaagagaaaagaaaagctaaggcatatcaagttttaactagcacatccacaaatgatgcatttggaaacttagccagcactgatctgtctacacagtgccaatatcttatctatattctcagccaacaacttaatcaaacaactcctagagttgaccctaccatgacccctactgcatcaaacatggcttgtaatgactctccactcttctttcattacttagataatagatagtggtactacacaccacatgtgttctaataagtcatgttttacattcttttctaacaattactttccaaaacatgtcgttctaccaagtggcaacaaaattcctgtacataacattggtactattcatattaattcttctctaacactttatattgtattatatgtcaccaatttcaggataaatttgctatccatcactgaatatgttgacaaaacatctaacttgattttctttaaccatgactcatgtgttattcaggatcattcttagaatgtagtgattaagacagctaaaaggcatgacaaactatacctgctacatcaggaacatattcccattgctattgctagtcaatcttcatttcattttgttaacaataatgtagtagaccaatgacacaatcgccttagccatctctcaatttatatttccaatactttcaataaaaagattgactcttctttttcaatttaattggacatgcagaaactagcctttccctctcaaatgttcattttttttttgtagatgcagattggggaagctaccgggacataagaagatccatttcaggctattttatcttccttggaaactcccttgcctcatggaaattaaaaaaaaaaaaaaaagaaacttgtctctcgatcctctattgaagctaaatatcgtgctatagcaaacacaaactctaaactcacttgggtccttgctcttctcaaagatattagcatctctcacaacacacctcctatgttatattgtgacaacaccgcagctatacacatcagtgaaaatcctgtataccacgaacacacaaaatatgtagaaattaatttccatttcattcgggagaaagttcaacaagactcactcaagcttctacatgttccctcacaacataacttagcagatatttttactaagcactacttcctactcctttctccaatattgtttgtaattaacatatacactccatcttgatcggactattaggattagctttagttaattattcaccttggataaattagttgagttaggttgttagatggttaggtagtatctctaactaactcatctctctttcttctttctgcctatctaaaaggcttttgtacgaagcacaattcagttgaatgaaatcaatataattcttgcttatctctctcttttcctcatatggtggagcaaaagagccagcaatttgcttgtctaattgcttctcagttttgtagaccataaaaattcagaaattacataaagattttgcgtatacgtcactcttgaattatgggaaaagcataacgttattttcctagaaaattaaaggtaaatgacagctgcattctgtttaaacaaaactacaggagaaaggccttggcctcactcagttgaaaacctcataaaatttctcaatgacaagtagacctgaatcaattgactccaagggatccttccgaagacgatgtcttaagcagttagggatgacagtagcaatatcctctgttgatactttatctcttcccttcaaagcagccaaagcttttgcagccctgtttgttacaatgtcccctctcaatccatcaacattcagctctgaacaaacctttgaaattttcactttgagttcatggtcgatctgaacagaagatagagtacttctagctgcagtaatttgctgttgcagtttttcttgctcggcgtcatatgattcgcggaattcgttgggatttttatcaaaccgagatctctcctcaacaatcttcactctaagctctgcatcccttacggtacccacttgtgcatgcattccaaaacggtccaaaagttgtggcctgagctccccttcttctggatttcccgagccaatcaaaataaaccgagcaggatgtgaaattgaaataccttctctctccacagtgttccaaccagaagcagcagaatccaataaaacatcaaccaagtgatcatccaaaagattaacttcatctacatatagaattcctctgttggcctttgcaagaaggccaggctcaaaggctttgacaccctcagtcagagctttctcaatgtcaattgtcccgcataccctatcttccgtagcacccaaaggtaaatcaaccatgttgattttagtcaagacaacagaaagctggtcccctttcaagacactctctctgacttccacgcccatagactctggatcttctggatctgagttgtaagggtcaccagaaacaaccttaatttcgggaagtaaatcaaccaaagaccttacagtggtggattttccagttcctctatcacccataatcatgacacccccaatcttgggatcaatcacatttaggagaagacaaagtttcatctcatcttgtcctactatggctgcaaacgggtaaaccggcctctgactattcttagctttaagcttcccgtcctgaaaaatgatcaactccaccactttatttgcatgtaatttatttttcaaataacgtttttctcccttgtagtaaactccaatttgaaacaaattatctactgaaatacttataagcaatgctttaaacgacatttaacaaagtacaacagaagaagaccttttaacaaacatctacaaagcagaaccaatttgacctgtaccaagtactttagcgaaccatagttcataattctaagagataagctgcaaacctgttccacagagttgatttcagtagcaacattggtaactgccacgtggaactgagacctccccttttttacctgaatgccggttcctaccatacaaccgattcacattgccctgccctgtaaaagccacaaatttcaaagagaaaaaaccacaattaaaaaaaaagctcaaaataatgaactgggtcaatgaatatcatccaaaaaatgaaaattagacgaaacccagaaaataaatgaactaaagaatgaggtccatagccatagattgattcgttgagtagtgtacctgggttgaaagaaaaagagggactggaagtcttcgaggagggagaagacaggaagcgagaagccaagattgctgacgatgaagttccaagcacggatgccatttttcaaaagctttgcaagagtggaatgggatggctattgagactcggtatctggagcttcaacagcttatcggcattgattctattggctctcgaagctgcgatcctaaggataagaagatagattataggaacacgttgctaaacgctttgtc

SEQ ID NO: 189185 - DNA, 5421 bp, Cannabis indica
tggaatcaatttgtacaaaaaaaaaatggtctaaattttgatataggatattttattaggggcgaaatttccttatcataattaattattaagtaaaaataactcttgctaaaaatatgacatttgtcatcacactaaagagagagagtgcaaaagagagtgggataaaaagttcccttagcacttctcatacattaattataagtttactccatttgaatagccagatggcatacacggaacaaatttcgcttgtgttataagcgtgactaaatcgttaccctatatataaatatataatacatattaaatttttttatgtaatgttctttttttattttaaaatagaataattatttttttaatatagtagaataacattctaatattttaaaatacaactaaataaaagaatattaacaccaaccaaacgcaatcttcgtggaataacacttactactgatatacttggataaactgtagcaaaataatacaataattaaatttagtatgacttacaatatatgcatcagtaacacagttcatctgggcaaaaaaccgtaactgcaaattgcaatctcaaaagcttgcattctttcaccacgagccaagccattgcaatcataaactgaaatttcatgtatgttgagatcactacaagtcttgatcagctcctcaccaacgcgtttagcagcatcctaaacacatcaaggcagaactattataagcaagacaatggagtttattctgtctgtttttgtacaacaattgataatgaatgagtgacattactccccaagcgggtaaataaaacttacaatggtgctaaaatggggattctgacgtattgatttctgcagggtgctaccataaaacagacacttcttattttgatcatctaccagcatagcatacaactgcttgtctgaacaaaatacagaaagtctcggttttgtagaagtgccattaaactggagaaatgttacagaaatgtagttttagtagattaacaaacaattataggtgatgatattctgaaattatttttttgtaattggaaggtgtaaacgaaaatgttacacaaaagagccaagagaaacacataggataccaaaaatatgataatcacaaagatgaagagtcaaaagtagggaaaatttctgatattttattttattgtgaatgatagaatatatatacgtataaaaagttgccctaaaacgatacaataatcatatactttaatatcaaatcaccctatttaataactttcctagaataaataaaaatatcaaataaaatcaactattttacagctttacacaatcattctaaaattagaaaacttcctaaaatagtttgattttcttcaacactaaccctccatctgtgaagatgtcttccctaactagcttgctactcagaaaatcaaattgttttgaataatccctttgtaaaaatgcctgatacttgctcttcagttggacaataagtcatgcaaatcaagccttcctctatcttttctttgaagaaatgtttgtccacttctacatgctttgtattacaatcaagatagcagccttattatcacagtatagtttcataggggatgcttgagatatctccaactcttcaagtaaccttcttatccataatatctcacacatacaatgagcaacagctctaaactcagcctcagcactacttctggcaaccacattctgttttttactctgccatgtgactaagttacctccaacgaatgaacaataacatgatgtagatcttctatcaactatattttccactcaatctacatctgtatagacttcaatttgtaaatggtctcttgacttttttaggcgttccttttagataccctaagattttgtagatagtttcgaagtgtttaggtccaggtgcatgcatgaattgactcaccatactctctgagaatactatatctagtcgtgtgtgtgataaataaattagtcttcctactaaacgttgataacgttcccgacccttcacattctcagctagtgcgggttgcaacttgacatttggttcactgggtgtttcaacaggtttgcaatctagcataccaatctctttaagcagatcaagaacatacttacgttgattaacaaagatttcttctttggacctaacaaattccattccaagaaactattttaaagtacccaagtctttgatctcaaactcttgaacaagtctttttttcaactcatcaagttcaccatgatcatctccagttaaaacaacattatctacatacactattaagataactatctttcctttctttgaatgtttatacagcatggtgtgatctgcttgactttcaatatatccatggggcctcgacactctaccaaagcgctcaaaccaggctctgcaagattgcttaagcccatacaaggattttttaagtttgcaaactttctcaaaaccaacacctttttcaaaaccaagtggaggactcataaacacttcttcttctagatccccattaagaaaagcatttttaacatttaattggtataaaggccaactagaattaacagcaagagaaggtaagaaccgaatggaatttattttcgcaacaaaagcaaaagtttcatgttaatcaattccataggtttgagtaaacccttttgcgacaagcccagctttatatctttcaacaattacatcaactttggtttttattgtaaaaacccatttgcacccaacaatctttatccccttcgatacttttacaatctcccaagtatcattttttctcaaggcattcatttcctccataactgccaaattccaattcggatcctctaatgcttcttgtatatttttaggcacaaaaagttatgtaatatccgcagtaaatgctctatggttttttgacaaatgattgtaagaaatatatttagcaataggatatttagtgcaagtacaggttccttttctcaaggcaataggaagatctaaattggtatttctggaattactcctacactagattcagtttcaataagaggagttgtttaccaagatttttgaaaactgattaactaaaacttaaggaaaatataaaaaagtaaatgatagacaaatggatttttacgtggttcgggagttaactatctctagtacacgagtccgttgtattagccttgtaagtgagtgtttaagtattacaagtgtctactatggtaactctgtattcctcttgtttctctcaaagaagaaagctctctaagaattttagagattctgtaagtaaagattgttcaccctctctacgtaaaaaataagggtatttataggcacacatgactttttacccacctagggtttcgtactctacaccctgcaagggttggtactacaacaggataatctgactattggttggtaagaagcttccccattgtgtggcgtacagctgtagagaaggatttcatgcgaacgcgacacgtgtcgcgtaaaggtttttcctttgcaaaataccctctaaacaggtcattgggcaaaaggcatgcccagaggtgcatacgcgcactaccatggcctagcatgagggacaagatctgatcttgtgtcagattaaggtgtcaccgcctatagatcaatttccatatgaaactgacatggtcatttgccttgaggctgctatcacgacccaaaatcaatccgtggtggtctccacccggaggctacttacttcaattgtgctccaggtcttctcggaactgggatcaactgggtcccgaagatgctacttgtgtttcagatagctcttcccatcagatatctattacacttctcccggattaccaagatatctctgcgggggaccttgtgagttacctcgactaatcccgctaactaacacatcttttcctctaatcatgcaacgtgtttctcgctcgaaaatacagataacaggagtagaagtaggagaagagttacttgaaatatttggaagaccatcgcttagggcttctgtttgaccatgcaacgggatgattacctagtctttatttctttcaggtacatttctcctagaataaacaaaaggctcaatattttcacgattttcaataaatcctagaatttctttttctaataaaataattttcgattcacatttagtaggctgagctctctctagtatgatattagggagaggagcaatttcctaaatttgattccactaaagtccccctaaataaaacttttggtaaaaaagggggtttgttccaaaaaaagtaacattcacactcatatgaaatcgtttgataacaggattaaagcacttgtaacctttttgattaggtaaacatccaatgaaaatacatttttcagcttttgattctaatttggacctactagacctttctggagtgtgaacataagcagtacaaccaaatattttcaaaagaaatatctgaattaattctacaccctaagaataattttttcaagcaatcaagagtagtatattgtaagactctagtaggcatcctattaattatataggaagcagtaagaacagcatctccccatattttggaatattcatgtaaaacatcatagctctagccacttcaaataagtgtatttatttcgttcatctaagctattttgttcaagtgtatcaggacaagaagattgctgaataattcctttttcctttaaaaatctgcctaatgctttattaaaatattatgttcccttgtcagatgtaaaaatctttaaaaaagttgagccacatcagatttttctttcattaaaaagattcaacaaagacgagtatcaaaccatttcttacctgaaacactggtgaccttggagggtccccaaacatcgttagtggaaaaggtaaaaaaggttgagaaggacaataagatttttttaacataagtgttttttatggctctcggacaaaaacacaactttacacatgaaaaaaaaaaagggttaaattttttaaataaaccagggaacaaatgtttcaaataggaaaaactagaatggaccaaccgatgatgccatatcattatttgatcaaaaatagaaaaataacagatactaagtccttaagcaattttattaacagaaagagtatcctcaaagtagtagagaccattaatcatcctaacactgctaatcgtctttcctaagcgttggtcctgaaaaatacaatgaaattcatagaaaacaacacaacaattagaatctttaaatagctaactaacaaataaaagattacaatgaagttgtggaacatggagaacagatttaagaattattccctcaacaaggccttttcccacaataggtgcgagagttccattggctatccatcctaacttttttattacctggacatgg

SEQ ID NO: 189186 - DNA, 2916 bp, Cannabis indica
ctttagcttcgaaagtgtgaatttagttaactcttctactgatttaggatcttttggtgtttctcgaagtggttcgaagcttgctcaagcgttatcgaaaacgagatttaaagggctttcgggtgagtttaaattggttaatgggcagttacaaactccgacttttgagattattaatgtgaatggaaatggagaaagaaagattggattttggacagttgagaatggattggagagagttttgggtaataagaagaagagcaaatactctgctttgaataccagtttggggcctataatatggccgggtgattctacctcagctcctaaaggatggcaaattccagtgaatgggaagaaattgagaattggggttccggtgaaagagggatacaaggagtttgtgaatgtgtcttttcctttctcaaacgataccgtttcagggtatagtatagatgtattcaaggctgttatggaggctttgtcgtaccctgtttcctttgagtttgttccttttgctgatgcttctggcaattacaatcaccttctttatcaagtgtttgatggggtattctttttctttcacactaaattgcatgaaatcattttacttgagaaacataatagagacttgtgttgtgtttttttttttttggtcagaaactggatgctgcagttggggacataaccattagagcaaataggtccttgtatgtggatttcacattgccttacactgagtctggtgtgtacatgatagtaccaatcaaggatgatagaagttataatgcttgggcattcttgaagcctttaacttgggatctttgggtgacaagtggttgtttcttcatttttatgggtttgtagtatgggttcttgaacacagagtaaatgaagaatttcgtggacctccacaccatcaaattggaacaagcttttggtactcattttcaaccatgatttttgctcatagtaagttttttgtcaatgttttgaacaaactgagaaaacagcacatttctttgagaaattattacataacaacttaacatgttgtgttttaataaatttacagaggaaaaagttgtgagtaacttgggaaggtttgtagtgatcatatggtgttttgtagtgctcatactcacccaaagttacacagctagtttgacctcacttttaacagtccaaaagctccaaccaaccattaatgatgttaaccaactcttgaagaacaaggagaaagttgcttttcaaaagggttcttttatagaaggaatattgaaacaaatggggtttgaagatcaccaatttatgatctataacactccagaagacttataccaactctttgaaaatgggagtaaaaaaaatgggattgctgctgcttttgatgaaacaccttatataaaagtttttctggcaaaatattgctccaagtttaccatggttgaaccgacattcaaagccgacggctttgcttttgtaagcttactctcttcatatcacttgaactttgttaaaagttctaatataactaatattctcaacatgtttatcctaggcttttccgaaaggctctcctcttgttcctgatatttcaagggcaatattgaaagtgactgagggaaagaaaatgaaggatttggaagaagcatggttcaagaaagacaccaattgtatgttttcatccaatagtcttggtctcgaaagcttttggggactcttccttatggcgggtgtggcttcatccttggctctagtcatatatgcggctatgttcatctacgagcaaagacatctactgatgaactctgacacagagccatctatttggaggagaattgtcgctatttttaaaacattcaacgaaagggatctcagctcgcacacttttaaatagaatgaagtgggtgcaaggattgtcttctcaaaaccgaaatggtacacagccaactgatcaagaaactgttgttatctcagctgtagagcttacttgcccaaaacaagactcaagagagaatcacaactcttagattatgctagtaatgatggaactctgcctcaacttataatggtatgagtgtatataattgatcatgctacatatttatgttggaaatagttgctgtagaaaataaaaaggaacaccaaattaaaagtttagatgtgctaccgtcaatctttaatgttgtccccgaaaataatttttttatgacggttttcgttatagttatagaataatctaaaatatgttcatgctctaattaatgagcattattaagtagaattgtatcaaatcaagagtaacattacacaagttaatatctcatatatgacaggtgcttgatcttcacttactaattagtgacaatttgttacaatgtaagatttaacatagtatcagttttggtcaagtgggcttattcaatctcaaactttcttttcttttctccttttttttcttaagcttatgagaggtgattctcatgtgatcaccaatatatatcataacctttcattaggtcaaaatgtatcaaaacaagaattacattacactgttaagataaactcaacactaactaatagccattagagataagcataaaaccctacccgataaaaggctatgatatagttaaacttttaagtttcatcactacaatagcttaaatcttttagttttttatgaaagtgggctagggtttttttttttttttttttttttgattgaagcgttaatatatcttacatggcacaatctgatattcgaggaaccccacacacaccctcccaaaccccttatgctacttgagctaaccacaagtagttaacaggtaaagtatgttatgtggtataaccacaatgtacattgtcctatttgagatctcctcctataaattcctaaccttttttttg

SEQ ID NO: 189187 - DNA, 1322 bp, Cannabis indica
taggtgataatggtataaaatttgcatcgtgtcatattaatttaaaattcgatcaatttttaccaaatgacatatatatattagcaataaatcatcaatttacgtctccaaatgctgtgacatacttttggaaaaactttattatattaaaacaaacataaattgattaataactgtgtttcttaattttatattattatttgttaacatttctggtctgttttcaaatatttttcttctcacatattatatgtatgtatatttatttatatacataaataaatatatttaattagtcaaaatgatgaaatgtcaaccaagtaaaatatattaagaaattaataattactacttgaccactcaattcaaatctatatataaagtttaaatctttcctaaaatagttaagaattaccctaaactttaagaagaccaaaatacttaaactattttttaacaagaaaaaaattgctcagaatttataaaattgactagactttttcaaaaataaaaatcaaatctcaaattaaaatcaaaatttttaagcattattatatttctaatattttggaataataaaaaactgataaattgttttataaaatataaatttaaatgaatccaaaaaccaaaaaatatatattttttaatagagtaatttgcggtataaatacctaagtttaactctcagttgcaaataaatatttaagtttaatttttggcagtaatcatacctaagttatatttctagatttgtataggtagctaaccgttaaatgttaagccattatatccacgtgtcatttttttaattggtatatttaaactatcttttttaaataataaaaatttaatgactttgaccaatcaggaattgcaacatggcaatttatttaaccaagtacctacagaagtttcaaaattataacttattacctccaaaaattagaattaggtatttatttgcaagagttaaacttagttatttatgctgcaaattattctttttttttaatatttatatttgatatgaaaatatttgataacattatttttgtctttcttaaaaattccaagattaaacttggtaaagaacttaaaccaacaaggccaaaattataatgccctatacattactacgtttcttgaatagatgtatcatagtgtgatgaatttcatttttctaacagtgaaatcaaatcttgtgtattaattttcaggatgtatttgtagctggaacaaacacatcatcaattactttggaatgggctctagctgagcttataaatcacccaaatataatgaagaaagcaatggatgaa

SEQ ID NO: 189188 - DNA, 1460 bp, Cannabis indica
atcttcttcttcttcttttttagggttcttgtttctgtctccttcggctcccccttattttcaaagccctctctcgcttcaaaacaaaaatttcagccaaaaattacgaacggggaaactgcccaaattgcatacgaaggaagtgtcgcgacaataccaagcctcaccgcggtgactggagctcaacgaaaattgttttgattttgtaaattttcgtcgtggcaaccatgaaccttgtcgcggctttaggcatatttttctactttgacatctctaagtaaaatgttcataacttttacatacaaccttcaaatgagttgatttaggatgcgttgaaaagatgaaaatgagatctaaaacttctatgttttgattttttccaaaatctgattagaatatagtcaaattcaggcttgaaatgtcagctttattttctcacaaaaatcttctctattttatagatcaccgtatttatgatatttgacaaatttatacattccaagtgtcaaaaacttgaaaccaaagaaaaaaagcgtaaatctaatccaaaaatttacaataaacaagaaaatagttgcaaaaaattatccgaacaatagtctaaaattaatctaacaaattcccccaaattaaatttgtactcgccctcgagtaagactaagactaaaacacaagctagaactaacaaagaaacatttaagcctccacttaacaaactgttgctaccacctatagaacttcaatcaatttatcaaccaaaatttcgacctaaatactctgaaaaattaacttagatatctctattggaaaatagtgtatagatgcaaattaaagttcattattttgataaactcattcaaaatctactccttccaactttgtacaaaccaatattcacttacctctctctactaatatcaacaatacttgtttagaatcaaaaggactttcaaggttgtaatgtaatggcttaagtaataggtagatgagaaagtaattttaggctatattaaaccaaaagcacactataaacccatcaaccactcaaaaaaatgcaatatcctaaaattttgcccattttcagatgattgagaaggttactagcaatgtgtccaacatcacttttattcaccataattattacctttttgttcttttcttttgttttgaagagaagtaggaaatggattcattgtaggcttcaataagtggctataaatttttaaacatgcttaagcttaaataggtaaactatgtacaataaagataaaggtaggcttgaaaatgctcaaacagtccaaagaaaattgcttacattatattccacacaaagcattgtcaacgatttccccttaagaaaataattaatgcaagttgtattgaaaatttgacaacgatacaaaattttcaaaaggcatccaaattaatcgaaagagcatacgagtcaagctcacagttta

SEQ ID NO: 189189 - DNA, 987 bp, Cannabis indica
agtggcaagttggttttggattcacttgtaaggacagtctaacctggaggaaatcgagcctccatcttctttcatgtattcataaatcttacttggtaagtcttttaatatattcattgtatcattatagccattctgttttctgtttgtacagtgaaagtctgctgcacatattgtcattggaattgataatttgagtttcttagcatttgtgcagtttagctgcacggcaactcaaatgaattgacgtttatcactgcaactcacaagatcatattgtgacgttcaggtcacccatcattgccaaataatcttatttcaggcactcatttttcactctggtgtgttgctcatcaggtcacccataattgccaaatattcttttctcaggcactcatttttttactctggtgtgttgctccaggtcacctatctggtcccttacatcagtttagaaagtcatatttgcatcgcaagcttcctttttgtttgtaggtagcatctgcatcatactatgattcacattcacttgtgtcatttttttattttttctgccataccaagtgttggtttcttctgtaacagttccactgcactgtaatgattgttcagcttaaattttgttcttccaaagatgctctgggactgaagtgagatttctcgagtaacaaagtgcagtggaactcatgatttggagtgttgtttttattaataacgattaacttcttaaggacatgttataatttacaccgttcattttggcatttcacaaagctactgttcattttaaacataggaccacttaccgaagtcttctttctatttatgtaagtatgttgacagattgatgagtgtttttgtcggacaaaaatgggtgggaatcaataacttgttcccactcttgggaccttttttaatacaatgcctttttaacaggaccatgctaagataagaaggcttgaaccatggtatttccaagattcgacc

SEQ ID NO: 189190 - DNA, 3088 bp, Cannabis indica
tctcgtggaaatcagtcccttgaagagagcttctctgcacaagaacaggtatctcatcctagtccctatacatctcatcaaagtccctcattgattccaaatatagagcaggttaatgaagaagagcatggctcgagtatcagatcacaagaatcggatactgttgatgagcaagccgcacctttggcaccttcacatcccatgataacgagatcaaaggctgggatttttaaacccaagacttatgtgggacaaaccaagtctgactatgatgatgatgagccaaattctgtcgaggaggctctagcacatgttggctggaatgaggcaatgaataatgagataacaaccttaaagaaaaacggtacttggatccttgtaccaagaagacatggcatgaatatagtgggaaataagtgggtacacaagatcaaaagaaacgctgatggctccatagagagattgaaggcacggttggtagcaaaaggattcactcaaagaccgggaatcgactttggtgaaacttttagtccggtgattaaaccatcaacagtccgaatcatcctcacaatagttgtctccaagagctgggagataagacaactcgacattaacaacgctttccttaatggaaagcttgaagaggatgttttcatgacacagccccaagggtttgttgacaaggacaaaccagattttgtgtgtaaactcactaaatctctatacggtcttcggcaggtacccaggacctggtatgatcagcttaaaaatactctaaccagctggaaattttagaattctaaggctgattcttctctgttcttctacaagacaccagatctgattattatggtgctgatatacgtggacgatataattataacgggcaacaactcgaagaaactgcagcaattcatctccaaactaaatgatatgttcgctctcaaagacctcggctcactccgctacttcctaggaatctaaatccacagagatgaaatagggttgtacttgaagagtcaaaatacataaaagaactcctcattcgaacgaagatgcaacacttgaagccatgctccacactaatgacagttggtaaggcactgtcgaaaacagatggagagttcctggaaaatcctacagcctacagaagtgtcattggtggactacaatatcttgcccacactagaccagatttatccttcgcagtaaacaagttaagtcagtacttgcaagcccccacaactgcttattggagtgctgccaagagggtattgagatatttgaagggcaccatacatcatgggttgcatatcaaatactcggaacaattgaacttgactggttattccgatgccgattgggcatgttgcccagatgacaagaaaagtgtggctggctactgtgtatacttgggggatactctaatttcatggtcttccaaaaagcagtcggtggtgtctcgttccagcactcaatcagagtatagagccttagcacatgtggctgcagagatctcatggattcaagctttgctgaaagagtttaatttcccacttcagagaactctcataagctagtgtgataatatgggagcaagtgcacttgctgcaaatccagtctatcatgctagagccaagcatatagaattggatgttcattttgtgagagataaggtcttgaagaaggaacttgaagttcggtatgtgccatcacacgatcaaatagctgattgtctaaccaagagccttactcatcatcgatttcattttctaagtgacaaacttggagtggttgaaacccctctcagtttgagaaggggtgttaagaaaatgaattaatcctaatcacctactgctgtgctgtcaatattttctgtcatagccgttagccatgtggtcctaagaattgggaattgtcagaggttgttagaatattccttttactgatttcattgtaatccttctctgtacagctgtaccaaatctagaatattctgtaccaatcatttatgtataaatacaattcatgctagcctctattcgatgagctgagctttacaaattcactgctatttaattttcttactttcattggtttattgtttccaagaacattttaaccaccattgctatgaagtttatgggtattaggttttccatgagccttttattcataagcttctatataggttttgcctagaaatctcattttgtactattatccatacactcttgagaatataactctagtctgctgcgatcaattaataaaaataaagtagatgtagccctattaccatcgtgatataggggtgaactactataaatacttggcgtccttttctattttttgcggtttatttagccaaattaattcagcacagtacttctcttactttttacgatcttcttagatcagatgacaaaaaactgcatcaatagatggtaactttttgtttgattggagtattcttaaagcaattcagttctgctaataattctcaagcaggtgataattttggtgagcaaccagctataagatggactaaactgctccttgaggtggtgaaaagcaatggtttggtcctggtttttggtacttggacttggaatggttgtttctctcgtgatgttgctaaatctttgggtatttattttgggatattttgtttgctgcgttgactatcacaaccagggtggtactggagtctgattgttactgttgttaatatcattcttaataataagattgattagccttacttaggttgtataattagagatattcttgcatattgtaataattttattgatattactttcgtgtattgtcctagttagtgactcacattttagcaaagttagctcagtcattatcttattattatgtttggtgacgagatcaccctaattgtatcactgatgctttgctgtctaacttttatattaatgatattgtttgatatttttttcttcatcaggtctatcatcctactcaatttacttttgagattttagtgaggccattttttctcaaaaaagaaaatgtgtcagacattgttaatgttgtttgcccttccagccat

SEQ ID NO: 189191 - DNA, 915 bp, Cannabis indica
catggtatttccaagattcgacccgaactggaatattctatatatatattgtattcaattcctatagcaataggtatctcttacttctctatccattttcattgtattccattccaatatatatattaatattttactctctctttccctaaaaagtcaagtaggttagtattatgtagagaagagaattatgcaatgtttgacacgtggatgctaattttcaaagactcgtctccaaaatgaaaacctttaattaatatccatcaaatcgctggcaatggaagcaggccccaccaaaaaggaaaaaggaaaaaaatggtagcatatcatttacttgcatttgcatcataaattcacatcttttacttttcacaagtacaaaaagatcatctcatcaacaataacaactcctcgacaagaccgagaaaaacaatataagaaaggaaaagaaaacgtcgtgttatgctatgcattgcatatatggtcggtccccatctatatgattggagagctagacacgtgttagaaaatcagaggcttggttgcttgctggtgtcagactttttggagctaaatttaaattcatgagagaaaataatcgaaataggaaataagatacaatttaaaaatttgtcagtttcagtcaagtgcatgaatgaatatgatgtatcttctattctttgtttctttgtatctgtttttttcattgtctaatgtctagactataagagaaagtggttgttaattgttgttgtacatctcccccaggaaccctctcatcttctgccacctcaccattacatcaccagccaatttttacagccattacgtggcaccattttacagtttagtcttctcctttgaactttttttttttttttttaatgagaagtggggaaatgaaatcagaacttt

SEQ ID NO: 189192 - DNA, 1353 bp, Cannabis indica
tttcttggctttttctagtttttattaattattggctctaaactaataagctggattgtttttcttacctttgtggtgcagagaataagaggaggcatttgcagtatggaaatggccacagtgggctcaatcactcacagatgcaagctaacaatgggttcaataacacacagatgcaagctcacaatgggttcaatcacacccagaggcaacctcaaactcatagcttcacctttcagagctcctctgtcacttatggcggagccaatggagcttattatactaaatctaaggcaatgaggaccggaagtgatggggtaagtatttctgaattgttactatcaatacttttatttgttgctgtctcttatttattgaattcaatgtgtgaacagttgactattgaagaaagcaaagaagccgatactgtcagtagacaagcaagccacaaaatatctagggccctccatgataaggtataatccttataaaatagtttttttttttgaattgatggtgctgctgccattcttgctctatgattccttaacttacattctttcacatttatagggtcattctgttgctagaaagcttaattcagatggtaaggtggatacaatgcaaaccttgcacaatcttaatgaaggtactaattgttgatacatatgtcctttttctataagggtcatagctatgtttcaacatgaatggtgactaactaaaactttgtttcttctgaaattatagatgagctttctggttttgaagaagcttggagtggaaaggctaagaaacatctacctggctggactggtaattttggcgcttatggaattgaaaacacaggttagttagtactttctcttatgttttgtctgcaacaaaccgagatgttatctgaaaatgtgtttcatttgagaaagatgatgaactctaacccatctctttgctattcaggagctaccagcagcggtcaagatggtcgcagaggttgggcgcttccatcttcagaaccatcacagcattcaagtagagtaatgccagattcgagagaccgggttgggtcatctcgccaacagcagcatcatggtacaatgaatgcagcagatgatgttaaaaataggagatcagggagggcaagagattaaactatagttagaaaaggaggcggctttggggtctctcccatattcgttttgctatgcttcttataagtgaatattgtaagcatcatatatatggttatttgagattgagttcatacttactcagacgttataatacataatattacaaaatagtatagaggtggaagaacaactatagcctagccatcttttttgcagcaaa

SEQ ID NO: 189193 - DNA, 3496 bp, Cannabis indica
ttttttttaaaaaaatttcaaattgatgcagcaaacagcttctggatcaggacgaggtggatgtggttcacccattggacaaggagaaaggcatcactgtcgaagacttgaggctcatcaaaatggagatggccaattgtatgaatattcactacaaaattcaaatcgtaacaattttcttttttatactttggggtttattttcttgattacaatttaatggtgctgaatttcaacttcgtatataattttcttcgttctctaaataatcacactgttccatctctctggtttaacctaaaatcacaaggcaatatttattactttatcgccctgactgatcatatttccccccctaaaaattaaagctttacaactaccacgctcgtatgaaggaaattcttcaacttaatacccttaattttatgagaataaacatatattttgatttgctacatctttttctttcttttgccccagatatatggagattggctgctcaagtgaaagtgagacagaggtttgaattgaatctgtgatttgtagttcttttgtatcataatgttgataaccatgctaataatttttattgtgaaaacacaattttcgatctgcaagtttgagctttggacattaggacttttatacaggctttaggacattgaagtgttatcatcatcttagcataatgtttcttgttaaaatttcattttttgctttcatcaatctatctgactttggtatccactgtttttttttcttcttattccccagggttgtagctactgctgttacatatatgagacgtgtgtataccaggtaccttgggtgaaaaattgctttgtgatctgaatcttgttgatttttctttgattgcataataatatggtaggaaggagttttctacatagactttgcaatttcaatgcttggattactaagttttatctacttcactgctacaaggatgagcctaaaatacataatatgaccatagccataagaagcttagaaaatctaacccttggaaatgtaccacaatttattcaagaaacttctgtttttgatttcagaaagagtatgattgaatatgatccacgtcttgtagctccgacgtgtttgtacctcgcggcaaaagcagaagaaagcacagtgcaggctcgacttcttgtattttacatcaaaaacaatgtaaactctttttactgaacatgtgatttaaaattttctaatcattattgctaatattcagtttaaactctgaagtcctgaaaaccacctctttgattttatagcctcagatgaaaagtacagatatgaaatcaaggatatacttgaaatggaaatgaagattttagaagccattaactactatctagttgtatttcatccttaccgttcattatctcagtaagtatggtgttcttatttaactcagatgacttgcattagcattttcttttaactttagtttgatcaaatagtgtgatatggaatcaaagattttggtaacagtaatgaatcaaaaatctcagtgttgaaatgttgtgcattttcttacaattaagtcactgagatttttgtttgttcatgaaatcttgcacaagatttttgactttaattatgcggtcatgttagattttcaattttcatgcttggattaatgttcactatctagctaaaatgtctttcatttccttcaaagatttttgaacaagccatgagatctaatgagtgattcaaccttttcgttggcaggctccttcaagatgcaggattaaatgatatacatatgactcagttaacttggtaattatctaatctaccgattcattatcttttagtacaatgtgtgatttgaattttcattttctattatcagcagaaacttatttaagatcttcacttttaaaatgagaacaggggacttgtgaatgacacatacagatggaccttatacttgttcatcccccacatctattgctttggcttgcatatatatcgctagtgtactcagagataaggatacaacttcatggtttgaagagcttcatgtggatatgaatgtggttagaccaagtttataacttaaaaactttacaacagcccatcattctgctaattgcttattcattcttgttaagcttgaaagtaattatgtaattatgattttgcaggtgaaaaatatatctatggagatattagatttctatgaaaactacaaaactattgctgatgagagaagggttagtgtatccctagccaagcttggttctaaaccatagacggttgaccattactgcctctagccatgaagtgcttataattgcaaccaccaatcatttacctacaaatcaaatgtacctccaccttgtgacaattactagttaattattaacatattggggaagtggagtcaatatcacaaaactttccctaataataattttattcagtcaatggttgcccattatagtaattttgatgttagtatgtgaacattgaacactcttagaaatcccatcatgagaatcaattttgcaaattcagaggaatatatttggcacaggtcttgacaatttaaaaggacaaaatatcatttattcaaaaaaaaaaaaaaggacaaaatatccattgaacagatttcttccaaaaagctttcaactttggatataattcttcactttttccccttcttagcttgttttttctctgtcaagacagcagcaacataacaaaattttagtacataaaaaatagtattttaatacataataaaagttaggtaaatactattttgcaaaacatcaaattaaattttaataataatatgtagactagagatgttattagaatattgattacattttcttcttttgaaaaaattgttcgtgttatggatgtgcttatttattaaaaaaataaacgaaatattaaattaaagatttttttttgaactattttaaaaatataaaatttgtattgttatttaataaaatagaaatccaatgtaaaaatagaaaatattatttaccttaaaaactaattaagaaaagaaatggtatttagaataagaaaaagaaggaggtaggttacctaatttcctcttagcttcagattttgcaaagaagtccctccactcatcagtcagcacaaaaataagctcatcttcttcctcttcttctaacccataatcctcttcctcctgcaacaccctgttcataattcaaaatcactaataactcaatttcaagtttgttcatcatattcctacaattcaagaatgcaagaatcttaccgaggagaagaatctacgactactcctccattttctgaaacctccactatatcatttattgggggtatatgaacatgggaacccaaatgttctagggttttggtaaagaagcacaattagggaatacatggcgatggcagtggtagtggtggtggtggtggtgatgaggcaagagataattgattgtgatgatgatga

SEQ ID NO: 189194 - DNA, 3150 bp, Cannabis indica
tttatactcatgctatgaattacatagcaaagtttcattctgtttctaacatgaaccaaaaggaaagtctgtgattaattttgctcctgtgcatacaacaacaacaacctccagtagtaggacagaggaatcgccatggaaacctccaaataacatatgccttaaactaaatatagatgatgccttaaactctgcataaaaagtactaggtattgggacgattattagatctcataatgaccatgtcatcgctgctctttcaaagccagtacaagattaatttcgtcttgatgaaatggaagctaaagtcctttttcatagcattaattgagtggtgttgtagtgacaattacaatgacagttacatttatagttatatttgtggcgaaagaggaaatgtgcaattacagattacacatattgaaactgatgcattatgcgtccttgatgttttgaactctacatcaaaagatttatcttgtttctctaatttaatcctcgatattcgttgtcttttattttttttctctgaagttgttgtttctcatattagggggaacgctaaccaagttgttcatggtttagcaaaacgctaaatgactattgatttataatattagtaaatacctttcaaaaaaaaaatatttcatcactttggtgacgaaaaatataaaccatgatggcataaatataagtgtgtatatagaaatatacacttgacaattctaaccttatcataaataacatgagaactctttagggtaaatactattttggaccttatgttctacaaaaattatcaattgaactatttgatttattaaatgataaaatagaccctatttttctaaaagtgtacaaataaaaccctgaactgtttttatcaaaataaaacttaataataatctgatttaaagatgttatgtcaaaactgattacattttttgtatctgttcgtattagaaattatcttaaagttggttatattaaaaaataaaatttttaaaaatcgagctcaaagttctatttttactattttaaaaaatatatcatttaacaaaacagagggttcatttaataacttttacaaaacacaaagttcaaaatgatattgatcctcctctttattatataactatacatacataggataggaacaagttctatgaacatattggtacacaatcttttacaccatttaattagaaagatctaattaatattaattagtaacaaataaaatttaaataactttaataatggataaaaatagtaggaaaacattaataaaaaaatatattttttgtgttccatatatatgaacggtgttatcatgaaacatcaaagtaaaatatttagtaacataaaacataattaaaattaacttggatatattcagcaaaaaaaatataatatataatttggatatatgatctggtgcaatattcacaaaactacgaaaaaaaaatggtatattgataatcatgttatcgggacgaacttttcataattaatataaagataggcaaataaaagctgggttcttgtttaccaatcacatatcttgactgcttcattaaaccctagataaataagatgatgagactaaaaatattccagttttggagttcaattgaccatcatgtgctcaaaccccgttccagcttgaagtgttggaacacggctcacaccaacattgtgtagcaactgttgcagccacctcctggttgttgggtcctcctaaaaacaaggataaaaaacgatgaagttattgagggataaactaaaatatcaaggccataatttaaagcccctattttattttatggatgctatttataatatctagcaaagaaattaagccacgcaatgcagcatcaactgtgcaatgtcataacaaaactgtacacatttttttaagatggtgtgtaagggactaacaatggccaaaattaagcagatttgtaggaaacgaacggtcacgactactgaaagtagtacttaaacgggtgtaaatgaactattaaaatactcacacgcaagcaaccactgaaggtagcatctcttaacatgtcgggaaggcaacttcttaatgcatcacacgctctgtagaacaaaaggcataagagtatcaatacagaaaacaaagctaaacagtgaagcaacttggagtttttgagtaaaatattgtcttgagagttgagacaccaactttggattgtctgacaaccggagataacatctgatgatatgttttagcaaacgcgatgagggctgctcagctagtgaagccaccatgctccccaaaactcgaccaaccgcgaaaaacctttctgctgtggtgcagatataatctaagcccatatcgtccaacaaaatcttttgaactataaatgtagcaacctgtcagtaagaaccatttttttaatcaaattgaaacctcaaatcctactccaaacaaaaggaagaaagcattatttattcaaagggaaaggcaacacaaaacagtgagaattccaaaacaaatgaattgtttcccttggtgcattttgtttatttaattagtacaagcaagatgtgtcatcaaatctacgaccttcaatgggccttcgattagacaaaagttaaaaacgtgaagacgaagtgtaagactacatttcttagcttcaaataacatgtaatatgcacttgccaacttgattacaatgaaggtaatccaataccagattcagcaatttctgaacatgtagaataccttccatctctaacaaaatgcatgctgaaaatgatagataactagttaaagatccatgttacttgacctctaaaagtacagaaataattgcagatcacttccacatacctcaaaccatgactgatggaaaagtatgagcttttatcacaatatgtatatacaagtggacaagtatatacaccgtaagaccagatatatgtatatgcataaagcatccttgtatacaattgtaagaacaattttatatgtatttatacgaatagaaatactctgtcaattacatgtagtctcctctctcccagaactttaaattttacaataatcatttttttcttttttgaaatgttacaataatcatttatgtatggaaatgagtatttacataaatatgtgag

SEQ ID NO: 189195 - DNA, 1776 bp, Cannabis indica
cccttattcgatgccatattctttacttggatttattttctaccatcgagtacgttcatttccatatgattagcattttacaactattatttctcaatagcaatttacatttaagaggccttaacttatggtcttttctgcagccattttggccagttgtgagttatgcagacagtaggggaaggggagttgtgggtaaggacctgctacctctcacaatttttattggttttcatggtcaccagaaatgtatgaatttataacttatttcttttatttcttttcaggtgtgctggaaacaaattttattgaacccacacataataaacaagattttgagaaaacttccctttttcagaaacttgaaagtcgtctgaaggagatgacctgggaatactggtgagctattactgtatctctttattcttaattatattcctcgcctaatcctagaatatttgaggactaggaaactataacaattgctatgtaggtactcaagaggggctcgaacctcagaactatcattactgtactatgtgtgaaaggttttattgttctttcagttcttgctttttgtaccattctttttctagttgtttacttgtgtctgcaggtcatacagcttatgctataatagtaataataataataagcatagttattgttgttgttgaattgttgtagagagtttttattttaaaattaattgatactagatgcgaaagatatagttagtagtaacaaatattatgcttagctacagttggctctgattacaaaatagtgtatagtctgtaatgactaactatatcaatgaattgcttgcttgataattatatcttattttatgagttcatttgtgaatttttattgaagtaattcataattattatattggtttattaaaataaaactaattatatcaattaaatttaacacaattagaattactagttaaatggactagcttgataaacactaaaaaacattctagacatttatataaagattagatttatacctacctttatgctctatattgttgcagtttgcttctatttggcgtgtgtacatttctttacttactgctaaatactctctttttattttctttatattatattatttgtgattccttgagagtttaactaaatgtcaaactgaacaattctataaaactttgacagggatttccactgtggattaattgggtatctggtcaagaaaaagcatccaactcagaatatcccacctcttttaagtagtaaagccacatcaaatcataagtcctctggtgttggtactgcaaaggagtcacagatcagatcagggctctctcttcctaactctaaaagtcgacatgaacagggttggtatttaatttaagaattaaatcgttatcaaattcaatcatacaataaagattcacagcatatgatcctttttctcttctcatttttttcttccttttttggtaaggccttcaattgaaacgaaaggataattttgaagaaattcagaatctgaaaaggcaggcagttggagtaaatgtaagtccttctgcccagttcatggaatttgcgaaagcagctttcttatcatgtatcattgcttaaataattccaaattcgtctcttccgtttttatgtagaatctaagcaccaatggtcaatcgaaaaatcaagagaaagcaatcgtgttgcaggaaaatgaaactctgcgtgcaaagtgagtatattattatgtgctgatttcttttctacctgacaccct

SEQ ID NO: 189196 - DNA, 2406 bp, Cannabis indica
ctcaatgttaaatatttgcaagtgatcttgactggtccccgggactagagctataaaattgtataatagaacattagctcaaaaatagtaagaaatataacaaacaaaaacccaagtaaccatatctcaaaaaaaaaatctcaagtaaacaaatttacaggaagtactgtgaaaagaaaaaaggaaaatccttaagcaatcaaattcatataatgtattatgacaataagtgagtcaaactttaaatttgagtagaaatgtcggtaaagaattttgattcagagtttcgtggcaattggagacaatactccactatctggctaaaaaagcatattattttctctaggagcgagaacatataataatttctggcaaagtatacagatcacagtggaaattatttatcaatagactattactagcaagatcaaacaactatataaataataccataaaagatcaccacattgccagattatcctttacagtatcaagatcctgagactatacgaacgtagattaagataaaagccataggaataagtcatgactcatgaataagttgttatcaaataatgtctaccaatgtttgctttcgtttacttgctgtgtcattgcagaaaataaaaccatcctcaagaagcaattcaacctactttaactaaaaacaaaatacagccacttctaagtaatatatcacatacagagaacacaatgaattgactatgtcaaaaatacagagaacacaaataaagcttaaaaatgattaagtaacaagaaaactgcagaatacacttataatgtgcatcacaaaaaagtttagacaaattctaaaagattcttgaataaaacaatgcataaagtaagcattacataactacaaaatagaaaaatcttgaaatttaaatctcaaagattctgctatagactaacaagtactggtagtaaactttatagaataaattcaaatacatattccagaatatatcaatcatgtataaatgatatcattttttaaaatgcagctgaaaatcataacctacctttcaatgcaaggattttagaattcggattcatcagtgcagagtctgcagtaataggcctcctcagaggctgatttggcatactcatatcgattataacaacactattctgcggggaagtttccctcacgcatatgtacttatcagattccatagtgacatgcgtaaacgtgatgaattgaggactaatcccaacgctcggaagctgcaagcacatcagatcacaaaaaataaagatcgttcaatttctgattccagcttaaaacctaatctcaattttatcattactacacataaagaagctacattcgaatgaagcaaattgagtaacaatcatatcttaacgtgacagatctgaccataacgcccaagacaaaacagtatcagatctgaatgaacttttaaataatctaagcactcgaaaagtattccaattgagaaatcgaactaaactataacatgattaaaagagaggaattgaatctgagtgtagaaaatcggtaaatttggattgatttatcgcaggtagtacgactgtaattctaaattgagcttacgccaatcgaaccaaacaaaatgaaaaataataatatatacaaagaaaaaaaataagaataaaggtgattactacactaagagtgaaagaactgaccgtaagggcttccctcatggcgatcggagcgttagccgccgccatggttgctcagatcgagagcttaggatctagagatgcgatggaatcgcgaatttacacgtcgaaaccagaaaggggtaggaggggggcagcgtttcgaaccctgggcgagggattcgaatcgcttcgagatctgaagcagagaagggaaacctccgaagcttcttcaagagctgagtgagagatctagagagagaaggaagagttccgatattttataatcggaaatgaaatggaattttccagtgaaacgacgagaaacaaagagatctcgtctttaaaagccagataataaaaatgaaaattcctgctctctctcggagcaatatacgtgttagaatgtgactcggtgcatttgggttgggttgggttttatagacaccggcttacgcggatctgggttaacccggacccggatggaatgtttttcttagctggtgagcagttatggcttatggctttttccgttagcctttcgtttcttattttagttttttttcttgaacatattgcttgttctttaagcacaatgagttacactataggctaaagagtagaaattaatgtataatccttgttgattacactgattttacaaaattatttaagaaatctttagatcataggtagtacattttaaaaaacgaaagctagtatgtatatattgtt

SEQ ID NO: 189197 - DNA, 2307 bp, Cannabis indica
taacaattttaatagtttaagaattttttaaccgtgtataatttattacatgtcaagagaaaattctaattaggtttattttaaaaaaaaattatgattttcatgactaactagtatatatatacagcatatatctcgttttttattcccaaccctgaaaatgcaaacggcctgaaagaaaaaccctaacgcatttccctcttctgtagtgtaatctctactctaccacaacacgcactctcgaatctcgatctctaattttttctaaatgtaaggcgattcaataatcatctcagtatacatgttcttcagagaaagtgtaactgagatgatttattgaattgctctacattatgaaagaaaaaaaaaaaactaaagaaaaagaagaaagaaaacagatcaggcgttacaattggtgtgtggtgatcgcgatcgttctgtgaaagtaatgatcgttaaattcttttttttttatttcttccgatgcttctgtaaaatcgctttgtgacccagatttttgtttgtgatttaggagattatttgattaatattactgtttcctttgtacttgttgatctaattataaattagggtttgtttatgtcctttctagatatatgaatgttttatgattatgatcattcttcactcagtggttctctttttatctatatctatttatgtgtgtgtgtacgattcacgaaataagaggtttctagattataggaggtgataatgcaaatcgtggggagactagttgtttgtgctgttgcttccatcgaaatcatggtctctactaatggctttgttactttttcactttggctgctttttgtatctatctatctatctatctattattaaattatttcaatttgtttgaattaatatgattctaggaaatttcttcttaggtctttctattatgcatagggatcttttgataacaatttggattagtaggatatgaatgcgtttggactcaaactttagttaatcctctacatcctaatttaaatgtagacatggctgatgtcaaactggttaatgcaacagagtgttctattcttaagtacaaagttgaaacttaagacactcataatcatatgattgtagttgtgaaaaaagattcctagttttttttttctaactgcattgcaatgtgtttattattatttttttttctatgatgtacatacgttcagctggaatattgatgttttaagtgaagatgaatatgtaagcatttgcaagtcaattttatgatttttggactcttgtttcgaatggttgaggatatacaagtagttttatattcgagttattagttttagcagtagtttgttttttgacagtttgtataggaaatcccttgatcaccacaagttttattactacttttttcttaaacagaatctattaagtaaagtggtgatgcatgtgaagctcaaattgaattttagaaaacaagtttgacatcacaaagaggattaaagtcattggttataagcctttaatttggaaaatttagtcggattaagaaattttgttagtcagcttaatgagcagcaggttatttgaatatgcaagttaactcaagtgtacgtgaggattaatgttgagttaatttataggtgttcaagtagttgcagaaaatggatttcaatctatccttttaaatggtattcaaatgcagctcacaagcttccattacgagaagtacattcggtggctcataatgtggttcaattgactcagttcaatgcaatggaaggtgatgtattccaccagaaagtttggataagtaatttctgcataagtctattgtaacaacttgcaaagtgcaatcgtaggcattttgtcaatctttgatagttctagttctatgtttccatatgtcattgtcaattgtagttttagactttagtttctgagttctttctgttgcagcaagatgtgatcctttatttttgttggttaccatctcttttgtagatgtagtgccattttatttgggtgatgggttgtattaactgtttctttctactgaattctggtgctctggcttttttgtagaaaaaggttagttgtattaacaaataatgttaatattagctttgtgtgtgtcattgttctttagaaacacaaagttatattgttggacatgtaagtcattttcagatgatccaaatgttatacaagatatgagtggggatgcgtaaattatgtatagcgaagactagcaatgtgacccaaatatcacttctacacatacatttttttgaatgaaagttcatgattctaact

SEQ ID NO: 189198 - DNA, 3144 bp, Cannabis indica
gctaacaaaccctaggtagctcactcagtagcctcgcctcttcctcccgttccgccgaccacaaatggcatttcaacggcggcgtaaccattactaccaccgctttaggtatttgcttcaagccctctctgtcgtctccggcgcgcttcttgttcttctcgggattatctccttcctttctccttatcctgtcgaaaccgataatcctgctcatcgcgttcaccgcgactactcttcctcaatcgatgctacggacgatgcgattgttggaggagtctctccatttggagtgccggtttttcgagttccgaacaatggaatgagatcggatcgtgatctttggacttcgaggaattctaagtacttccatggatgctgcaattcaagcgcaaaatttttgaaagctgaagctattacgcatcctaataggtacttggcaattgcaacaagcggaggtttgaatcaacaaagaactggtattacagatgctgttgttgctgcacgtatattaaattccactctcgttgttcctaagcttgatcagaaatctttttggaaagatgctagtaacttttctcagatctttgatgttaattggtttatatcaactttagcagaagatgttaaaatcataaaggaactcccaagaaaaagagggaaaacgtggagtcctcatacaatgcgtgttccaaggaaatgtagtgaaagatgttacaacaatcgtgttcttcctgttcttgtgaaaaggcatgttgttcagctcaccaaattcgattacagactcgcaaaccggttagatacagagttacagaaattgagatgtagagttaattaccatgctttaaagtttacagatccaataagaaagatgggtgaaaaactggtgcaacgaatgaggaaaagaagcaagcattacattgcattgcaccttagattcgaacccgatatgcttgcgttttcggggtgttattatggtggtggagacaaggaaaggaaggatttgggtgcaataagaaagaggtggaaaactttgcatataagcaatcctgataaggaaagaaggcatggtaaatgcccacttactccagaagaagttggtctgatgctgagagcattgggctatggtagtgatgttcatatctatgttgcatctggagatgtatatggaggtgaggagacattagcaccattaaaggcattattcccaaatttctattccaaagagactatagcaatgaaagaggaattggagttgttttcttcattttcttctcgtatggcagctcttgattttatagtttgtgatgaaagtgatgtttttgttaccaacaacaatggtaacatggccaaaatattagctggtagaaggagatattttgggcacaaaccaactattcgtcctaatgctaaaaaactataccgtttgttcttgaacaagaacaacatgacttgggaagctttttcttcaagagtccgtactttccagcgaggttttatgggagaacccaatgaggtgagaccaggtaggggtgagtttcatgaaaacccctcgacatgtatatgtgaagagtctgtacccaaaggaaagagagattcagtatctaggaaagttggcaagggaaaggaggaaatatttgaggaccaaaatgttgatgatcatgacccagaatggcctgatatggaggaagatgacaatcagagtggcatgggaggagtaggtttggattatgatggaatcaactctgaggaacctgaattggaggatatgctttctgattgaataaacaattttaggttaatccaatgtatagattgattctcccttcactaaccttctgatctgattttggcatcctgtatagaagagtatgggggaaaagtttttgctcttgttttatattgtagtcacttgtgattggaaatagagtctgagtaaaagagagtcacttgttgatcgagcggttcaaaattggtgaacaaatataatcaccatttgggaggatgatgttagagaattgtggacacttcatactaactatttgttattgctgattaatttttaggcagaatctcttatgtcttccaatacacatcacctaaatctatgtcaagtatgcgaaagtcactaatttcatttgagaatttgagctaataagcatacaaacaaaatccgattcaacttgttttttctaatctgatgttaaaatttaatctaatctaattattaattgaattaaattaatttttaattcgatattcaattatatacttatttttcatattaatttaaaaatataaagaaaaaatatgtaaaaattaaacccaatcaaaaaagaagggaaaggccctacaggggagtcaaatattataagtttaatgtaattaaaaatttaaaataataagtaataaaatagatcaaaacatatggaattaaataataaaaatataattaaaatatatccatttattttttttaatatttttattatatataaataaatacaagcaatcttttagtataaataaatatagttgaatttgattggtttttaattaaattttaagattaacatccaatctaatccaattaaaacatccactttaatgaattgtagttggatatttaattttttgtatttaattagttcggttcaaatagattaaatagattagatgttagctaagatcatatatgtgtttgtaatctatcaccattaagaaaacagtttgtctctaattaatgtagtagtttcaaatatttttaaaagagtacaaatgactattgtaaagtgttgtcttttgaagagtataaacgataacaaatataatgttatcattttagaaacaacaaatccttaacagcaagcaataagttatgctttaagttaagaaacataaaatgaacaacctaagaagtttcatttggccactattatattctctgagataaaaatagagagaaaagaaagcaaaagattgtcctctgttttcacgttaaaaattgaaacatcaatattattctaaagcactcatagaaactaactacatcattcaaagcactcaatatggtagcacgacatattgtgaaagaactttcccacattatttacaaacaccaaattttcaacgaacatgaacacaaaa

SEQ ID NO: 189199 - DNA, 4119 bp, Cannabis indica
gtgtcgtggaatgcaattattgcaggatatgttcaatgtaagagaatggatgtagctagtgaattgtttgaggcaatgccatgtagaaatgttagttcttggaatacaatgcttactggatatgcacagagtggtgatgtagaacaagcgaagtttattttcgatagaatgcctcaacgcgataccatttcttgggcggctatgattgctggctatgctcaaaatggccatggtgaggaagctttgcagctatttgtggagatgaaaagagaaggggaaaggttatcgaggtcttcttatacctgcggtttgagcacatgtgctgagattgctgctcttgagttggggaagcaaatgcatggaggacttgtaaaatcaggattcgaaactggttgctatgtagggaatgcactccttgtgatgtattctaaatgtggaagcatagaagaagcatatgatgtgtttaaagatatacaacaaaaagatattgtctcatggaacacaatgattgcagggtatgcaagacatggatttggcaaagaggctcttgtgatttttgagtctatgaaggcagcaggaatcattgacgatgttacaatggtaattgttgttgttattgttgcatccactattttaatcaatttagaatgatatcgatacactaatgttctagtgctcttgaaagaattagaacataggcatttcattgatatcaaagagaaaattataaagttccaaacttttcaagacagtttggtatctctctgagtaatcttttactcgctttgttacaaaacaattccttgcccacttacaattgattatccctttatttatactaagtctccttaactggtttaacaccttaggacgataagatatctcacttaaagccactaagaattcgacaacttagcctctaaaatcctaattaattatactttttggttgcccgttgtttctattaatacttgttcctaattgtatttcaggttggggtattgtcagcttgtagtcatactggcttagtagagagaggcaccgaatatttttacaaaatgaatgagtattatggaataacaccaaattcgaaacactatacttgcatgattgatcttttaggtcgagccgggcgcttagatgaggcccagaatctaatgaaaactatgcctttcgaacctgatggtgcaacatggggtgctctccttggtgctagtaggattcatggaaataccgaattaggtgaaaaagctgctaagatgatttttgagttggaacccgaaaatgctggcatgtatgtactcatttcaaatttatatgcggcttcaggtagatggggtgatgttcggaatatgaggttgaaaatgagagataaaggagtgaaaaaagtaccgggatatagttgggtggaagttcagaacaaagttcatacattttcagttggggactctgcacacccggagaaggataagatctatgccttcttagaagagttggattttaaaatgaagcaggaaggatacatttcttcgacaaagttagttttacatgacgtggaagaagaagagaaagagcatatgctcaaatatcatagcgaaaaattggctgtggcattcgcaattttgtcaacaccatctgggagaacaatccgtgtgatgaagaatttgagagtgtgtgaagattgtcacagtgccttcaaagtcatatcgaaaatcgtgggaagaacaataatcttaagggattcatatcgcttccaccactttactggaggttcatgttcttgcggagattattggtagactaacgagatttacagcggagaaactaagactcagattgattttgtagccaattgagactcttttctgtactaagtcagttgacttattagcagaaaatagaaacagaaaaaagggtgagagaaaaagagttctcgagagcaagtgttgaggtcaaccttcatgaaagtggtttcaggtagaactaagagccttgttttcttgtcatattgttgctggtgtaaactatccaaagattggtgattgtaatttcattcatacatagtgaaacaacctcttttggaggaagactggatgtagatctcaaattctgatcgaaccagtataaattctgttgttacatttttctttcactgttctgttttcctttttcttcttccccaaattatgttaataagttcactgttttgtacactaatctgattcttgaactgttgagtcttgtgttgaattgtttcaacatcatcacattgtggaagtatcaagatgatagagttctactgattgcagatgagtaacggtaaattgaactgtctcaaccgtctcgatagaggccagattgcatcctaccaaaagatatcaaggcagcagcaggttagacatttctcttttgtttcggaggccaaaaggaagttacttttctgttcttttttctctactgagcccttggaattaaccaattcaagattgtatattttattattgtgtactctcattgaaactccatataatgattcaacatgagctatgttaatttttcagtttggtcctttcttttcaaggttttgacggtcaagacacaaccaatttcaagttagaacagaaggtggttgttccatcagagataaaagttttcgagttggctgctaatttcgggattggaaagtccgttctttatctccaagttggtatgtgtaatctgctttaaccgagttatcatatgtatgtttttctcattgcccttttgttgttagattcaattggatgtgtccttgccatggttgaatgaaactacaatgattcaacactgttaagtctgtagtgcatcgaaaatccaaaaccgaaatagctagctagtttaggattatcggttgaaggtgtaagataagataattcaattcaaccagagtttgtaaagtgtcgctgagcttaacatagtttcgaaattattatcaaatgacttgtattgtatagtgtgtaataaataccaaatggtctaaagaacttttcatttgtgttttgtttcatgaagtgtttttgatagagagaaaaagagaaacgaactaacgaaggcatcatgtgagatgtaatcgcggctgcagaaaagggtagcggtcggccttgtcaaactctgtttgtctctccctctacggactcatcgtgttgttcttcggccttacagtgttctttagcatcttctaggatatgagtcgttaattttctacaatatgcatcatactgggtatttcctttcagtaatgaaccagaacttttcggtggaccaagttgatcaagtggactgtacgtctgtctctctaattaataaaaagagtaaataggagtgtaacttacacctaaagttttaagtttgtaagcggcataaatttactgattatttttagcggcataagtattcagtatttgtaaaactgtaattttcttttagtttcgttagttcgattccgttttgaatttgttaaaagaatatttagaagtaactaatattacatgtttctgtctagattcaatgatttagaatttggactttatatgtattctgtttaagataataatagagtctgtattgatgaaattattaaaaaattatagttttataaatattgggtacttatagctttaaagattttatgccacttataaacttaaaactttgagtacttattttgctattacacttaataaaaataatatatatcattgcatagtaaatcttatcaatattttccctaaaaagaaatgaaagcaaaatcttatcaacattggtttgatgtatttttgggaaataatatcattgattagattttagataaatttacctaatgtactttttttttacttacctttctctaaaataactaagtatttttatttgattaaactttcactcttttgaatttatatagttgcagtttatacttgtgtaaaataatagtttctatatgtataattgtgtaaaatgaactcaaacattgtgttgtcactctagaaataattaaaagacaacattttttctacccgtgaaccctaacctaacaaatatcattcgatcaattattaccctttgtaaaaaaaaaaaaaa

SEQ ID NO: 189200 - DNA, 2532 bp, Cannabis indica
acttgtcaacggacctgacacaaccaaaaagaacaaaaaatttaaatacagtaagtttataaaaagataaaagaatccaaggtgaaattagaaagaaagtcatcgaggcttctgtttgtatgttaggcctgattctttatagcagaatgtgggacaacaaaaaggctgtaaaacagaaagattcgacacagaaaaaattaatacgatgccagcaacttggcaagctactaaaagttataatgatttaagaaaaaaagagtgaaatggaaaaattaagaagaaaggttaccaaatttttcgccctcctgtctcatgtcttccataatgtcttcatattcttcatcgtctcttagctcatccgcagtaactacttgagtaaggcatatgaccttggaggctgctgcaccaccagtcccagcaccaggttgttgcaacaacataaatctctgcaaaagaattaacattaagagatccattttcgaacaggaagatacacagaagcttagccaaatattaatcgattcaaagaatataatggaaaaagataaaaaaaaaaattacgtattacagtcaaattcatcaaatgcaattactgaaacaaacactacaaaaacagagttttgtgttgaaatttttccaaaataaaatagacgaaatgataggcaacttgtagaaagaattcactctagcagaaggaatatatacgtgtgtggacccacatgtcatccacacacacacacatatagagcatttttcattcaaagagatattgtattgcagatggcatatgaacacatatatgagtatatacaataggtgaccacataggagtgtggaccctgtcatccacacacatgtaaagactattttcattccaagtgagggcctttttgtttttaaatatttattgcagatggcatatagacatatttgatgcatatttcatcataacatgaattatatatttgtcttcggactaattcatcgttaggcaacttcacaaaacaattgcaaaagcagacaaggatctaaacatacctgcaaagcaatctgctgctgtgcatgtaacaacacgctctcttgttcgggtttgggctggctagcaccttggttggctcgtctaacagtgagcgtcttatcacccatttttattccattcagagcagcacatgctatgtctgtaacggaaagatcttggtaaacacaaaaggcataacctttagaatttcctgtttctctatctttcaccaaatcaaaaccccgcagcgggccaaaggactccagcaactccttgatttgtgcttctgtaaagtaatagggcaacccgcccacaaaaatgcgatcaggaccctcaagcccaccagcagaacctggtgtaagcccaacagcagcaagattcaaatttggattgggctggctagggccaagagttgcagcaagtgaagggttgtaatcactgggcctcctcaccttaacaggggctccctgcatttgaaacaataatatgttacctgaacagaaataccgtgcaatgcacttaggacaacaccggagctatatatggtccatatttgtactgatgtgtacacacacatggaaaaacaaaaagattaaatacctcaaaaataatcccatccaaggccattgcattactggcctcctcaacagatctcatctccacaaaggcgaacttcttttcatggttgatatatacatttacaacagcatctcctgcaccaaatgaataaaaactgaaatcagacaaaatatcaattaaacattagctatgcatgcgtatagattaagatgcaacaaagatgtacctggaccagcagtgtttcctccaattgcagccatcacctgactgaaaaatgttgcaacagactgcagcagaaacattgtaagctcaatgtactcactaaaccgataaaaatttatttgcaaactaatgtagttctaagcactctaaataatatttgagtattaaactagttttatataaattatttgttaaactaaagtagtttaaacaatctaataatatttgagtaatgtaatgtaataatgtaacatatgggtggagacactgtgcaatcaatcaataataagtccaagaatatctttaattcaactccacgggaagacaattcgagaaagatttcagccatcgcaaaagggtgcatactaatgttaactaacaaacaatttcgtgagataattaaggaattatccaggtgttttacctgttcatttgctgtaggaggaagcccaccaacgtacacccgtcgggcatgtctagtagcctgaaaagcaaagaaaattaggattagatataaactgttcgttgaaactcagaactcagttttaaaaagatgccaaacacacacacattcatgccaacctgctgagtcatggcttgcactggcatgactggaagggctccaaattgctgcatgggaacaaaacacaaaatcaacaatgcaagccatgccatacaggtaataccaccaattttttatttacatttttttt

SEQ ID NO: 189201 - DNA, 1041 bp, Cannabis indica
caaataaataatggtagcaatccaaggtgatcatagagatcgatcagagaagctgctttttaattaattaattagggtttcatgtgatgataagagtggacgaggctgaggctgatcgaatatgagttaaattaatatatatatatatacatattaattgagatatatataagaatggagtcaaaaagaaaaatatagggcttactatactggtcattgtccctgcactactatatagctgcgtttttgcagaccccacagttataagtaaacagctttattagctattcctgcgactatatttatataaaaacaaaccattttcttgctaattgcgtgggaatatgtgattgttacatagccctgctacaaaagcaaattttaaaaataatagtaaccttattatgccatactaagtataaaagagagacatagatcatctagagaaagacatataattcatatgtatgatttgtaatatatatttgtgtaaattgttagtagtgatagaattcaagtatatatagaaaacatatgttttgaactctctgtttccttcacagaagttgtatagatattttagagactatattatgtatatgtaaacactctagctaatatacccttgtctattacaattgtataaaattcagatcagaaaatatttagtgttttcttaattaatgggtttaatttatgatgaattaacaaaagctagcttatacttgatcgtgccggtacatcaattataatttgtatctatatatatatatatatacttcttaataattcaactctcacacacattacatgtgcaactagaacttagatctctctttatttcagtcaaaagggccagggttaataatttatgagtgtgttttaatacgtgcagtgtcttttagtacactttttttacttaagacaatgtatatatagtacacatacacattattggattgaaaatgttggacagggtacgtaaatcaagtaattaattaatttacagctagttatgaattagctaaaaattaagtcatg

SEQ ID NO: 189202 - DNA, 992 bp, Cannabis indica
ataagatactacaaaactcttcatggtatcagaagcaactcaacgtcccaattttttttttttacgattgaaaccttcaatcttttccaccatattctgattatctacatctcaccatgagtgacgacaataccaccaaacctctcgatttcacatcaccatactaccttcatccctccgacggaccacaactcacaatttgtcctattgtgttacgtggtgataactacaatgaatgggttcgttcgatgcgcaataatttttgtgcaaagaataagctcagtttcctcgatggaactgtgacgaaaccaacggccggcactctggaagagtcattatgggtgacggtaaattccacacttgttggatggattcataatactttggatccaagcctacgctcttccgttccccaacctgaccttgtgaaggacatgtgggatgatcttcgacaatgtttctcgataggaaacggtactagaatccatgagttaaagattcttttgggtgcttgaaaatagcgtgggcactcggttgtgacttactacaatgatttgcggaaaatatgggatgaacttgcgggatattctactgttctgaagtgcacttgtgctgctgctcctgcatttgctcaagagaaggagaatgaaaaggtccatgactttcttgctggtttggattccgctctttatggccctccagtttcgcatattttgatgatggagcctttgccgaacttaaacactacttttgctaaagtcgtgaccgaagaacgtcataaaattgtatctcggactcacgatactcctgctgatgttgttagctttgtggtgcaaggggctgttaggggccgaagtgataattctcaacccaatggtgtttgctctcattgcaccaagcctggacacacaaaagaaaattgttttcaactgattgggttcttggattggtggtattctgagaactgcgttcatggtggacaaggtcgtggt

SEQ ID NO: 189203 - DNA, 3020 bp, Cannabis indica
atctcaaacatattactcatttttccaaatttgaaagtatagtaaagtaagtacatttattgatcagcaacatttttccatcaaaaagagatgaacggcagagaaagcaagaccaggagatataggcaaggagattcacacaccagaataaattctagtaaattctcaaaataataataataataaaaagaaaataaaaaagccaaaaactatttgtctcgagcacagccctcttcccatcgcacgtgcctgcttattaaatgccacgtcatgccatagcttcgatgatggtgatgatgatgatgatgagggtttctgatagagctaaaccagtggctttagatctaaatatatggtcctcacactcttattatagtctgccatagcagagaagagagagactcttcaaaaaaaaaagaaacgcttatttttttttttgttaatagctatattactactacaaataacaacgcccaaacaaaaaactacaaaagaaagaaaagagctttatttgcaatacaagttgagtgagagagagaaacagagagcttatctttctgagagttttccacccataaaaactcgtctttttattagctttgaacttcaaaccactttagcttaagcttattagcttttaactcaaaagagttgataatgggagaggtactactgctacactcgttcccttttgtttattttaatggcttttgttgttgtttttgtgttttggggatgattctgatatttgggtttgtgtttgtttaggaggaaaagaaaccggaggagaagaaagttgaagagaaaaaaccagaagaggctaaaaaaccggcggaggagaaaaaagaagagaagaaaacagaggaagagaaaccggcttcggctccagctccggctccggctccggctcctgtagctgaagagaaaaaggaagagaagaaaacagaggaagcttccaaagaccaagctccgccgcctcctccgccgccgccacaagagattgttctaagagtttttatgcattgtgaaggttgtgctagaaaagtccgccgctgtcttaaagggtttgaaggtttgtgaccgttttaaaaaaaagtttgaaactttttttaaagttttgttatttagtggtggagatttgatttggtgtattttatttttcaggggttgaagatgtgactaccgattgtaaaactcacaaagtgattgttaaaggagagaaagctgatccacttaaggtattggagagggttcagaggaagagtcatagacaggttgagcttctttctccaattccaaaaccaccaacagaggagaaaaagcctgaagagaaagagaagcctaaaccagaggaaaagaaagaagttaaggtttttttttttttttttaaaaaaaaatttctctctgtttttgaagaaaatttcaactgggattttcattttctttaatggggtttgatttgatttttgatatttgatgtttcaggttccaatcgtgacagtggtcctaaaagtttacatgcattgtgaagcttgtgcacaagaaatcaaaaagcgcataatgagaatgaaaggttaagatttttcactttcatgcaatcaattccttcaattttcttctcttttcaaagttttaagattttttttattttttaattatataaaaatctattgacagcatgaaacggatctttttctgcaaaattaataaaaattaagagctttcactgtctaacaaatcctctcaaaatcaatacattcttttacactaataaaaaaatatttagattccctcaattcaatccactactttagtgtctagtctagatccaattttgtttaattatgattattattacaggagtggaatcagctgaaccagatctaaaaagctcacaagtaacagtaaagggagcattggatccaaccaagttggttgaatacgtgtacaagagaacaggaaaacatgcagtgatagtaaaacaagactcggataagaaagaaagtaaagaagagaaaaaagctgaagaaggtggtgagaaagacaaagacaaaaaaggtagtggtggtgagggtggtgagggtgcacctgcacctgcagcagagggtggaaaagaagagaagaaagaaaagaaagaagaaggtgatcaaggtgttgttgttgaggaaaatagtgttgttgagcttaagaagaatgagtttagttattactatccacaaccaaggtatggtatggaaaatatgtatgcctataataacaatattagtattgcttctgttcctaatgctaatatctataatcctaatgcctataatgcctaccctcctcagtatttcagtgatgaaaatcctaatgcctgttctgttatgtaaagagaagaaaaattaaaaggggttggttttgagggacaggagaaaattgtccagaaaatgaggggtggtgatttgggctctgctctgttggatcatgttcttctactttggttaccctgttatgtgtaggttttttttttttttttttaatggggccctttgtatgatctacagatacaatgtagaattttgaggctgcttatgcttttgtaatttctttttagttgttctatataaatatgaaagaaataattatgaaaaatggtaatcatcatcaaaaataaaataaaaaataaatgacatgtaaatatttattatcttctatttttgttatgcagcttgttatatttttttagttcacttgtttgttggttatagaatcataagaattaatgctagtatgcaaatgtccttaaaatggtgtatcttttaactattgaaattattgcattttgaattttcattagtctcattttactaatgtaacacctaatttggatgaaagttcagtaagtacatgttaaagttgtgggtatgattttgagaattgctattgggtattagttttacaattagttagcgatattcattaaaattgatattgttcaaaatttattttcttaacttatataagatttgatacttaat

SEQ ID NO: 189204 - DNA, 2236 bp, Cannabis indica
aaaaaaaaaaaaactaaactacaaataatagatagtactaatattagtagagtttgtaaataaggagttaaaattaatttatatattttttcaaaactaacaatatataatatgaatgatcagtttccctctgattaattgggatttttttgcatcaatatttattatttggtagtttgatatatattttgggattgagttgttttagagtaataataataatgatgaaaaattcctaataataataacaataataataataataataataataattaataggcacatggtgaaattgaagctgatgggagtaatggcacatctgaatttaatgtaatgaaaagtggaaacgcaatttggagatttgtaaggccatatgcagccaagggagtattgtttaactctgcgtaagaacttctttataaattaatatattaaacttggcaattatattcatatattaataattaatctctaattggtttttgtatatatatatgatgtagtgctatgtttgcaaaagagttggtggggaacctaaatctatttagttggcctttgatgtttaagatactctcttttacattggttattttatgcatttttgtaagtacaagtggcatcaatcaaatttatgatctcgacatcgacaggtgcgtataactaattataccaaatacactttattaatttataattactttgtattttcacattcaaaatattgtgtaataaggatgcacatttctcaggcggggacctttttttaatgagacgggaatttcccgtctaaatagagaataaagtagggatggggattactttttgtccccaaatattaaacagggcggggatggggatcacactccttaacccgtttagtattttatcttatatttttaataatattttataatttataatttatgtttgcatttttttagtatattagtattttttatatgaattttaagctgtgttttggataataattaatttgttaaataataattaatgtgtaatattttaatttttatgtaatttaaatttttgtatattaaaaatttattatattatttttttattagaaaattttccgctccgtctctatcccatcctcaatggggaataaacagggataggaattaaatttttaacgggaatagggatataggggagcactctccgccaattccacgccccgtgtgcatctaaatatggtgcggtattgattattttatgaaatgtacaaatttaaccacatcactacaaaaaaatatataccatttgtatctaaaaagtagtatatttttttaatacattaatttcgtttttagttacaacaagagtactgtaaactaaaaattctttagttacaaatttattgttatttttgagactaatatacttaaataatgatcttaattttaattgtaatttttttcatttatttactgacaaatctaagatttcttatattgcagtacgtagagataataatgtcatatgcatacagtcatgtatttaatacaaactattacataatatgattaatgttgtgagaccaattcaattgaattgaatgatatatataattaatgttataattttgatgatcaggttaaacaaacctaatttgccagtagcatcaggagaaatttcagttgaattggcatggttgttgactatagtttgtacaataagtggcctcacattaacaattataacgaactcagggccattcttcccttttctctactctgctagtatcttttttggctttctctattctgctcctccattcagatggaagaagaatccttttacagcatgtttctgtaatgttatggtatatatatctatacatatattaattatctattattcttagctactagtttccaccacattattatatcttaattgttacatatatatgacattgtatattgtaattactatataaatatctcactcatcaaattatacagttgtatgttggcacaagcgttggtgtctattatgcttgtaaggctagtctcgggcttccagccaactggaggtgagttattaattatcgatttcaaaatataatgtaatgatcatttgtgttacagaataattattttaatattgaatctcatatatgttaccatatattaaactttatggtaaaatttgtattattattatgtattgtgcagccctgctttttgtttgctcttttggtttattt

SEQ ID NO: 189205 - DNA, 3455 bp, Cannabis indica
tgaagttgaactatcattagaagacaacccataccagcacgctaaataaagtatttaatttgggggcagctttaaaccacataacttgtgccgaaaccccgagccattatcctcataccgtctgccattcaacttctgtaacaaattatacgcactcttaatagtatagatacctgaagtctcctttgaccacacatagttgtccttgacattagcaacttgcaacaagatatcaaggataaaaccttggtctcgatgaataaacaaatcttcaactaattccacatcctagcccatgccatcaactttgaacaagttaaatacagtcgcctcacttaaagcaaggtggttggagatcataggattcatgtcatctgggagccaaggttaacccaatacagaaatattcctcccattaccaacacaccatcgaacacctttccaaacaacctcttatgatcccatatgttacgccaaacaaagctttgattagagcctaattgagtcaaaaggaagtcaccccttgggaaatatcttgctttgaacactctagtagccaaagagttaagcctagtcagaagtctctaaccttgcttacctagaagggcaagactaaagccacaaagttttcaaaaacccattccacccactcatttatgcttacacaatctatcccaagacatccagtgtattccttttccacctcaattcgaggattgccaccgaaaattttccatcaaactttcgatatcacgagtaatctccaaggaaagcaaaaaaaaaacacatagcataacttggtgattcttgggccacatttttcaccaatatttccttaattgctcttgaaaggatcttactctcccagccttgcgatcttttttgaactctttcctttagataacccaacaccacaaatttattacaagacataatgctagggagaccaaaataaaagtttccttccaccaaaatgttcatttgtaagagttgacaaaacgacttctatctaatttgacaatattagtactaaataaaatggaagatttagccaagtttacctcctggccagaacaaatcttaaacttacgaagtaattctttgactcctaatgcctccacttttgtggctttacaatagagacaactatcatctgcgaagagcatgtgagagactttaggtgcactattatccaccttacaaccatgaatccaaccattatattcatatttttgaagtagagtagaaaggccttcagtataaagaataaataaataaagtgagagaggatcgccttgtctgatgcccatcgttggaacaattggacccatcttatagcccccatgaataactttatactttgctgaagaaacacacctcataatcagtcttacccaaccttctacaaagcccaacttacgaagcataccttctaaaaaatttatattcagcacgatcatagactttgctcatatcaagcttcaaagccatgaagctagtcttcccatgccttttcctttctaagtatggatcaccttaattgaaatatgtgtctatttcactttaattaaaataaccaatatacttcgcaaatttcatattgatatcataaacaattaattgatggttaggaaactaaaagaaattaagtacaaataaaataaatacacaaaaaaaattgggaaagaattgaatcacataaaactaaaataaagtgtcaaacaatcttcattaataactcaaattaaaagtttagctactcatattcattgtaaataattgatagcaattaattaagaacataagaaacagagaagaagaaagaactcttcaaaaaataattgatgaaagtctccagaacccgctttctgcttccgattttcgtcccttaaaatgatgttctcaaaaagtgtcaaaggtcctttttaaatctcaaaattagggttttaaatcctaatttttacattctgaccataacgggccgcgacatggaccccctatgtcgcggcccctgaaggctatcttcgacaacaagctttctggtgcgacagcccaagtgacatttttaatccacccttactaagcctaactttaaaaatccataagtccttttaatttcaaagcacattttcattagtggataaggctaaatagtgcaagcttactgatattcggtcagtggatatgttggattgactttgagcatgtacattaatttttaatagtttttgacatttatgaagtttgagagctaaagttagtattatgagcaattggattaaaaatctgattttataacagttgaatcttgtgagtagcggtggtgtggtgtaaattgaagtaatgcttgctttgtgtttgttttagattagtgtcactctttacttgagggcgagtagaggttaagtttggaataattttataggctaattttaagtgcattttatgaagtgttttagaagtgtgtttcagttacttatttttattttttccaaaattacgcttgttttctacttattttatatctaaatggtaaaactcgaatttgaaatgaaaagaaatatattaaatgagatgaacataattaatttatcatgaaatttagagttctaaaatatagggtaaaagattctaagttttgaatgctcaacatgcttcatttgtgatagaaaatcaagtctaaaacttcaagtcaatttttaactatgatgttattttaaggaaaatattgtgaataaaaattttagatctctctttcatctttccaagcatcttgaatcgtccgattccaatcaatattgaaaaaattatagctaaatgcttctccaatcaaatcaccctacaatttacacacatatgatcctgatatctcctttttctcatgtcaaaaatatgcaaaagtaaagaaagatggtacagctaaagaaaaagcttgagagattaatcatatgccagattattatattatactcattttgcaaaaattataaacattctgaaaaaaaaaaaagtaaacttttttaagaactcattaacacacgaaaagcttcatttgttccaacatatatattcctttccgaatcgattttgcagcagcatcagcagcagcatacacttgatgataaatacatgatcatattcacaacttttaagtaaaaaagagaaaagaaacaaggaataaaaataaaagctcggtttccagaccggagtagcgcaacctgaacacaggacttgtttgacttgtatccaatgaacttgttaaaagagaaatcaccccggttgtagcagaggtagacgaacaaatacaagaccctcaaaattagatgttcgaaccgctcaaggccatcaccttacactgttcattcattgccagaagctgggcctcttcttgtcaagaagagctgtagtctatcgttctcttccataacgcttctgaacttctacctctttctgta

SEQ ID NO: 189206 - DNA, 908 bp, Cannabis indica
ttttttttttttggtttaatgaaattgtagtagtagtatatcttccttcaaagtaattaatatttaaagaaaagtaaatatgtctcacgtgcgtagcacgaataccctaactagtgtcataaaatatgataatttttgggaaattttttttaaaaatcgaaggctaaacaaaatatcataaatacatttaataagacttccaagaataatcatcactaaaaaagtcattgctaaaaaattattgaaagtcatcaaagttgtcattactatcgaaaaagtcactgaaaattcgttgaatttttattgctaccgaaaaaatcatcaaagttatcactgtcaatagaaactcaccggagttaaggtgtcaaagttgaacgttagaatttgacatagagaaactaattacgtttattgctaattacaaaatttgacacaaagaaaccattacgtaaatcaattaaattaaaaattaacatataaaaaataattacttaaaataagtaaatcaaacattacaacttaaaactcagctatgtaaaacaacaaaagtaacaacatggtcaactcaagggtggacaagagggtccatgcccaaagtcccctcctcgtcatttatttaagtttaatactctacaaaaatatcgtccttacaagtttaatacaattaaaagtttaaaataattaaaacaacaacattgttaaataataaaacggaactagaaaatatgaaaataaatacacaaaatagtcaagcattccaaattttataacaaaaaacaaatagctactaaaaatatatatatatatatattttgggttttttcaatatttttattaaatataaataagttttttaatatatataaatgttattggatagaatcaggttttaattagattttgagatt

SEQ ID NO: 189207 - DNA, 1957 bp, Cannabis indica
ttaggcttcgttcacaaaataaacttatatgaaaaggaagtacaatttcccattttgtttccaatataaacattccaagaattacataataataataatggctgttttaaaagaaatgtcagagcaagacaatgccttcgacgacacaaaggactatgacaacgttgtagtacccgattctcagtctgattccgactccgaccaatcaatggctaaccaggccaaacccaattccgatccctcgcaaaagccatttgattcgaaagaaaatgaaaagttgatgaaacaattggccgatgcccaagccatgcccccaccacctccacgagtcaggctcccaactagtcctcactcagatttggagaagaagaagaagaagaagaagaaaaacaagaataagaatggtggtgtttcaattgtttcgaaaccccattttaagaagaagaagaaaaagaagacgagtaagcaacaattggctgatgagaaaaagaagatgaagcaagtaatggaaatgggtgatgatcatgaaacttcttgtgagagagagagagtatggagtgaagatgatgatatatttgtgttgcaaaacatggttgaattcattgacaaaattgttttgattacaacaataatattattagggagaagatcatcaaggattcgtacgatgttattgttgccaaagccgaatcactgtccctccaaccacggctatctcagaaacagttgattgagagagtttctcatcttaagaagcaatttctagacaatgacaatgatgatagtttctccaatcctcatctacagaaagtgtacaatctttcaaggttgatctggggcactactagaaatgaagatgatctcaagaagaagaagaagaatcttcaatccatgcttaaggattatgtgtctcatcatggtttacatatgagttggattgagaaatcaaccaaacaagctttgggtgataagtggttgagatttaaggaggaagaatgcaaatatttgatgcagaaaggaatatttgaatctaccatgcaaactgtaaaacttgatgtttataggaaacgttttgctcctaatcaatagttttattacatctatttttttttactttttcattatttcatgttatgttcttgtgtttgtttgtttctatggattttaatggcgaaagcagttttaaaataaaacacttacatattcaatgattttagtaccctgcttttacttttacttttgcattatgttcttttgtttggattttaatggcaaaagcagttttacttttgcattatagaaaatgacattctattaatcctttaaaatagaaaatgaccattattattattagttagaagacttaatctggaattgagcattcaatgagattacgtcatttgtaatgatctaattggtcatgttgactatgagtttggatcttgggcaatatggtattatcagattaatgaatcttaatttctctggtttaagattttggttcatatgcaagtgtaatccaaaactggagaacattacaacaacaaaaaagaagaaaatatggagataatatccaattaaaatactaaaaaacaaataatcatatacaagtacaaatatatatcctcaaccaattgatcaatttctcaagaaaaagaaaagcataataattattgtgaaagtgaaggtaataatatagagaaaagggaaaaatgatttaagaaaatgattttcgcttgagggttagaatttgagcttcaagatgtcctctagaaatcaaatattcacattcccttaccttaaacttcttccacctagtcactaactctttcaatttggactcatatgaaatgtcactaaaatccatcttatgagtagccaaataatgctcaagtagtaacttcattggatgattttcataaccaaactctttttcttcatctgagtttttgtcttc

SEQ ID NO: 189208 - DNA, 2513 bp, Cannabis indica
ttacattctaaagtagtgaaatatgtcttcctataattttagttgaatcactattcctctaagggatgaaaacaatacaaaataaatgagtttgaattaaaaatttaattcaaatacattttcatattttgaattaaactatgtgttcatatttttaagttttatagtttattgtaatgtaaggttttatcttatgaatttcatgttacccttgataacaaaacaaagaaaaaagtaacaccaaagaaagtaatatgacaggtgcaattccaaatacccttttctttttgctataaaaaatgatacactaatgaggagaatatgctcctcatttgctacactttttaatttttcctctttgaaagggaataaatacaaagagatgccttgctaaatgaaattccagaagcaaatacatgaaagcttaaacccatgtgcttttacataacccccttgcctacaaaaaccgcccttgttttggttgaatatgtttatctttgctaatataagcactgatgtgtaactttgtagctcccaaaattaaatggacggcaaagatgtcaatttgttaaactactaccatcatcatatcccatttcaacatgttgatggagcaaccactgctgctttggttttgctttcagtttcagccacggttcctgcctagtgcgtcaatccattgtgagaaaattttgacaaattttcattggatctcttcaaaaacatcttcgtcgtcttgaaccagtgataagttccttggctgcagaaaacctacttctccacttccttcgaacattttcgatcttactatctgcatgtcacaagaattttatcacaaacataagtgtgaacaatctatagaaaaacatataaactagctagaaagaagaaatgttagaaaatagctgttattgaatcggtcacattttccactagccaaatttttcattactaagttttctaaggcggaaaaagaattcatgcttagcagtcgtgagtaccctatacagtgatttaacattttatgaggaaagatgacactaaattatacatatcaaaaagaacaaacatgcacttatttcataattcttcactaacattttcaacaagttactttttctataacaccaaagaaaatgaagacaaggataatggaactgctgacatgaagcggttcacaggcccatgtgatgttatatcacattagattcaactaaaaatccaccaagaggatgataatagaacgcaaagttgcccataccttttctatttcatcaagaagatgggggttctcgcgcaagtactgcaatgctttgtccctgccttgtcctaatctataagaaaaaaaaaggccagtagtttaatatgttgacaaacaactcaacttttcagatacctgtaacataaaatgctgagcataataatagaaaaaaaaaccactcataagtcaagtgcagataattgtcatcattcgaacaaaaatacttggggtgtgcttaattcttttaccacatatcaaattagaaagcaagccccaaacagactgaaattcaaggacaaacctctggtcctcgtagctataccaggagcccttctttgctataacctccatcatttcagcacaatccaaaacacaaccctgcatgagaaaatatttgggtggactacgttattatctttattaacctcttgtggctgcgggaaatatagatatgctctgttactgtacttaccagtttacctactccctctccgaatataatttcaaattcagcctgcttgtatggccttgaaacctgttagaagtacttaggaacttagaacaaagataactctgacaaaaaaatgtcaactgccacctgatttgtatgttggcaaacaattacaactaagagcttatacttgatcaatatcttcccagggatagatatacttaagtaatttacttaagtgtcttaactggctttttggatctcaagagtcttttaaactattgatacccgtgttaagagttatgaggttgcatcttacaaccaatggagtaatccattttcttataaatggtccaatgttcttatgtattttctatgtgaagcactatcctctaatagtctaatataatgaaatccttcttaaacttgcagaacagtcatctcatctgtataaattcattctaccaaaaaatatacagacataacattttgtttccagtaacccaacaaaaaaaacacattttgtttccagcaaaaaagaaaagtatatttgaccaaagtacaaaatattatgacagcagataattaccttactcttttgtaccctcacgcgaacccgaaccccaatctcttcatctcctttagcctaattacataaattgataatgagttgacatgataaactaaaaacaccacaaagcctgactaaattatatgtatacagatatgtagattatgtcaagcagctctcccaacccacacaaatagataggacatatagaacaacagaaaaggaaaagg

SEQ ID NO: 189209 - DNA, 2924 bp, Cannabis indica
tctatttgtaaaataatttcatatgtaatgtatatgagtaggagattattttattatagtgctcatgtaagcatagaaactcatatttcgttaataaaaatatatatgagaggatacctatatagatgtgaggttaggtagttttgcttgtaatataccttcccacatatactctcttcctctttcagaccacctccttggacttcggacagagaaatggccatggtgatggaaggtgccacctttgctgctgccgtcgctaccaaattcccctccttcagaatcatccgtacaagacccacttcttcctccgcttcttctcggaccttccgaagcttctccgcctcagcttctactctcaaagagggcgacccactcgctcctctctccgtttccctcggtcaccatactcgacccgatttcccaattctccaccaggtttttctgctacatatatttatgtataaacgttatcagtggatataattcttcttacctgacttcttgtttggtggttacggagtaatttctaattatttggagaaaaacagaaaattgagactctgtttgtgtattaattttctttttagttggcgtagatttgtaagtttgtgtgtgttggtttattccattgctatagaattggatattgaactgtggtggactactgcataaagttgccattaaatttctgggagtcctctgctatgcaaaattatgtacttgtttatatatttattgtaataacatgaaatcttgatatatggttttgcaggaagttaatggctctaaacttgtttatttagataatgctgctacttcccagaagcctatagctgtaatgaaagctttacaaacatattacgaagcttacaattcgaatgtgcatcgtgggattcattctttaaggtacttatatatgcttaattggtatgcaattgaaaactaaaagtactagattgttttgcgaagttatagaagagggagatattaccttttttatgtgtgttcagttttaccatagtagttgggctttgcataattaaaaggaggaaaaaaaaaagggaaatgatatgtgttatgattatagaaaaacttgtgtatgctactgctactgatttccattttttgtattgatgaaaatagtgcaagagcaacagacgagtatgagttggccagaaagaagattgcatcttttatcaatgcatcggattctagtgagattgtatttacaagaaatgctacagaagctatcaatctagtagcttattcgtgggggctccaaaacttgaaacaagaagatgaggtagattttttcttcttctttctctatacccttctgtgtttttgctacttcttccaatagttttatgaaagtgactttaccttctttgcaatttgcattacatttatgaatacagaacgaaatgttatcttcagatttcattgttatcatgatagttttctactaaaaactgtaatttgaccccattacttatcctacttagtagttttgactgttcgttactcattctcttttatcttgcagattctacttacagttgctgaacatcacagttccattgttccttggcaacttgtagctcaaaagactggtgctgttctgaaatttgtgagcttaaatcaagatgaagttccagatatcaacatgttgaaggaaatgttgtccacaaaaacaaaacttgtagtggtccatcatgtctctaatgttcttggtatgctgtctatttgtttttggttttcctggttagccagaagcaagcttccatagctgtctcatataaaatttactatttttgggtttcggaatgtttgttcaaattactgacattgtttatattatatgtagttttttctcaaataatcatacttcaatttatactgttgtattgacatattttttcttcctttatagcttctgttcttcctgttgaagatattgttctttgggcgcatgatgttggagcaaaagtgctagttgatgcttgtcagagtgttccacacatggtggttgatgttcagagcctcaatgccgatttccttgttgcttcttctcacaaggttagggtagtgctttactttttctaaatgttaaggtcatgggcaagtatatcaagttaagcaaatgcttcagatgtgtgggcctacaggcattggattcttgtatggaaagagtcatctcctttcttccatgcctccatttttaggtaacttactcctttgaaagttgagatgagaacttgtctgttttgaaatttgaaattctgtgtgcaagagtttttcgtatctatgcccacaatgtaggggttggaggtgctttttgaaactcattctggtattgatctttctaggtggtggagagatgatctctgatgtatttctagatcattctacttatgcagaaccaccatccaggttagtgattgttttgcaggttagtttactttgtgagacatgcactgttgtattgataattagccttttcaataaatcagatttgaggctggcacaccagcaattggagaagcaataggattaggtgccgcaattgattatttgacaggaatcggtatgcaaaagattcatgactatgaggttagtccaaatttgctgctctcaagatgtttttcttactgaagagaaggtagacattagcctaatatcttaaataagcttgtacctgaggtttccttatatccatcttataagactcaaacgggaagaaaagataagctcgatgggaaaatgtgaaaaaaaatacaactgtcgtggatatttgagagcctgccttctcctgaaccaagtctctacaaagaaactccagaaaaatctctaaatgacccttttctatatgaatgcctctcatctattcccattaagtctacagctacctgaaagctaca

SEQ ID NO: 189210 - DNA, 1487 bp, Cannabis indica
atcagactaaaaaatttcatagatgacaaagtagagaggtctatcaaaccaattttttagtaggatgtattatagaaatttcttattgtatatagttaattattcaatttttttttaagagtaactttttttttttgttttttggatctttaattttttatgatatttttagttagttatttaatttgttttaaaatatttctaatttatgttcgttgtacatataaattagtagttacacttaaaaatggaagatattgatttagatgaatgttttctcatttttcttctataataataatgtattaggctcaaattattttaaataaacgttcatgggtaaaagaaaaatattatgattgtaaaatttcaatatatataattcaaataatataggtttgaatggttcaaacaatttgtttctttccttttacttttcttctctaggaaccagacacagtaaatatgcaacttgcatggaccatcataataacaaaaactagctacgtggatatatatatatatatatatatatgatatcatatatcatatatatatatgaatattataagacaagaaatgggaatatatatgatatcatatatgaatattatagcacacacgcgtgccacaagatttgtaacacagtatatatatacatacacacatacacatatttacaattaagtcaatataatgtgaatatatacaaaagcttaaaggatatctataagtcacaagtttcatggagcactttgtgctagaagtggctagaatatttgccacacaatattgcatactatcactataaattatatatatcaatattgtcgtgtatatatatttatatatatatatatgtacgtaacatattatgctaaagattattggaagaagaaaaaaaaacacaaaattcaaaattaaaatctaaaataatttagtgatgataatcttcctaatcttttattaattagatttgagaggctaaaattaaactataatttttttcagagagaaaaacaaagttaaaaattgtgtgcataaatatatatatacacacacatatcattttaaacatgaaataactagggatgatgccagtaattaaggccataggatcaactaattatcacacctaaaagtttggtttaattatttaacttacattcaaaaagcaggtttttgcatttgaaattaggttgcaaaaatataaaagtcctcatcacttaaaatgatctacatctcatatctaaagctttctagtatgacccaaccaatttatgatgttgttcctgagcattaactacaaaaactttatgtgccattcatttcaacacgatacgtgtttaattatatataaatatatacatatacactgtgacccttgactaataattaaatgtgtcatcgttcgatctctactattagctatacacgacactagtcgatctttctataaacaatatgtcatatatatacatagctat

SEQ ID NO: 189211 - DNA, 3752 bp, Cannabis indica
ggctgttcctcatcagacctcgaccttgtcaagcgcctacgccttctgggaactgaagaggtatcttcaccagcgtcgcttgataagcgttgttcttcctcctcgtcttcctcttcatcatcctgaagacccaaaagattctcgccccaaatcaatcggcgatcagttacagccccacctgaacgacgatgatgcctagtccatgctcttggccttggtcgggattccccaccattgtccattgaaccgatcatttgaaacagaaacagagtagtccaccatgggccgttagcctcacttgttccattagccctctcaccagctagacgatctccattttcaatgacatagtcccccacaacaacagctcctggcattgctgagcgaatagcactgaccacatcaccgagttctctctgatgctctaggcgtcgccaggctcgttcacgagatggatcaatatctgaaggtcgtgttgcaggatgaatgcgccgagcatggcggcggagctcttggtagttaccagaaaaggagcaagtttcgcgggagcagcttcgtctctttgagttgaggtactttcttgcttcttcaacaacatcccagccaagcacatctcctctgcacaaaggacatttcaagctcaaattgggctctgaagaattctccacatctaactcatcaagttcaacaaccctttctctaaaagactccaattcaacagcttccacaatgccttcctgtgtatctaaaatactatttggaccttgactgttgttattttcttgtggttgttcttcatgcaaatcaacagataaaacagcattgttttcattaagattcagattatcattaccctcattcagatttggtctcaaaggtgtgttcgtaccataagtattgacagataaagaactggattcagtaggaatgtcagtagtactgtcccttaatttcttaaaccggtccaagcaatttgaatgcctgtggcttgtatcacaaatgtaagatctacaacccttgtcatgagagctgcaacggagcagaacagcattatggggatgatccatgcatatggggcaagaaatttcatccagttctttgtgaagaccacggatatctgaatcagtacataatcttcttttgacaccagccatcttgaaagatactgtgtagtttactcaacacattataactcattagaacactagtactctaaaataattcaatattctaatcattcaaaaaattaactcaatagcaaataagcaacaactacaccattcaatgacttggagagagaaagaaaacaacaaaccaagaatgaaaaaaataaaaaataaacaagtctgttctgccaaaaggcatacacattatgttcattttacatacaagaaaaggcataaatttcaaatctttgtcaaaactagacccgatattacaccgtcaaaatttaccgaatcagttttgttgtacaagtcataatgagagagcaaatgtttccaattaggtatcttcaactatctattcaagcccaagtccaactagtcattcggaaaatcattttctacccacctttctcatatcatcatctcaccaggttttatcgtccatccttagcagaattatgaagctatcatttcccaatcagtcaccgagttgatgcaagcctgttacccttagttggtcatgtaaatccaaggagaatctcacaacattcccatatttgttacaccaaaaagttacctctcaccttcaaagatcttaattgttatttttatgactgaagtccttgatccaatgactatcactattcttaagaggactaaaagtatagcccatctttaatcgaagtttaagagaaaattaacatctgcggagagtaagctttctaaatgaagtcgaagcacgaagcaagggaaagttgtgattgtgatcactaaaccagccacaaaccaaatccctcaaagaatgacaggcataatgcacaggaaaaaaattgattgcaaacgaagtttcttaagaacatacagaagtttccaaataataaaaaacatactgaatgaaaacaatccagaaagaaaaacttatcagtaatggaatagaatcaattcatttttagacttagaaacataaaagctcacaaggatcatgtggaacatgttcaaacaaaataaataacctagaaatacagagttgaatgcttgtgcaagacaataatcatagttatgtgatcacatacttatacaaaataaataagaacaaacaataacaaagcatacatggtcaaaaacagatttttcgggcaaataatcattcaactgcatttatacttaccaagaggaagacctctaagtatagtccctacaaagcttcggaatctcaaattctgttaccaattccgaaaaactactgaatctttactcaactctataaagcaaatcacaaggcaagcactcaaacaaaggcttcaaattaccggatagcactacaaaacttgaaaaatacactggttgaatgaaaaactagcaagtatacttgtcaagccacaggctcacccatgaatccaaaaacctgcagttatgccagaaaacacaagtgatgatcccatacgcacattatctagtaaagacgtgctgatcttaattttatcatgtatgtttcatttacaaaaaaaatagtccaaatatatttataaatacacaatctttaaaacctgacaatgatgttaaaaaactaaagcattagtacatcaatagatgatgaaaaaataatcccaataattaagataatctccgatcatggttattatgcaaccaacttaaacgtgtagattaaaagaagatcaagtataatagttttttttttgagggaaagatcaagtataatagttcaactggatactttcctaatttaacccaattaaaatcataaatccaaattaatttaacacggcattatacgattccaataaaaaagatacaccttttcagtaaaaacaagcatctaaacaaatccctaaaccgcttaatataccgatcatccatatccccaacgattatctaaaccctaaccctaaattcaaaaaaggggataaattgggtacacaatcaacaagatatacatacataattactttttccctaaaaattacccaattgaagaatgatcaaagataagtctcgatcaaacaatcagatcaagattgaactaaggatgaatttcatcataatcaaaaaaaaaattaaccaaaaaaagggaatgaaggtcagaattttacgaaaagaaattgaatccgtcctgaaaatgtgtctttggtgagattgcgtagagaagttgctgagatttaggaattttttttttttttttttttgcgtataaatccgaatatagtgatatgcacatatatatgtagagatgttgctgttatctaatctcttctttccaatattatttaattgaatttattttatattaattaataaataggctcaaactcaaagttggggacgataaataaactcggcttggcggctaggctacattctatgagccgagcctgtttaagcaaatattcttagtgacacgtgtcttttattcagcggttccgtacctgaatctcttccacctgtgaagtggctcgtagccagagagagctgattctctttggaagattagaggctcattatttactaactgccctaaaccaaaagtttatttgtcaacaggtccctaattatacatattttagtaag

SEQ ID NO: 189212 - DNA, 3190 bp, Cannabis indica
gaagcccatccacaatgagtaacgaagcacccatagatgggtgcttcaagatttgtggttgctgaactccaacccccactgaaccactcctctcccttcaattctctcttgaaaaccatacggtaaagcctcttgaatggagtcaatttctaaaggagctctcattgcaaccaaaaataggcaacccagaaagctccaaacctagcaacaactcttgaaattcatctttggttaatatcacctcacttccaaaaccacagtatattacagagttgggcttgaaatgacttaaaaatccaacccatttttgttctaaaggatcggttggtgggtcaggtataagtggacctgaaagtaaaagagtcttcccaaactctttttcaaggtaatcgctaaacgggccttctatctccctacaggacctgaaccccaaaacatcacattccattaggcttttaaacaatcgatcgcaaaagagaatgttgccatcaggcttaacattactcacgaaaagagagtcccgtgcctcatgaaagtggaggtaaatcgatgaatcagggtaccccggtggaggtttcatcaagtcagactcagtaacttgttttcccttgagcttgttgtaagtagtaggggataaaccgtaagcaatttgggcagcacccaccactgaataatacattgatttgatgcccaggcggcgacccaatttcggaatccaataagaaaaatcgaaaaggatgaagtggggcttgagttttcgtagaagaagttcgatgtcgttttctgttctatccatggcggtcatgaggagatgtactgaagaaaaagggacgtcgttagtggtctctgccccagaaggaagaccgtccacgcgcggaatggtgattggataaatggttatgagatttgggtatcgattcaactgcgcctctactttgattttggttattggtgggattatgagagagattgtgtggcctttttgagctagtttgttcgagaggtatatgtatggggtaatgtgtccgaaagcaaaccaagggtacattgctatgtgcagagaggaaactgacttactttccatttttgaaatttgatatatattttctcctatgaaatgaacattaatcagcaaaactcagtgctgaatcaagttgtaatttgaagtaactagagagaaccaaagtaataatccaacatgattttcaatggtacaattatttagcagctgaaagcaccgacaaagaatactaaacaatatttacctttatgggagctaattctgatctaacgaaagagcaagcttttgttggaaattggagaaatgcaaccgccggtgttttacggtgtctttactgttttaatggagaaactgtttggaaaatcaccggcggtgtggtttgaagttatgtaaattattggtagacgtgtttgtgtatttttaatatatatatattgtatcaacatttgtgttgttactaggatgcacacgtaggggaaatggacagagagtgctcctctcattcccatccattaagaattttaattttcctcccgtctattagagatcgaaatccctaataaaaaataaaatttataataaaaatttaaatgtataaaaatattaaatattacacattaattattattcaataaattaattattatctaaaacaatactttaaattcacaaaaagaatactaatatactaaaaaagtacaaacatacattataaattataaaatattattaaaaatataaaataaaatactaaacggtcccgtcaggacaagaagtgatccacatccccaccccgtttaacattcgggaacaaaaaataatccccgtccccttcctgttccccatttagatggggaatccctttcctattttaggcgggtcctcgcgggccccatccccataaaggaaatgtgcatccctaattatcaaataagcaaattacatgcacaatcacttaactttatttgtttcaatttttatcactgtttttatattctttaaggtatactcacttttataaatgaaattttattataccccttaagttaatgtaaattatatgctagactcaagtagagagcgagagtatattagatagcccactcaaaaaaatgaatatattttaataaaatataatataaatgtattttgattaataaatataaaaaagagatatttttcaacttattcctaaaaagtaaagagcgttttaaactcaaagtcccaaattattataattaaaaagttattactgtaatttaatataaattatgtatattttaatttaataaataattttaaaattattaactattctgtgtcacatgaatatggtatggtattaaatattttaagaacactcttaataactctaagagcaaataattcttctaataaataatgtatattatatttccattttgaattatttttattttctttaaatgcttcattatatgtaaaaaaaaagtattattttttctttaatactattttaatatattttattttatttttattaatatatattataaatatgaagatattaaaaaaaaataaaaaaaaagggtgtgctataaaaatttggtgtcaaataacaaaaaaaaagtattttggtgatatgttttaagagacacagtggatatctaaggtgtctaatattaaagagaaatgttaaagggtataagtggtgcctagcactttcctatgtgttaatatcactattggtcctactaagtattgggtcacatatagtttaatataatagcttttagagagtatcgctaaccaatcgcaacacgacatgtcgagaaagtgttaggcaccactggtaatagcaatacccaatattaaatatcaattgactaggtggttcttatgttggttgccacctattttaaggaaaatggttttttcctcttaagggctttgttttacttcatagaaaacaggtatgagttgctattttggacattaacattttgtctcaaaatgcttaatatcattactctttgtcacatttcaggctctttctttgatgcattagatcggtcttactttgtctgcctgtgccgccacctcctaacttagaacaagtttcttaggaaaagaaaacagaacaatttctttttgacatatagaaaggatcagagtttttttttttttttt

SEQ ID NO: 189213 - DNA, 980 bp, Cannabis indica
aaaagaaaaactttattcaaaaatcaagtaaatacaaaggtacaatgccacaccaacaaccaacggcagtagttgctacaaatagtagccactaaccccccaacactaccaacttttaattacattgagtaaatacatctttttttggcaagctttaaacggacccttgtttaaaaatctaagctgaactatttttctaacttccatactcaaacatcttggggcaacacaacaaagataaaaaatgcatctattcctattcttccgaagagtatacaacgtagcagccatgacagcattcaaaatacgattattcaagttactgcaactatcgaatttggcccgtgaaaatcttccaggcatgtattgatgacagctctaaaatgaaaactcatgagcatttgtctttcaattaaatgtcgaaaagttataaactaaaacaacagttaaagttgtcctaaatattctcgcgcataattacacaaacaacataaaaaaaaaatagctttattcctatttccaaaattctctataaatattaaaattttatcaccaaaatccataaacaatttttattgtttttttatggtctttatttatttatttttttgtgagataaaatgtctctatattaaaacaaaagtcgtaatacaaaggggataatgagaggaggtatttcctccaaccatgaacattgagtacccaccgaaagagcgaacttagccaacaaatgagcaacattattagtagatcaatacacatgagagacttgagctccaggaaaattagaaactacacgattaatgttatttaacaagtaatggaaattcgaaactagctcttgtgaggaaagtaattaactactaagagagaatcagtctcgattaaatgcacaggtagttgaagatcaatgagccattgtagctaatgcatagagccaaagcttccatgacaactggtgagaacaaaccgtcgaaaac

SEQ ID NO: 189214 - DNA, 1743 bp, Cannabis indica
ggtcacgaagaagaaggatccctccgttttttctggctggtatttttgtaaataacaacttttagtttctattttaatttattttccttttttaggtcataaatgtatatttgttcaattttttagtttattatagaaaaaatccctttataaaaattgtgacataatcaaaatatttttcactccagattaaataagttaaaattttattgtaaatttccaaaatgccctgacactcaataacttagtatatatcgcataaaatttatttttgcatagaattttctaaattaatgggttaataaatttattatcccgtcaataaatattccatatcacatgaaatttattttcaacacaagtattagtaataagctattcctcttagtttttacccattagggttaggaaatttgcccatccaccaaaatttccatcaaaccttaatttctgatataatcctaccacaacccacggtagataattaaattctaaaatttcacatattgaataattaaaatgatgttctcaaattttgtttcactatctaccagacattaatagggacgaggtattacaagacctaaaatttataaaagtttcattcgcgaaacacaaaataattgtaggtataacttcctcatttttttttcctcatgttcccacgtggcttcctccacactgtggttacacaactgtactttcactaaaggtattaccttgttccttaacaccttgtcctcccgatctagaatagtcaatggtcgttcttcatataatttaagtaagggtcgacactcaaatcctcataactcagctcatggctaggatcatttacatataatctttgcattgacacatgaaccatcagggacctttgataatactggcggtaaagctattcgatatgctacctcactaattctttctagaatttcaaatggtacattgtacctcacttgagtttccctttctttcaaaacctcattgatcccttcagtggagaaattttcagtaatatgttatccccaacttcaaattccaaaggtctccatcatctatccgcatacttgcactgaaaatctatgaaagtatgcatcatttgatgtatcatcttaacatctttagttacccttccaatttttccctacccaagaattttctttcacctgcctcatgccagtgaatctaggatcaacatttcctcccatagagagtttcataaggagccatcttgctagtttcatgataattgttgctgtaagaaaactctaccaatgggagtttaatctcccatgttttttaaaagtccaaaacataagctttcaggatgttttccaagatttggatggtatggccactttgtccatcaatcttatgatgaaaatttgtacaaaatttgagattattggtttccaagcctgattacattagtttccaaaaggttgacataaatcgctcgtctcgatctaaaacatagaagtgggagctccatgcatcttacaatattcattatgtaaatatctaccaatctgtcagtcccatcaattttctttactagtaaaaaataggtagacttagtcaatctatccaaagattgtaatgtccctgctactctttagtgttccgccctggtttgttgcaagtcaagcatcgtgcaacaaattctactacctcattcttcattcctgaccacaagagtgtttagatggagcgactgggggcaagccttagaaggttttt

SEQ ID NO: 189215 - DNA, 5202 bp, Cannabis indica
atttataaatattatgtatatatctgaattacacgcacaaatgtgtgtattataatcatatatatatatatatatatgataatatgttgatagtacacgctataacagactctcattttctatatcagaaattaataaataccaaactggtgaaacgcagcaatattttgcatacacctagtgaagtggattgcacgtgaaatgatgaaatcttggctgtcccacacccccacttgtaaattatgctcaactatcggaaaacacattaaaaaatcatataattatatatttaattattaacaattgtatgtacgataataattacgaaataatgacgataaataatataatttaaagccactatatatagatcaatatgagcagtagaaaggagagggtaatatgtggacacatcatcacatttgatgatcagctttatatatatatatatataattagaaactcggttgtatgtatatatattaatacttgcatgtcacgagggcaatgcctcgaagcttctctattattaatttgataataagatagaacttagatattatatatatatgacaaattggtatattaccaacatcgatctaattatattcttaatacctgagcagcaatatgcaatataatataagaggttgatgatatttatttccaaactatatttatatatatatacatatatgttcagttccagcttctacttgctaagtacagtacgttaatctacgcagcaattttggaatcttgatttaatgcacaatttttttataaggtatatacgaatccatgtgatgttatatcgaccccatgatagttttttttctacatatgtatattttattttgtttttttaaatatatatttatatatatatatatatatatatgatgacaaagcccccgagatctttcccattaaaaataatatatgaaactccaaatggcctattattgcactcgatttaatgagatagctaattcatcaaattaagcactaattaatatagtcagtatcatgatgagtgtaaatgtaaatatagtagcaaggtcatttttgtcaagagagttagaaacctaactgtcattatgccaattagcacttgattgtttggttttagttaaaagtttgttattgctttctgttctggttgttatctcttttatgtttgtttataaagtgtattgttttctaattaatataagagatttttcttcctatcaaaaaaaaatataagagtatttttctttttgtttcaatctctctctctgtttctttctctttctttcctttcttcttctatttctctctttactctatttttgtgtttctgcaacaatggtgaggaataaccatagttctattatggtatcagagccttatccttctcagatggtgaatataggcaacaccagtcatggaaacaccagtccaacaactctactaggattctcccaagttctaggaagaaatcgatctcgtgagatggataacagtctgatccaattcaaccacacattgttgatcaaactcaatgatcacaattttctcctatggaagtagcaagttcaggcaactattcgtggaaatagactggaaaaattcattcatgacattgctccaccacctcagttcttgagcgatgtgatcgagctgcttccattcaaagtcctacctttgtagaatgggaggtacaagatcagcttttagcatcatggcttctctctttcatgactgagagcttaattatcagaatggttgggtgccacactattagacaaatctggattgccctaaaaaaaacatcacttctcaagtttcatccaagatccttgaattttgcaccaaattacagaacctttaaaaagaaactttttctctcaatgagtattttctcaaagtcaagcaacatgttgatttgcttgcatcactaggagaagtcttatcaaatcgtgatcatatcgctacaatctttaaacgattgccaagtgaataatacttttatcatatcatcaaacactcgaattgaaggatattttgtagctaaaatcgaagctcgattcttgcctttgaatcaagaatagaaaagactgacaaagatgtagatctgagtgccaatcttgttgttgctcctgatctagagaatcaattgtcatatgaagctttcctggctcattacaacagtaatttcaaagcacaaggagctaacaaaggtcagttttattcttcaccctatccatcttctagttcttctagctactacaataatagagaaactaattcaagttacatgtctcgagatggatctccttcctacaactatggaagaggtaatcataatattcaacatggtggaaggttccctactacaaaaaactatcccactactacaaaaggtacaattcacgtcggtattcaagtatcatttaaaggtttagaaaaccgacgtatattccatagtcgcaaatagttttttattagtgttgtttttaaaatgacgcaaaaaataattatgttcatttcaaaatcgtcacaaaatatacattcttctattatatcttctgcgtcggtttagaaatgacacaaaattatttgtggcattttaaaaccgtcactaaaaagttataccgtcagttataaaatgacacataaattgctgaaatatttttttcacctattgcatcggttataaaatgaagcataaatgtaggtaaggaaaaattacaatttttcatgtaattttcaccacatgaaaaatcacataatttcacaatactccaaaacacttttagagaaattttgttcttgaagtgataaaacacaatgcaagttaaaaccagataatgagaacagaacaaaaaaatagattatagttaagtaatcagctgtatctttagggaagaaagattaagaggcgcataatagacaataatattgaatagaagaatgcaaaaattagcatacggcataaagtagcaatcaagtactcaaattctgatttctcattaatttaaccaaaacccattagttctatagtatcaaaacagcaaggtcactgacctaaatcaaatttaggaccaaatctttctatgaaagctttttcaacaaactgacctttggtgggagattaagaatgtcaaggcaaatacgaccaccattgtcgatattgggatggtaaatctgggtggcgaaagtcacagtaggaggctggaatgggtacctttcaggtatctggatcttaatattaaagacccccttctcatacacagttccttcgggacctatcatttctgaaacaaaaccaagggttttaaaatgtcaatggaaatcaaaacccagataaaggaaactacaattgtaatttgtaaagtatatataatgaatattttctcgggaaccaaacaggaaataagaaaagagaagagggatacatacgggcatcgatgacagacaaagagaaggtagagaggtcagagtcgggggaaaggcatgggaaggaggcgccgggaggagggtcggagaggagaagcttgagctccttctgcattcggaggttgagcctcgccgcttgagccattttagagtcttgctttgcacacaactaggagagaatcgttaatggcgacgtaggagagtattgtgcgtgagttgttgcaaagtttctagatctctatacaaacaccatcatctgattctgattctgatatagattgggaatgggaagtggaggaggaacaacagagtcggaaggaagaagaagatgaaacagtagaggagtggtgtagaacaatatgtctcatagtgtccctactcagttacttggtgccataacaaataatcatcaaatgaaaaccagagaaaaatctgatatttacaagccaaaggtctatctagctcttcaagaaccaactagtgctaaaatggctctacagcaagaacaatggaacaatgccatgtcttatgagatgagagctctcaagaaaaatgttacatggacttatattattttaccaaaatggagaacacctataggctataaataggtgtacaaaatcaagctgaattcaaatggcacagtgaactaattcaaatcaagcttagttgccaaaggatatcatcaacaaccaggttttgatttcactgaaaattttagttcagttgtcaagtttgtcataatcagagttgtgctttctctggctcttgcataaggatggtgctttcaataactcgatgtgaataatgcttttctacatagagaattaaaggaagaagtttatatgactcaacctcctgggtttgatttaccagatgctcctcacctagtttgcagacttaataaatccatttatggactcaaacaagcaccaagagcttggtttgagaaactgcaacattgtttgacagcttttggctttgtttcctcgaagttagatcatagtctcttcgtacagcacacttccaagtctatcactctcatacttgtgtatgttgatgatataatcatcaatggtaatgattttaaaatcatttcaactctgacaaaagacttggactccaaattttctctcaaaaatcttgggaaacttcactatttactaggtattgaggttcatcacactaaggaacgtctccatctatcccgagagaaatatgtgagagatttactcggtagagctcaaatgatggatgccaaaccaacaccaactcccatgacaagtggtttatagctttctgcttttgatggagatccagtggacaatccacaattatactggtctatagtaggtgctcttcaatacttgaccatcacaagacttgagatctccttcagtgtgaataaagtatgtcaattcatggccaatcctctgcataccactggaatgcagtgaagagaatacttagatacctcagtggtactatcactcatggcctaaacttcaaacgaccaatggattatgatgttacagccttttgcactgctacaaaaatggtttttcccgatgtttttaaacagacatttaaagtattatcgtccgtttctataactgtcgcctatacgatcgtcgtaaaacatgcaaaataggcgacggttaaaaactatcgctaatgtggacttcccgacggtttaaaaccgttgcctatacgttgacagttttaaatcatcgggattaatggcagaaaaatctgtat

SEQ ID NO: 189216 - DNA, 3430 bp, Cannabis indica
gaaaccataacacatggctaagcagtgttttggaagctcagagaagccctcaataccaagaatggccatttctctgaagattacagcataaggtgctttgtatggaccatcagggtctccgatgtcaaaggcagtccagaacaaccagaatgtgagtggggcaatcacacaacccatggctgttccaacaaactggctccaaaacatagacttagctgaagagagagtgaggtaacctgtcttgaagtcttgcatgagatccgctgcagtggaaacaatcgacatcataacaccacaagctgctaatccagctattactcctccattgcttccaaccaatgaagcaatcatgaaaagaccgatctttccataggttgacgctaaactccagtctgtgaggccagtgccataagagttacagaaggccagggctggagcaatgacgtatgaaccaagaaccagataccacttgagcggtggaaagatcattggcataaccgccgttgatattgcaaccaacgctacgtaccccgaagctgcgaaccaagtaggtatcccatcttttaggaatatcccatcccttcttttttgctccagttgtagcttagagctctctgcatctgttgggcacaaatataaaaaaaacaattaatgtccagctaaaacaataggttcttcacaccatgcataccattttcaattgttaaaattagaaagaaaaaaaaaacataattacacttcaagaagcttagaagatataattgtcaaaataggcaaaacaagaaaatgcattagcaaaaaaagtagagatgcatcactgaatcagaagctaactgttcttaagcaattacaatttacaattggttttaggataggtacagagctttttctttggctgataagctcaaacaaacaaccaaaacagattaaacatccaacagactgaacctttaatattttgattcacgcaaatcttttcatttattggtgaagaaactaaaaataacagtaacagtgagagccaaacatgccataactcgccttttatcttagcagatgcctcaaaaacgatatatggtaggccaaatataataaaaattgatgaggatttaaatttcagtggtgtggtacatgactagcacatattcctaaactgttggtggaatactggaaaacatattagaaaattacgacagtaaactctcacctacggctgcatctacaacaacaggaagattgctctgtctggagcttgcattgcacatttccttcatagtaatggctataatcttgaccaaattgtagattccatcccccagaataagagaaatagcaataaagacctaagaagagagaaaaaaacaggtataaaaacagttgtcttaagaatgcaatagagacagataattcattcggtatgtaatacagatctcatcaaatatgtgtttaacattattcaatttacttgcagtttgaagcacacatatcaagatggatattatgaccagcccaaaagcttattaaacataaatataaattcataataatctaattcgattgaagaaatacagccaatatatttcaaatagaaatcatttaagaaaaaagtaccttatatccataaagacctttgaaatcattgctaccaagatctgatggataccagtccccagcatgttgagatatgaatggccagaggagaccccatgatatgatagccccaaagagaactgagcagttgactatgtgagggcaaataagaccacatccaacataagttggactaaagtcaaaataaaacctacatgaagtatattatgtaaaatattagcaacatagcaatatagtatggatatatagtgaaatttcaagcatttacacgtacatggatatcaatgagaagataaataaacggtaatggatagccataagtcatattatcaaacatcatttatttaacatgcagaaatcctaaaccagatcatcttaaatttagtttggcattgaatgtatttggatatataatatgaactccaaggcagcattccccaatttcaaatcaccaactactagtgtcacactactaacagctgctgtttctaaacacaggagatatcatcttttcttcatctttttcgtttgatctaaggtagcgcaagagccttacgtgttcttaaatagtgtcaatccaagggtaggaaaattgtcaaatccacatgaatctccaatcccgctgaagaaccacttaaagcagctccataccaaacttatgcttaaatatttcccaagacaacgaacttgcttcctgtaaaaagaaaataaaaagtcatatacaaattgttattttttatttttttcttcacaattatgaagtttccatgtccataacacgcataagctagactaagtgaaaaacaacatggagcaggagcaccaatgggaatgcataacaaatgtcaacagttacaaaacaccattattcaacaatacatactcttatttgaaagttcatctttagttcttaccctgcaagttctgctccagtgtttgtatgaaagctattgatcaacatagctgttgcagttccactagggtatgtaagcttgtaatccatcaccataaccttgaattacatgcaaaaacatgtgtgaaatccagtgaagaatcaaagtcaatagatagttaccaaggaagttaatgcaataagcattatccaaatacattatactgttcaaaactttctatgctcacttaattatactattcaaaagttaatctatatctatacaaatggttgaaaaatacatagtttataaatatttcttaaatgagcaatctgaaagcctagattgatgagtgaatgcattagattattaacaagtccaacaggtcaaattgactgtaaaacaatcaaattcaactataaaaataagtatttttaaagttttaaccgaaatcccatatcatcatggtttgaataaaacggtctgtgatatgtataactcaaagacccaaattcaataaagggcatgatgttgcggaattcaacaggtcaaagaaaaaccacacaaaagcagaactgactgtaaaacaatcaaattcaactaaaaaaacattacttttcaacttttaagtattaactgagaacacagatcatcctgtgaataaaaattacatttttataagtcaatggtccgatttcgaaaaagttaatgatgttgattgttgacatattaaaaaaataatatgcaatctttacctttcgaagtggaacaagctaaaaaaaccaagaaagctaacgataaataagacccagtcatccaacccaatcctgggttatacatcttcagctctatttcccggataatcaggtccaataagattataagtttctcattcatagcaataagatacgacccaaaaccccctg

SEQ ID NO: 189217 - DNA, 582 bp, Cannabis indica
ttgctcaaaggaagaattaagaataatctctacatgctttcctaaatccccttctctacctcaaacacaaagcttcaatgtcatcttgccactgcctcaccaaaagagtttgccacttcattttctagtgttttaaattgtaataaagttgttttatcagctaataatattgaactatatttgtaattaataaagaaatttgttctactgatccttaaagtttttacgtgtaaatttaattgatgttaatacttggcactccaaattgtgtcatccagcaccaaaaactctaaccaaaatactgtataagattaatattctatgaaacttaaaataattaaaattttttgaggcttgtaaaatgggcaaaagtcacaaattatcctatccaatctctgagtttagagcctcttagcccctaaaattactccacatagacttgtgggagccttcccatttttcatctttagaaggcgataggtattacattatctctattgatgactttagtatatttagtatatttacatgaatattattcccactcaatctaaagtcacaagcctaacccatttttcttga

SEQ ID NO: 189218 - DNA, 1688 bp, Cannabis indica
aaaagtgaggtttgacgaaaacattgaccactcggagtaggtttcatattcattcacaggttgaaacatgaaatgtcacacaaatcaatgtcaagggtccaatgaggggttagggtttgtagggtttgattcatgtgggttaggcagggaatgtatgggtctctttgtttgggtgttttgaacaagccaaactcacctcacatgttttttggactattataattttaatctaaactaagatttgaatcattattagtttcagttatagccacaattttagttttgttgaaaggattacatggtctttttcctttgtaagaaacatttattttggtcaaccgaactcttgaatgtctatgatgtcctactaaaacaagtggaaatattgtttgttagtcattttatgcttgtacattttccatcacctaaacatatattctttaattataccattcatgtctattatttataatatatttaaaacagtcctcaacctattttgaatttcttaatgctagtagtaaattttagtttatattgatcaacgtgacattcacttgaggttttattgtcataaatgataatcttcaggccggagcacaaaatatatttcgagagagactcagtgagctaacatgtatgaaccaagaaaagattagttaaaatcagccttagaaagcacacaaagctaaaaaacacaagaaaatttgatctaaaagggcaatcattagatagggaattagtaactctggccagctagattgctttctccattgctaatttgagtgtaagctcagcctccaaatcatgagcttcaagaagagtctgaatagcagtagaattggcatgataataaggaacaataacttcaatgccatccttaccatttttgaaaggttcttctgtattgatctgtcaaaatgtcaatatgctaagcttttgaatgtatagttattattataatttattcatattctacaacacaactcatcaactaaatactatcatttcttaaagttaaaggggctggaaatatttatatatataaaaaaaatggggggcttggaaattttttttggtgtatgtttttttgacatggttatggggcacataaatttttcagaagtgttcaacatatttgatgtggatgcttcatttatgactgcagtaagttagtccaagttcaaaaaggtagaatacaaaaatttattgctacccacccacgcacttaaaaagtaagaatagtgttcaaattgacctcaatggcagtggttgttgagaaaaattgaatgttcataatttcctgacaggaaaacgacaacttattattgacagtgagtgcctaactttcctaacgacatgtcgttcttaacgcactaaatggaaatggactaaccaagtatgatttgtttgttcccacatgttaaataaattctgcaaacgacatgtcgtctttattcttaactactactagcataaaaagtattattctatttttacgacacattcagacataataaaacaggataaacttaaaagcttgtacagctttctcataatattgtattcctctaatcttattataagaatggtgtacagaccaaacgtaaaaagaacattaaaaaataaaataaaaaaatcctaggagaaacaaaattttcagaatacaaaagcctctctctctctct

SEQ ID NO: 189219 - DNA, 2417 bp, Cannabis indica
taaggaaaggccacgagatatattattaaccaagcatggttttggaccatgaaattcaaacactacactttcaaattggcaacgaagcctatatagtcctactcctacgtgatatgctgcgttgtttagtgctactttataactaaataccactttctagagtttcagcttctatactaagaagatttagcaaagccctcatcttgaaatagcttttaacatacttaattgaacaaaacgaaacttaaaacgagtacaattcaagtacatagcagatataatcaaccaccagccattttcaaattcaatttcaaaagttccaaacacattcaacacgggaaagaattggccataccttgccaagctttgcaaggtctgtagagacagtatccaaagcaacactaccatcggtccattttcgttcatgaacggtaataggcaaagctgcattgtttgtcatatcctgaacaagacaatcttcaggtgagctagattttgttttctcctgggttgctgtatcatcattacatgatttacggctactcgcatcgcttaaacgtcttgatatggcagcctgaaatatccataactaaacttttagaagagggaaaaccgaacaatcttagactattattgtgtatatcaaagaatttacctgagtccgccaaattgcttgaagatccggtttgttttttaaaaatcctctctcttttggctccatcggagttaccacggctggtggctcatcccagcctttcctgccagtctttgcagatccaactaaggcctccgaaaccttagaaatcccggcagcaatagtcgccattcttttctttccagaagaatctgcagcacccgccaccatcggtgagaccttaacgccggacaaccttctgcctggcgaaagcgaagcccttcttgccgctggcgaggctggtctacgcccattaggtgacggctgtctatacctcgatgggactatgatagccggctccttggaaaccttcctattctcctcacgcgccatcatcaagctaggaacaacgcatttcgacggagccggagacgatgaccgcttcaactttccggctggagatggctctctctcaaacacaggagtactcttcttcccaaccgataccgatctcttagccgtggccggagacgaaaacctggaagacctttcagaaaccttagaatcctctgaattcccaactggtatattgtctcgaggcgcaagaggctgcctggatctagccttttctggtttcgcctcaatcttaaattccttactctcgctccgtgtttccaagggcttctttcctgacaagaacaaagaaattgggtcaaccgattggtcagaatcggagaccggctgaatcacaaaatcacgcttggaagccgagattctagcgattagtgtttcaggagttccaacaaacttatggcggccggcgattgggcgtatcccacttactcgaggaacaggtgtgtcgaactcgaatcggtcgacatagacgaactggccgagctgtaacctgttgttgaggataagatcgacgtcgcggtcggagagagagacgtaggtggagttgagggagtcggaaagctgaacaaagaagccttggttgggagagagatcggagccagcgagggcagggacgatcccgacgacttggagaagagcggagcggtggtctccggtgactcggttggtagagttcatggactgaagaagccttagaagaatgccctgagttagggtagccatggctgaaccgaggggattgagagagagagaggattatggaggtgaagatatgggggaagaagaagaagtgaaaataaggggtttgagttttggccgttatgggatttcaaattcaaaatggcggaagaactagaagagattcttttgccttgaatacagcctccacgttaccgttacgttatcaggattaacggtaagaagcaagattggagtaaatgtacttcattgcacggtaagatttttaaatgtccacttatatctcaacatctggcacacttttttttaaaacaaaaaataacagaagaaagctatgtagggatgaatagagaagatgaaaacttctctaatatacttgatgtgtccattcattctacttagaagtttttgagaaaggtttaatccgagcctttcttgtgaagtccaattctttaggctctcgaacatgtcttggataagagtccaattctttaggctctggaacatgtcttgaataagagtattaggaatgcctttactaggatgactcaattcataatcatacaatttcgacatatttattataataattatcattcggaattgtttgaaaccatgaaagttgcaattttatccgactaatatggcattgttaacaaaaaaaaaaaaa

SEQ ID NO: 189220 - DNA, 6108 bp, Cannabis indica
ttattattattattatatttaacctcaaaaatattaaaataataatttattaaataaaataaaaaataattcccaaaattctgccgggttaactccatccaaccctgttgcctgcttcgaagcagacaacgaaagggacggcaactaacggtaacgattcttcaactaacggcaccgttaaactctctttccggcacacatttctatgcgccgttatattactaaatagaatctcccaacatattcattccgtcactgtacaaaccaaacggcaccgtttggtttcagttcttattattaatattaaacccttctctcttctaactcgggttaaaatattaaccgtggttaggtaaggttcgtacaaattagaacagcaaagaccagaagacacagcagagagcgtcagaagaagaagaagttgaagcaacgaagacgcgtgtgtgaatataataaccacgcgcccaaactggttttgagctctgaacaaatctctctctactgtaaaggcgattcttttagtgagagaaagtggttttgtagacgaagaagacgaagaagaagaggaagaaagattgagagttttgtaacggttttttttttggatttgagcggttttcgatctttggtttttgggtgatcgttcgttactagggtttttgagaactgggaatcgaaaagtttggtttttggggagttttgagtcattaatggtggttagaagttgtacgtgtatatattgagaaaagtaaggtttttgagcttgtattgactgttgagttgactttggcttgggtatagagctatatacaatgatgtcgaatcgaggagtagcagggtcgttttcgcagcctaatgttgcggctgaaggtaacaaaagaacagagataatatcaagtttgtatttttaatattaataatagtaataattttctgtcttcttttttctttcagtgtttgtttgatttttcctggaaaattttgagaaatgaaacaaaaaaaaaattaatggttttttttttagggtaggtgatgatttgtatccggagctatggaaggcttgtgctggtccacttgtggatgttcctcaaaatggagagagagttttttattttcctcaagggcatatggaacaagtaagtttctttcatctttttatttccagatcggttttggaattttatactgttcaagggtattgatttgtttatggtaattgttgtgtttttgtttgtagttagaagcatctacaaatcaggagttgaatcaaaggattccactgtttaatcttcctccgaagattctttgtcgtgtgcttaatgttcagctaatggtattatctcgatcttgttatgaagaaatgatgaaattaattattgtgcaaattgtggatctttaaagggtttatcttgaatttttgtatttacataggcagaacaagaaacagatgaggtttatgctcaaattaccttagtaccggaatcaaatgtaagtgttcatacaacattgtgttatgattttaatgactttgtattttcttgttctcaaactcaattttttattgaataatctctagcaaatggaacctactagccctgatccttgcattcctgagcctcaaagaccaacagctcatacattctgcaaggtcttaactgcatctgataccagtactcatggtggcttttcggttttaaggaaacatgctactgagtgtcttcctcaactggatatgacacagtcaaccccaacacaggagttggtagccaaggatcttcatggttatgagtggcggtttaagcatattttcagaggtgaaaaactctatctttttggctctatagttaataattcattcatagtatgggaaaccattgatagatcggtcatgtttgttcatttttgtttgagcaggtcagccaaggaggcacttgcttacaacagggtggagtacctttgtcacttctaagagattagttgctggagattcctttgtatttctaaggtgtgttcttttctttctttgtaatcatcatatagtgttggaatataaaagtttcatatggcacttggatcttgaatctgctgttaaccattgtaattgtttgaaatttagaggggagagtggtgagttacgcgttggtgtgagacgtcatgctcggcaaccaagtagcatgccttcatctgttatttcaagtcagagtatgcatttaggagtgcttgctactgcatctcatgctgtttcaacccaaactctctttgttgtttattacaaaccaaggtataatataatcatatcgtatttcatcttcgaccttttgtattggtgctaaatcttttcgggttaattttttaggacaagccagttcattatcagcttaaataagtatttggaggctgtaaacaataagtatgctgtcggtatgagattcaagatgaggtttgagggagaagattcccctgaaagaaggtagcaaaaccatttccatggatttaacataacttcaaactctttttttttgtctttagtgctctaatatgcttatcttacctgctttctttgacaggttttcgggaacaatagttggcgttgatgatatatgtcctcagtgggtcgattctaattggcgttcactaaaggtagttagctctcatcgaatctttattttggactcttttatcgtatttgttctttattctcaaatgacatgaatccttttgttacctcaggttcagtgggatgaagctgcatcgatacatagacctgatagagtgtcgccttgggaaatagagccttctgcacccgggagtttagctcaaccagcacccgtggttaagaacaagaggcctcgaccaattaacgataacatgtctcttgatacttcaaattctaccacatcagcagtctggaattatggaatgactcaatcccacgatacaacgcaactaagtgtagctcctgaagccaacaaaagaaatgaaaatcactccttttggcgtcatcggcagcaagatggctggatctcctctccccatcaaactggttctcatatttttcaggacacaaccgaagacagtaaaagtatatcgataagccctttattttcaaaacaaaacaatgaccagacctctgatcaatgtgataaagggaggaaaaccgaaacgaatagtagttttagattgttcggtgttgaggtgactgatcattcaaccaattcctcaaccatcaccgacgggctagttagtaccgttttggttactgactcagagcaaaaatccgaactttcaaaggcttctaaagaaatgataactgagcaattgcaatcatcatcgaaagagtcccaaaccaaacagagctcctctacttcatccaggagtcgtaccaaggtactgaaatcaaatgcctatagagattttatgttctatcaaagcctgttttctaaatgtagacttgtttttcgataaaaaaggttcaaatgcaaggcgttgctgttggtcgagcagtggatttgtccacgctcgaaggatatagccagctgatagatgaactcgaagagatgtttgacatcaaggggcaattacgccctcgtaacaagtgggaaattgtctttactgatgatgaaggggatatgatgcttcttggagatgatctatggcagtaagtttctctattctatataagaatcgttacgaattgtttactatgtttgatcttatatcatcgatttcggtgtcaatgcagggaattctgtgctattgtaagaagaatctttatatgttcaagccaagacgtgaagaagatgaaatcggggagcaaacttccaatgttgtcttcactagaaggagaaacgacagtgataagctcggaatcagcagaaaattgacctttttctttgtttggtaagagattatgtttcgtgtaattgtttttcgtttgtggagaagaagaagaagaagaataagagggcgtttcggtaatttgatttgctggatttttagagctaacttagaagattgacttggttttaagagtgagttgggagaagaagaagtagatgatgatgatgatggtaggattagaaaactgtgtatatttaagaaaatatggcttttggtaaaagggctgaaatttgaggtttgtttggttggttggttggtggggaggtgttctttttttttttttaattttattttaattttaatgtaaatattttggtgtttccatattttagtgaatgggttttgtgcaatcttttgttgcttttatctaaaatggtttttgcaaataattgttgggatttcttgtcttctcatctcctaacaccaaaatcaatgagattccattttttgtttttcttctgcatcatcattgagtggggagaataattttagagagctttggattccactctctctctatatatatataaatgtatacaattgtatgacattgacatgtactatgaatctgaaacaatgcaacactattagagttagtcccacattaacatcacattgttaatgtgtgaaaataataagttacttttctcatagctaattggttttgaaatggaatctcattatcttatcccaaattctaacaaactctctcattatttggtttaggaaaaaaagaagaagctagatacactaaaaattaatgaggataaaaaattgttcattttgatataaaatttcattaccatttcttttttggtaaaattgatttgaaaaggtatcaccaaacttgattattaaacaagcatagctctaaagccatggcaagccaaatcatgaacctcaataatattgttgatatcaccaaatcatgaacatgacacaaaagtgtcatcagaaatttagacaaaaactataatactataatatcaaaatgttaaaagacccaagatcatataatttaatataataatttttttgtgtaagattatacgtgtatagaaggtgttaaatattattggtattcaataataatgctttaaaaataaatagtacactcatgttagcatacacatttctcatgtacatgcaaatcaaaaaacctttattgtgaagggatctttttaacccattttattaccaaatcttttgttttgaatgttcatagcaaaattctagaagtcatggaatattctcattagcccatttcacacttattttctttcttttttccatgtagctagtcaacttctcatttattggtttttgataacaaattccaccctaaaagaaggagcttttcaaaggttgcaactcattgacttataatttttttttttttttttggtttcatcataaaatacaccaatatatgtatattaaataggattagaaccatgaagtaatgaatgacttaccttcacgtaacaacaatcctatgattgtcccatataaagagactacaaattcaatgtgttcctctcaaccctaattatattcaatcaactcttaattaattattaagtggttgagcaataagcaaccaattgggtcattttcattaattaaaaaaaaatgccaaatagaataaaagagataatctcttattataatattctcattgcatattctattggtcatcatttgcaataataccatcttaattttaaagttgttccatctaaaccaagctttattatatatatttagaaaatttacaaaaaatagtatttttggcaaaattttaatatttttacagttaaataattttttttatattatcacaaaatctttttttttaaaattttacggttttatttaattataattttatggttttatttaattataattttatggtattctataaaaacaacatgaaaatatcaagcaaataatataaaaacaacatatttattaataacaataataaaaaaaacaacacaaaacatgaaaacatcaatagtccatattttttgtaaataaaaacttataaactgtaaaatagtttaaaattctttacgactatatttttgtatttttttctttgacttttttcagtatttatcaaaatattcctatttttttggtttattaattagtggtgtcttcacactccaatccaatccaatactatttttttttcttttt

SEQ ID NO: 189221 - DNA, 1482 bp, Cannabis indica
gaggtaacattttttactcatcaaattctattttgggtttgctattgttctaatatttgaatcaaatataggagcatccatacttgaacagaccatggtacaagttacatccatgtgggacgagtgagtggatgaagctgctttttcaaagtgacacgtgtgtagctaaacatggtgtatcaattgaactatatctgttttcatggctatcggtagttggccaagtatttggtcttagaatcccacctgaactgtttaatcatcaacatcaattgtgattaaaacattagagtgaaataacctaaaaatgaatctattctttctcatgcttgtattgaagtatctatttctttagtgaattccaagaaataattgcattgcattcatattttgtaaataatgttaaaaactaaatgtgaaaatacagttgtgttagaaatcattctgcattttgctgagttgttctaataaaatgaaccagaaactctgtattgccctctgcacctttaagaggagactcgatccaccctttgctggaaaatccattgttttctactcctttgataatcttatcaagaacctatacaacaataccccaaatttgagtcaaaatccatctgtttcaacatttaaaaatagataatgaaacaagagaaatgttcccaccaacaacaaagtgagtccttaacatgaattaaatggggaagaaagaatctaagaataggttacaaatttgaaaatggcgacgatttttatatctcaaatgcatataaataaatgttactctaaaaaatatatataagaatagatgcacaatatataagaagtgcatacctcttgatgaacaagtggatcttttacaatcccaccttttcctacctacaaaatgtatagaaatagtttggaattcaattaaaatagaagtagttttctcttttaggagaagaaacatatttctcttattcataaataactcattgcccttaaacttcttagttttctttttgaaaaaaaattacaagcaaaagaaaagtgtaaatattttgcagaatagttgtaaattgaaaagtggagtcacaataaattctcttgcctgtgatctattggcttcaaattgaggttttaccaaagtcactaaactcgcctcttccttcatcacattaagtacagcaggcataacctgattccaaaatatgagaaaaaaaaactcagacaagtataaaaaggtaatcacaacacagtttcagtgaaaaaaaaaaagtgagacttaaatctaccaacataaagaaatcagaccttcatcagtatttgaaatcttaccaggagaatagagatgaatgagaggtctagagtcaccaaatcaaccttctggggaagttcagaaaggtatcgtaaatttgttctttctattacacaaacacgttcatcttttcgaattttgtctgctacctaaggatttaaggaaaagatcatctgtttata

SEQ ID NO: 189222 - DNA, 1518 bp, Cannabis indica
aaaaaaaagtgagacttaaatctaccaacataaagaaatcagaccttcatcagtatttgaaatcttaccaggagaatagagatgaatgagaggtctagagtcaccaaatcaaccttctggggaagttcagaaaggtatcgtaaatttgttctttctattacacaaacacgttcatcttttcgaattttgtctgctacctaaggatttaaggaaaagatcatctgtttataaacaacttggaaacactaaatgtaaataaagccatagtagatatgtggataaacaccatcactatgtgatgatatccacaaaatttattttataagagtcaatatctataccatattacctgtccataaccaacatcaaccccatagacaaatgacgcaccatactgaagtaaacagtcggtaaatcccccagtggacaacccagaatcaagagctactttaccagaaacatcaacacccagattttcaatggcagcttctaacttgtgtcctgctctgtaaaatataaagacaataaattaacattattagatttggtgctagtcttgtgtaattgcagaaatgggatttcaggtagcaaaactatgagaaggacgttacaagaagtaatcacctacatacatatttgggcacttcagcctttatctcaacaacagccttatcaggaataggtgttccagctttattgactaccttcccatccacaaatactttacctgcatcactacaagtgtcagccacaaagaccctaaatgcagaggaaactttcaacttaataaaactaatacttctttactcatggatgcaacatagaaatcccaaaacggtgccaaaagagagataacaaactaacaaagtatcaaaacataaggaattgtgtgtgtgtgtgtgtctggtctgactgcatatttttgtatacttttacggcttaccttgtaatatccaagactgtatgaaggttcggctgtattgttgaaacctttcaacacatatctcatcaagccttttcctcctgaaaaatttcattagcccacccaaacttagttatgataaaaaagagtgagtacaaagcaatattatacataggcttagatgggttcactacctaattgcaacacaggagactcagtagtcaaaaccaacttcccaaaactcacaaaatatccaaaaccttttaagaaagttactaattgtccatgttcaacttcattattaccatattataacacccagaaaaatgctcttcacaatatgaacgagttggacagaagaataaaaaaacttactttttaggacggtttgaatcttcgcaacagcaaagcttcttactggaatatgcatttgagctccgacccatctcactgaaaaaaaaatcaatctaattaatgcaaaaaatagaaaacttaccatacacgactccaaaaatccaagttgaaatcagctagaacacaaggtgtttgtgaaaatgcttaagagaatattagtaagtaaaagagtgtcaacaccg

SEQ ID NO: 189223 - DNA, 6062 bp, Cannabis indica
acgacataataactaaatgtgttacttgtgcggctcagttttcattctcttaatctcattctttatttaactcccattgtgtagagattagagagtgttaccgctaccataatttttaatttgaaatattagcagtataaataactaattatgtttatgtaactattacttaattttaaatttttcaagcataagtgaaaatctaattgtaacaaatattaaaagtggggtaacttgttacaccatttaaaagtaaaacttaggtatttaaagtatttcaattatacaaacaattatatacattacgtattaaaatatgatagacattatattctacaaaacaatattatattgttagaaattacagaaaacaaaaaaatataacttaaaatttatattgggtacacataaacttccaaacaaaaagatattttcaccttttttgatatttgtaggttttaatgagaaaaacttttagacacaaatcttaataatttgtactacgaaaaataaaaaattgttactaatacaaaataaatttggatcagcaaagagtgtcttgtgaattctagagagttgttatttttgtgttaaataagtatttttgaagtactttcactacaagaaaaaatatttacgataacactgaaaaaatgtaactaaatgtattttataacattttagcaactattaagacataaccaaaaaaaaattgtgtggagtactactactgagtggaaaatgctctccgtacaagtggaaaatgctctccgtacaagtggaattcaattttaatttgagagggaaaatgcagtttccgtacaggaatttcagtgaaacgattatcgttttacgtggaattccttttgatccacaaagtgatctagggtcttttcaatatcctgtatgtatctgtgagtatacgagtaagaagttattagtgggagagtgttattgcagctctgtttttactacatctttctctcttcattactgtgattgtgtgcatctcttgtttattctagtctggtattttggtgattttcattttgggtctcttgcttcgtcgatggagggccaaacggaagagtttcaagtggagttatgtggactagaggatttcaagatctccttagagtcgaacccagaactaggggtagaggctatagagaagtcggttgtggcgagactgtattcgaataagactgttttcaatggtcttctacgctcgattttggggagaaaatggaagctggctaagggatggaaactacaagaagtggggcctaatactttgatttttcagattgacaaaaaagcaggaggcggtgcagattaccaggaatggcccatggcttgtatgcgatggttttccagtgggtaagccaatgcttgaagatggaaagtggtcttctacagacctaaactcgactcctattttgggtaagggtgcatgagatgcctccaaggtactggactttaaaaaacgccaatgcgcttgctcagaaggttggttcagtgatttcgattgatcgactatggaggaatggattttcaacaaatgagtatgttcgatttcaagtgagtatccaactgaataaacctattatggtgggggttttcttacccatggaggagggagtaagtttatggtgttatttcaaatatgagaacatgccttgtgtttgttataagtgcggcgttgttggacacgatgaggtcaggtgcagaaataagaggaggatgattgcagatgattttaacaaaacggttccaatgtacgatctctggattcgtttgggctcccatgaaaaagattatttttcgaattacaaaatgtatgagcaagagagattaaatcgagaatggaggaatgttcatttccaggcggaggcgagacagaatctcgttcctggggaggaaaatttcaaactggctcttatcggtaccgagatacatatggaagcggtggttgtggtggctagaaggcaaagtgatgatcttaaggaggctagtaagagttctggtattgaagcagaggtgactacggaggaggaggttgtgtcgcctttggggcagttgctggagcaggggcataaaggtcattcgtcaccctacgtgcatgggaaggaagttgggacaggaggggaggtgttggcgcacaacgttcctgacagtgtcagtggtcccggtccttctctaaattcaaaagaaaagaataaagaaagtgatgaggtggataatcaccaggtggagcatcttgcaattgtcttcaaagctttattgggctcaaattctaaatcggtacataaacattctaggcccattcgctctaagaaagaaatttgtcttgtttctaagaatgggcctatgattgcaaaggggcctctgtggtcgggtaaaaagaggcgtctggactcaaatgatgtgggcctatcaattttgggctcatataacgaaattttggagcctcctgttaatagaaattttgtccaagaggctcaaaatctgatatggttactttgttgaactcgtctggggaccaagagataaatgaagatttctcgacaaaaagggatgtgatcagccctaatgaagtgaacaaaggcgcttaggaaataaaggggagttaaatgaacaaggaatagtaatattacgtctaattctcagatggaggaaaaggagattgaggatttttctgtggtcgaggaggcgggcctacacatgccccccaagcccccatgttagtcatcgcttggaactatcgtgggcttggcaaacctgtgacagtcaatgctctccgaagttttattcggagtgccaatcctgacgttatttttctaatggaaactaagaaaaataacgttggatatggaggatatttggcaaagcttgggttttaattaatggtgtggatgtctcttctgtaggctcctctggtgggcttgctttatttttggtaggcttggctgggatattcgggtagtgagaatggatgttaacaaaattatagttcagtttggcagagatagattctctccgaattggatcagttgttttacatacgctccaccatggcgagaatatagattagccttctggaatgatgttggtgagtttataggagctctgtcaaacccgtggttggttatgggggatttgaattctgtgctatttgcaaatgagaaaataggtggcaaagcaattactcgggcagaaggagaaggtctaaggaacttcattttcaatcatggtgctattgacttgattggtgttggggctcctttttacttggacttatggtcaagatgcggataaattaatcagggaacgccttgatcgggttattgtgtctccagattggataactcagttcaagaaagcaggggtcaaaaatcttgctatccgtcagtcagatcatgctcctattattcttgatacccgaatggagagagaatctttctttgctccattttgatatctagatgcttggagcagggataacgataaatgtagagttattgaaaacacttggaagtgcagagtggagggctttcatagtttcattctttgtcagaaactaaactttactgccaaagctttgagtgagtggaaccggttggtgtttagtcaatgtcaaacgaaaataaaggcgcttgaaaagcttcttagcgaggtgcaaaattgcccaccttcgaaggataatttagaacttgaaggtactatcatgctcgaattggatgaagtggagaactgcttagagtctatatggaaacaaaaatcatgagaaaattggcttaaagaaggagataagaattctcaatttttccatgcctctattgtggttaggcgtaaatgtaatcatatctgggccgtgaggcaggagaaaggaacaatggtcgaagatagagcgaacatagcgcacaactttcggtcaaactttcaatctttgtttcgttcaactagaccttgcgtggatgatgagctttcagagtatataacgaccagcatcactgaagcggataacgctagattgtgtctttgttcctcggaggatgaaattaagaaggtagtgtggtctttgccccctttgaagtcgtctggcccagacggtttcccaataaagttctttagacaatattgggacgttgttgggaaacaggtggtggattttgtcaaagaatttttccacaatggtaaattttgtggagaggtgaataagaccttcatcgttcatattccaaagaagccccatgcggattgttttgatgagtatagacctattagtctttgcaactctatatacaagatcgtgtctaagattctggcgaaccgtttgtgtggggttctgaaaaaattgatttctcctcatcaggcggcatttatcaaggggagaaatattgctaaaaatttcataattgcgaatgaaattgcccacgatatgaagcgaaaaagaggtggaaacacttttgtttggcattaaatgcgatatgtcataggcgtacgatcggctagagtggaatattctcttgaaggttcttaaggctttttgtttcaacagtcatttctgtcaaatgatcatgcactgtgtttcttctgtcagttttcaggtgctcctcaatgggggaataactaagaaattttttcctaaaagagatgtgagacaaagggatcctatatcgcctttgctctttattctctgtggggaggttctatcaagattattcctagctaaagaggaagaggggttgttgattggttatctctttagaactgattagtgttccaaaatgtcattttaatgatcttaaagtacaaaatgaattaagttttaattaatatatccatgaaattattgtgttatatttgtatattgaaaatatttgatttgaatttaatgtatgtcattttgtagaaaaaaaaaatgaagcatttttgacactttgacatatagataaaagagcaaagcaaagctgaaataaagaagaaaatttggcattttcgaagtctatttttctaaagtaactaaggcccgtttgtgcaagcccataaagaagagtcaagcccattgcattaaagtccagctaacactaaagtttggcattgagttgatgatattgaaaatgagtgaccaaatcctaaatcatcaattacttggttgattgtacgcaatgcgaggagcgcatcatgacaaattgacaaaaaaaggaatttgttcaatcaacttttgaatctcattttatttatattaaaggcaaattaatgagaatttcaattctaattaattagcctttcattttcatattgaggggttttgatttgattttggcctagttttggtttgtaaaaaacactatataaaggagacctcttgtacacatttggtgtgtaatttttcattggcaaaaactatagtaaattttagttttattttatctatctcttctcatattttcttttttagattattgtgagaatgactagcattttggctagtttcctagataaggtaaaggatgatcttatatgtgaggtaatatttatttgtgtcaacattcaccaagtgcttaaagtttatacatttgagtaatatattttcttctattttttttatctctatatcaatatatttatctatttaatattatataaaaatactcatgctttttttttatgtgaatataatagtataaatatattaatattataattttatgattaatctcttattacattattaccaaacaaaaggtatattgtcattcttagatttttcataagattattttctacaatcttaaggtgagaattttgtattactcaaatacattttttttaatatgtgttcttcaagttttatcttccgattaaattgttgggaagtgaataatttaattgtgttatatgtgtgaatcaaaatccaaataaatgagccaaacatataggtgattcttgaaaccttataatttttgttttataatttttcaccaattttatctactttaattttactattgatattttctcaaaaacccattgacttatttacttttaatacttaa

SEQ ID NO: 189224 - DNA, 1464 bp, Cannabis indica
aaattaaaaagtgaaaataatttgcctatcttttgcatccccatcttttgacttgatgccttttgatagaatttctcagtttcaaaaaaaaaaaattgattctcaattaaaaaattaaaaagtgaaaataattttatagaatatattttcaaaaaatattttcatttatctaattttataaacaaaaaataattaaaaaattattaccaaacgccacgttaattttaataaatgataaatgaaacataaaataaaaatgacattcgataatatatacataattttctaacaacttggacatgataatttgtcatcacctttttatttctgaaaattatgaatatatctagctttgattcacatggaaaatttcagcaattaatccatggaataagtacccaattcatcaactaatacacaatgatcataaaatattcacaatatgctaaaataaaataaaaaagacaagaagcccattccttcaaggagtcacaccatactaccttgtgcatttctttgtctagtctctctggcatagttcttagggtagtagtcatacaaactcttatgattacaaggaattaaaaaatatataagttctgctttctaagcttataatttttctctttctttcaataaaagaacatacaaaaatccatggattcaaaaaacatcaaaatgaatactagaagagaacctcatcatgaagccttctccctcgaccaaagtagctcaaagaggtacgtaccaaccaaccatttttaattgtttttcttaaataagaatgtgtgttgattttcttttagtgaaggtaaaagatctgacatggcttagtagaaaataccaagtccaactatgatgacttcatggagatatataatattttgtttgttatgagtgtgaagaaattattccatcttgtgatgatcctatgctgtagcattgctctagacactcacttctaccatgtgatcccacactgtcaatgctgtcattgcgcctaaacgagaagtgttcactctgatcagcagtaaaacttccattccttgatccctttgtgttgcttctcgttaaggattccatgttttcttttaggtcaaaagaaatactttcttcacttgattttctactgcttgaagcagaagaagaaacgcgattggatccgctgctgctgctgcttctgctgcgacttgatgatgatcttttgctgcttttgtaacttgaacaaacacttccctcatttgatccagagctgctttttgagcttgatgaagcacttcttgtgtgaggtgatctgtatgactgagagaattgttcaacttgtttaacagtttctttgccatgatctccacactcatcctcatattctgagctgtcattgtcttcactttctgaactctgatcaccattctcacgataatctgaattattagtctcgtgacccttttcattacatgttacctg

SEQ ID NO: 189225 - DNA, 3684 bp, Cannabis indica
ttaaacaaaccatatggttagttaattagtactaattaataatgggatttgacttagcttggatttggtagcaagtattatgcaaagttttttaatctcattcaaagcactacataatattttaatgtataatatattaaaaaaaaacacttacagaatagtacggagcagcagaaacgacatggatgggttgagttgattctttaggagaaagagcaaacaaagctgctaagtatagctgagaagagcctgtaccaaccacaacatggcgaccttcagtctcagcatttcccacaattttgtgaagccgtacaacttgtttggcaaactcaggctctaaaaaccaacaaatgctcttcaaatctgagaaatagctcatggaatcccatcccctgatcacaattgtggtcttctcaccaattttctcccaatagttttcatacattgtggggtcaccactgtaacaaaggaaaaacaaaaacgacattgaaaagtttccaaacgactcgctcgctcacatatatgatatattatatagtatatacaatgcaaacaaatgtcccaccctataacacatatagcaattaaagagaaaaaccaaaagaaagaaacgaaaggaatatataaaagaaaatctgacacaaggcatatggggttatttatctttgattaaattgcatggagatggaagtaggtatgggatgggaaaggaggatgggtccaaatcatatactctttttcccctataagggatcaatcatcaatgattagattgaaatgaaaaaatcttacacaagaggaaaggaaaggttctcaacatgtgttattagtaagtggtaaagagacctaaagaccttttgttcattcatatctttttaggacccactcaagtggtagatccagaccaccccaacttacttttcttttttatttaatacacaaccataaattagagattaaaaaagaatgaaaagattctagtattttagtttttacaacttattgtggaggggcggccaaaagtttttatttttttttggtttggacaacccataagagcacttcattagtctcttacatctttctaaaaagcttcttcttttttgttaaaagaaaccaaaaaaaaaaaacaatgggtttctattctcttgacaaaagcagcagaatttttttaaaaaaaattttttcctaaggtttctttactatagtgccttgtgctaacatgcaccatagccacttagagggatctccaactattgggcttgaaactgtcttctccaccattgtctttgaagctgagttttgactcaacaacacaatgattcttgtgttggtccaataatacgtcaatgagcactttccatagtggcaaagtttggagattttttaaaattaaaaaaaaaaaaaaatcaccattgtaacacactctgaacttggaaacagagaaatgacaaaagaaaaaaacaataaaacatagaattgggcttttccgaatttcgagttttaagccattatacaaccccaaggaccaaggacctgtcctctctctatctaatctatacccttataattattaacatttaataatacaattattatcatgaaaaatttatagtacacactctgcaaaatattgtttcaatatagatttttagtcaaatattttaacaccacatggaagttttcaaaaatttactttgtcaaaaataaatttaaataattatttacttcttatataataaaaataattgtgcgtgcaactaatatattacttgaaattgttgtcaattttttaaaaaattaacatattattgtaaaactgtttagggaaagtgtattgtagaattagagaaattaccataactgtagtgaaatgacattttaagaagtgtatagtggaattaccctatcattattactactataaatgcaacagagcctagaactgagtgaacgtaaccccattgcgcacgttaggagattcagtaaataccagaccaaatagagtcggcaaagcgaacactttaataacaacaataaataaatggtgactttacatacacattttcaactaaaatttcatattgacaccaagatggagattgctctataactttttaggacactcccttatcaattttttttatttctttttattttttttttacttcaactcaagagagagcatgcttgagttttcattttcaaaagccagtttgaaaataccaaaatacccctggttttagagtaaactgtaacccaaaaaaaaaaaagaaaaaacctgtgctctgttctgacgatgataacaccgaacgagctcatgtgaggtcatttgatacttccagagcaacttcaacgaagtatatatttatttattcaaattaaaaataataaaacgacaaaaaaatatatatttaagagtgagtaagtcaaacttactgatcaaggttgactagtttttccccgctatcttcaacttctgcaatactagttttggccgaagaagaaattgatgatgatgatgatgtagccaatagtgtcctctggctagcttcagtgtccgccattgaagaccctcttggctttatcagagaaaagccaaaaagagggccttgtctttcatcttcaaacacgaccctcatgatcaaactcacattcaaagcaagtgacagcacaagcaagtgcttcagtgagaaaaagcttggaattttagccatttttctcgagaaaaaataaaaataaaaaaacagagaagagagagaaagtaaacagtttgttttagatgaaaaaacactgttgagaggtgaagaaatgaagcagagaaggtcagattttataacgaaaattacatagatgagaacaaaaaagataaactatggaatgacagatgaacggctcaaatcaatgacatgcaaaaatgtttaaaggaagcgttacgagtcttaaaccttttttgaatattcagtcaaaccagaaaaagaaaactttaaatggaacaacatgacacgaacaacaaacgttacttaccacttcacttatattttatttttttcttcttttatttaggttcaatcttcagctaattgttttgtgttattgaatttgagctctaagactcttcttctattttgaaattcagcacaaaacttatttgggaaaatctagctaaaaaaaaaaaaactatgacattaattaggatgaaagctctgatttgaggttttgaagcaaaaacaataatagtaacacaaactttgattgactctaatcctaatgtaacaatacattttgtactattttataatcaaaaacaagaagaaaaaaaaaacatgcacagaaagaatgagagagagtggttggagtagaaacagagcacactctcagagcgagagagatacacctcctacatgggattttctcgggaaaaagataaatcccagtgagattatcccggaaaaacgctgttttccgatgctgtatctcgaaaacagaatagacccacttcttctatttagccgtaaatttaaagttccatgttatgttttataatataatataacacaatgatacaagaaaaatcgtgtaaatacaacactccattctatatctatatatctatatcaatataataaataaaagaaagctgctcaagctacatggtctgtctcctttattattttatttttt

SEQ ID NO: 189226 - DNA, 4672 bp, Cannabis indica
tgcatagtgaagtcaattcaagtccagcatagcaggtaggtttggttaaactaatggatggaaatggaaatggaagtatcactctctatagcctatattatatcttcatcatgatctgatcaacactactcttgctaaatcgatcgtttcataaatagaccatggatttttgtaagacttatttatgtttcactataattctaactattctacccttctcttcatgccgttcccttattaacaccatcaccccaaatcaagctctccaagacggtgaccttttgatctctacccgaaacatattcgcactcggattttttagccccagaaattctctaaaccgctacgtgggaatatggtaccatcaaattccagaacaaaccattgtttggatagctaatagagacgatcctctaaatgactcatctggagttttggccatcgatagtcgtggagggcttacttaaaaatcgaagctcttccttttggtcaacaaatgtttcgatctcagtaccaaataactccatggctaagcttttagatgtgggaaatcttgttttacttcgtaataacactgcacagagtcttttatggcagagctttgatcacccaacagataccatgctcccattcatgaaattgggttcgaatcgggttacagggttgaacaacatcttcacctcttggaagtcgatggatgacccgggaaccggaaactactcactgtggctcgacccgagtggatatccacaaattttcttgagccagggtcgaactccacgttggcgaggtgggtcttggaacggctatcgatggagcggtgtaccgcaaatgacgcaaacattcatattcaacgacacgtttgtgaataatgagaacgaagtatcgtaccaatccgatcttcgcaacgactcgattctcgctcgacaagtggttgatgaatcgggaattgtttacttatcaatgtggcggaatggacaatggctaaggtttttgtcggcgccgactgagacgtgcgatacgtacgggttttgtggcccgaacgggatatgcgacccggtcaacatggatggctttgagtgcgggtgcctacccgggtttgacccgaagtcacttaaaaattggttgcttagagatgggtcagacggttgtgtgagaaagctacagcttaatggcacgtgtgggaacggagaagggtttgtgaaacttgaaggcgtaaagataccagacacatcgaaggcacgtgtgaatttgagtttgagtttgaaattgtgtgaagaggagtgcttaagaaactgtacgtgtacagcttactctagtgcgactgtgagtggggacatgattgggtgtttgacatggcatggtgatttgatggacgcaaggacttaattctaattcgggtcaagatttttatttgcgagttgactccattactttaggtattattattttgacaaaaataaacttatttttatttttggaattttaatataatttgttgggatattaaaatttaatttttgtaaagaaaaagatatattttatatttataaattttaatgtttttcttttcttcaaacatcactttatatttcttcaaaaaaaaaaaaaaacattactttattatttgatattttttttttttgaatgctcactttatatttgatattgttacttatataaatgaaaatcttatagttattattttatttaagaagaaagccaagtaaagtatacattataaatatatatatatttttacttatgtcaaatttatttctattttttttccttgtagatttaataacctatatttttgttacttttaataaagcaaacacacgtttatgtttaatgttgctaatttttcttactataacatcgttataaatccttttgaagttaattgacagttattttttttattaataatattgcagctaaatatttaaagaagtccaaaagtatttccataaccaaaattgggaagctgggaattgggttgagttcttttgcgatgctagttctctttttaatttttatatactgctggcaaaagagacgatcaaaaggtaccactctgcctctatcttctttatatttctattatattatttatatcttttcttaatagtaaaaataaaataatatattatattttaaaataatataataacaaaaagataaattattgaaatcaacacaataaagtatatttagagtaaaaaataaaatgaatagacattttagtattcaaattatttgtataattcatacaaaaataaatttatattttgtgtcatttattatttatatgtttaatgacagtgcaagaacaacggaagaaatatgtttttacgaatccaaatatatattttgatgacatttctggaaaagatgagttcgatgaaaatgcaaattcagaattacctctttttgacttgaataccatagctacagccactaacaatttttccatagtaacaaacttggagaggtggtttggtcctgtttataaggtctaatatataatgatggtaatgttattcttaaacatatacattcacgtatggaaatacaactaataaattatttcagggtatgctttatgatggaaaaggaaattgcagtgaaaagattatcaaagaactctggccaaggaattgccgagtttaagaatgaagtattggtaattgcaaaacttcaacatagaaatcttgtgaggattctaggttgttgcgttgaaggagtagaaaagatgttaatctatgagtatttaccaaacaaaagcttggacgtcttcatatttggtatgtttgtttagtgtaattaaaagtttaagatcgtcgtagataattaaattatcatgacatcatattttacatgtatcaattctagctttatattattccccgcaagccttgttctttttataccaaatcattctcttaagaatattatttaaccataagaggttgtttgtttaaagattacgaatcacaatatatatgttcagtcttttgtatgtttgcttcaaattttaaggtgagaatattttggtatttttgtgggatccacatgctctttagtctctacaactttgtagacttaattccaaatgtaagggaatattccaccagggttcacatttcactcacactcaaatagtcaaaataaatgcccccagttaagaaataagtttaatgagcttttaaactaatattatttattattggccagataacgagaaaaggaaattgttagattggagaaaacgctttgatatcatttctggtgttgctcgagggttgatgtatcttcatcatgattcaagattgagaatcatccatagagatctaaaaaccagcaatgttcttctagatgctaatttgaatcccaaaatttcagattttggtatggctagaatatttggaggagatgaaattgaagtaaacacaaatcgagtagttggaacatagtaagtgtatatttttttaattaagaattattttatctctataatttaatataattatttacatatacatatttacattataataatcttacgtacacaagtattgttatagtggttatatgtctcctgagtatgcaatggaaggacgattttcaataaaatcagatgtatatagtttcggagttatgatacttgagattattactggcaaaaagaatactagctattatcataacaatttgcactccaatttggttgcgcatgtaagtggcaattaagtagttaattatttatgaaagttgccaataatatttacatccatatagtttctgctaagtattctcacatatttaaggtctaaacattataggtgtgggatttatggaaagaaggtagagccttggaaatgatggactcatccatagatgaagcattcggtggctcagcattgagatgcattacagttgggtttttgtgtgtacaagagtatgctattgatcgaccaaccatgtctgaagttgttttgatgttgagtaatgaagcaaatcttcctaatccaaaacaacctgcatttatattaaagagaaattctagtttaaacacaggtctatcaactagtgatggacttaactcaataaatgatgtaacatgtacggtggtagaagctcgttaaaagtttaggtgtattgatcgcatgtttataagacattaaaattatcagtgtataaataaattatttaattattttatgattatacgtaaattagtagaaaataagatcaattatctgaaataaacattagaagaataatttttcaatttcagagattttattgaattatagatgtgccatgcatattatttatgaattttgttattctcatgtattatgtccaagtgtagtgaaattccaagatttggtgattagtatcacttagatatggtatggtatcttagaattagcagagcaagattgtaaatagttaaaaatattggggtcatatggggtaattgattatgaccattttattctttgtttaatagtttgttcagaaactaagtaagggtattttaattttttttcacttttatttagttatgattaagttgaattattattgattatgttgattttatattaagtttttctttaaaaaagataagataaacatcacaaagtctctctctctctct

SEQ ID NO: 189227 - DNA, 1661 bp, Cannabis indica
tttttttttattttatttttccagggggttctagctgacgggcaagaactggctgtaaaaagattatcacaattttcagggcaaggtgtagaagagtttaagaatgaagttttgctgatagccaaacttcagcacagaaatcttgtaaggcttctaggttgctgtattcacaaagaagagaagatgttgatgtatgaatacatgtcaaacaaaagcttggacttggtattgtttggtatgctttctcttttgtctacataaaaagatcctttatccatagtactcaacaactctgacctcatttcttaccagaaattactttcataaattgatcaacagaataaaaacaaaaaatcattgttggattggagaaaacgttctcatgttatcataggaattgctcgaggccttttatatctacatcatgattcaagactcaaaatcatccatagagacttgaaagcaagcaatgttctacttgatactacaatgaaccccaaaatttcagattttggtatggctaggatgtttggagatgatcaaatagaagcaaatactactaaagtggttggaacatagtaagttctgttgttccatttcatgttccatacaaataaataatgtttttggaatttattcataaaagagaaaaaataagaagtgattgaacatagtaaaaatatatgattacgggtatgttaattctgtactgtttctcattctgtcatggcagtggttatatgtcaccagagtatgcaatggaaggcctgtactcaataaaatctgatgtcttcagttttggggttctgacattagagatcattactggcaagaagaacagccatttcaatgaagtttcctcccttaatttggttggccaagtaagtatatatctaaatgaatcacttgatgatgcatattccattagctctggtaattctcacaattatgcatgcaaaactgtacctttctttcagatctgggacttatggatagaaggaaaagttttggagattattgacgaatcattagctgagccatatccaagtgagcaagtcttgagatgcatccaaatcgggctgttatgcgttcaggagcttgctgtagatcgaccaaccatgttagaggttgtgttcatgctgggacatgagacccctcttcaatctcctaaaagacctgcatttattttcaaaaatacaggtagcgatacctcaacatcgaaaggagtttctgtaaatgacataactgttacagtgttagaagctcgctaaagtttcaagctttattcttgcaaagttttgacttgatctaataagcgttcagaatcttcatccttacatgcagcattgaattttgttttttatttgttgccttgtgctgctttctctgaattagaaatgtgtaatagaaagttttttttttttttagtattactagttgaatttgcgagatgagtttaaatcattatctaattgtccaataattttttttgtgctagatttgtaaatacatgttacacttattaaattcttcttgattataatgttcttatgctcaagttaaaataaagcaatttataataattaattatttagcttttacattttttttgaaacactaagtacaaaattgagttttagtaatattatttagtgactcac

SEQ ID NO: 189228 - DNA, 5061 bp, Cannabis indica
tttataattatttaaaacagttacatttattcaccaaaaatcttacatacgttagggtcggtccaagtagtttgggagtcttggcgaaaaattaaaattagatattttattaacaaataaatatttaacttaattttttttttaaaaaaaataggcaattagttttagaactatacgtgcattgggaccacaaattttgttatcaatttttttttttttttctgagtaattgcatgtttgctttggtgttatgaatatttattatatatacattatagaagtggcttaattctaattttataattttaaaatagtttgagaaggaatattgtactaagttatataattgcattttttaaaataaatatataattataatttcattcaataaaaagtatttaaataatatattaaaattgtggtggttctttcttctttgtaagcttgtgctaattaactcgtattgtatggtgtaacccttcaaactttgttgctatggattctgttgagggtaagaaaactacacaataatgtattgattcttttaaaaaaattggacctttaatataagtggttttgtgtaatagtttaagctgctcaatgcttgagccgaccatgacttacatttttatatttttttagattttttttaatttatcaattttcattcaaatatgagaaaattaaattctctcttatatattcaatgtttatcatacctattgagaaaattttaaatatattttcaacattgtaaactaattaaaatattttattgtaactataataaatattttaataataaaaaaatttatttcataatatttttggaatatgaatgttgagtaataggaggagtataataaagaaatgaacactcctcataaattatagtatagccttatcatatatgtttatagataagataagaagtattccatatatatatatatatattaattataaataaaataaacaaagaaggacaagaagaaaaataattaaagtattatatagtctcctatatctacttaatataattattttttccactcataacaaatagtaaaatttttggcctttatatgtttcatacaagggcctgttaaatttattttccaatcatagtgcttacatttgatacacttttgatcatccctataacaatcatatatgttgaaaaaatagtagatatcactattaggccatttaaagctacaatggaaaagagtggtgcatgagagatttggatgaaatactatctcgtacgagctattgaaagggaccacgtggatgcccagatcatcgtcttctgacctgcagtgaacagtcaaatcacctccatcaggagaatcctgaccgttgatcatcgatacatgcgtctttggttgaaaataccatcctttcacatttgttattttgcaccataaaaacaaaaggcatataacaagccctaatggagtagaactactcatattgtatttgagagttttggtttggaattaggtttacaagtttttgtgcttaattcttttggcctatgttgatttatatacacatttagttagttgtatatagtgagtagtgacttatctagactatattattatattatatatagtatgcatttgagtcatctggatagaattgtattcaatgtgctcaaccaaggactataatacattagttaaatatagaaatttattaataaatataaaaagcgttacatttttttggggcataatgtatttattttcttgaaattaccacattcaaatatcagttttttttacagttttttttactttttatggtttttgtgccatttattatggcttgtccctatttgtttaaggtaattttgtggtataatcaatgcataagaaaattaatccattttatgctcataatttctacttcaatgattttttttacttttaacagataagtatttcaagtctttttaagtcttttctttaatatatggattgatttactattgttttttcactttatattttttttttttcattatatcgtgtagtaatagagtattttttgttattttgtaggttgttttgtagagggtctacaattacataaattttaccgataaatttaagtttaaatttaatctgattgtttttattttcagcagttttaaatagggtgctggtaggttgtcaattactatagccaaaggataatacctttggctagtcatactttgaaattttgttggttttttgtttttaagtaattttgagttagtattatggtttgtgtgtcaaattctaagtttatagattaattgttattttaaaaattgtcattctaatataattgtattttttgatttggtgttgtgatatttttttagtttcgctagctttgataacaactattactaatggaaaagtatttttcaatgtgatggcggggtgctatttgaaaacgttatatagctttattgtctaaattttcgggggcagttttgtcccatgtagctcgcgataagatttctgtacgtagctcatagtttagcaaaacatgctcttcggttagacaataagttatcctagttcgaggagattccactgccgactgtgattaattgtgactttgttcaccacgtcaaaaattatatcagattttttgaaaatacattcaatatagattaaaaaaattatatattacacaatttatttaccaaacacttaatatatattattcacataataatatatattgtaacattttaatttacatattatatcattaaatgatataacacaataaaactaaaaggcatatatacaataaaatgttggagttgtccttgtgctttgtgtgtgaagagaaggtttaagccttaagggatgatgactaaggtataaaactcctcatatttgagagttttgtagtcattattggaattagctagggtttacaagtttgtagtgctaaatatataaaaaggaaaatttacacacctagctacaatatttataacaagttttaatatttaataacttaactaacaagttttcaaattttaattaccatatgtattattatgtccaatgataatatcattataatattaatgatgttggtacaatataccaaaaagataaaagaataaagatcggtaatggatgaatcccaaacactataatccaactaaaaatataaaaactaaaagaatatcactgtgatgatcatatacccaacaatattgattgtaaccaaaataagtaaataacaacaagagcaaattaataataggattattgttattattattatgaataataattattaaagagataatcattaaattatcatcatctagaacaatattttggagctatataaatagtagtttccaatatatatataatattactttttccaatcataacaaaaagcaaattttttggtctcattattttgcatacaagggcttgtagagttgattttccaaatgtagtgcttgcacttgttgcatttcttgttatctcttagacaatcatatatgtcgaataaatggtcgatcttaccgctgggccatgtaaagctacagtggaagagtgtggtgcattctaaattcggatggaatactatctcgtacgagctattgaaaggaacgacgtggatcccaagatcatcgtcctttgatttgcaatgaatggtcagatcgcttcgatcagactccagatcgttgatcatcactacatgcgttttcggttgaaaataccatcctctcacatttgtggttttgcatgataaaaacaaaaggcatgcaacaagcactagttggagaattaggtttaagggtgtagaactactcatatttgagagttatattttgtagtgcttattggaattattaggtttacaagtttttgtggttaattctattgttctatgtttgtttatatatacacacatttagttagtagtgattgatgatttatggaaagaatatatgttgactagaatatacttaaattagtaatgtatttaattttcctttgaacaaacaaatctacatagatatttatattttacatatgacttttttctaacaacatgactcgtatgtggatatatggaattgtattcattgtgttcaaaatagaggaccatatgtgtattgactttgaataaattatattaatatagaaattgattaatacgaaaaaacattattatttattttttttttaaaaaaaaaagaataagggtatgttattacattataacaatatttttttacaaaatgagatttaagtttattttccaaaaaaagaataaggatattgtctttcgaaaaaattaaagtgaatatatgtttatagcatgtatatagcatttgtacattcaagtgcgctttttgacaccacacgaaaacatgatgcaaaaaaaagagataattattaaaaagatcatgattatcatcatcatcacgaaccataatttacatggtgaataatataattaatttcctatatgtaataataaagtttttgacggctaaaatcttgttaattgtcgtttcacttgcatttaactttttaagctcaaattttaatagtaaaattttccgaactattgaactggtagcaaatttaaaatatcattggcgtcacttaagttaataaatagattaaaataacaataatagaataagaacatatattattataaataacaagattaatacaaaagaatgatttaaaaatcgaacaaaaattaacataaataacataaagaataggttaaaaataacccatttaattctatgaaagatttgccatagctatccaaaaaatatgtaccctctaagcttgattactataatggcttatatcatggaaaacgatttgagagacttcaaaccttgaaaatgtctaagattagcaaaattccagaataaatcttagagaaatgtgacagtcagtagtcctgtgatccgtaaggagaaataccgggtaagctgtgcaatcccacatagcctggagaatgtcaagtgtcactactacaaaattagctttt

SEQ ID NO: 189229 - DNA, 2152 bp, Cannabis indica
atataatttttaattattttaaaaccgcgctttactagttttcaataatttgaagaaaaaaaaaacttactatgctggagagcttagcttatcattaatactgaatatttttaatttacattcccattggaattatggatttctgaagtcttgggttgagaataggtaggggtataaaatgaaggtaagaaaacaacaaaactagcaagtacaaatattggaagttaagtgcgaactcttaactttattcatttctagctttcgagccctggcttgggtgaggacagttcttgcccagtcagcgaagtaggtctcgttgtgaccaacaaggccttctttgtaaaatttgaagcactctcgattgttatttggatgagggcattccttttcacccaatgaatcccaccaggagcctgcgtggttcatcccggacatgtctgccatccagtgatgcgcgtactgtccaacaccagccatctctaaccatcccttggggaagaactccattacactgctgttcctgtccatgaacagcatgtttgtcaactgtgctccatgtggtgacaccacaatgtcggtattgctcatcactttcacctgaatccatcaaaacaaatatgctactctgaagaaaatgtacaagttaagacccaacccaccaacatagaaggaaacaaatacctgatcacagaagctcaattcatcagattgggacacctccaaaacgcatccctgaaccatggcacactccctaacaaaaacagtaatcacagccgttggatccttgaatgatctcgaaccttttctcatcaacaaagtcaaccgtacgacaggctgtcctattctgttaacctctaaccccctgccaccatggctaacaccacaaaacgatctggctttgcatctcaataagtcaaacacctcaagcttcctctttttacccattttaccagcattgtgtctcatcacaacagccttctcaaagcaatgcaccccatctcctcctcctccctctggaaagctttcaactacaacttctccgaaattggcctgagttatgttatgaacccaactgcccattctgtgcctaaactcaccccagtggaacaaaatccatctcgttggctttgagcagtcattctttaaggaccacccaacaaaaggagctattgcattcactccatgccagagattttcatagttgtagtatgtatcagagacaaaagtcaaaccctttaagagtgttgccgagtcaggaagactttctggccatgccagggcgtatgaattcttaccaccatctcttctgtcgtttcctttgatacacagaagtcttccctttgatgactctgaagggaaaaacaggtgttctgcttcgccctcctcttgagtgtcgtttaaggagctcatgaaccaagtgttccctatggtggcggtttcgacataccttagatcctttagtggatggaatgtgaccgagtctcggagcttcgacattagaactttgtcattagaagaaaagaaagtggaagaagattgcattcgtagtagtatgagaattgtgataactgaaaatatggaaatgatgagtttggttgagggacgtgcaatactactactctttcttttgctaagtgctctggatttggggctgctttggatttccatagtttgactttttgatcataggttgagccttgaggccagaaaaaacaagtggttaagtaaatacgaaatttgcgcaaacagaattcacctcgagattgaggcttaattagaacctctactacagagactgctgctaataaacaattaaatggtgtctgtctcttgttttcgcgggtcaaagattggtgaggtgagggtagtgcacatggcaaggcatcataggaatatatttatttatatgggattctgtctggatctgtgcttaaggaaacaagtaaacaagtaaacacgtcacgggttgtttatacaaatttaaattatatgtaagaatattaattaaacaataaaatcatatcaaataatttcaaatttaattttatgtataatttaaaaatatatatttattaagaaaaataataaattcatataaaaaaactctcaagaattctttaaaaaagagtttatcatacaattttttatataa

SEQ ID NO: 189230 - DNA, 1745 bp, Cannabis indica
ttttttttttttgttatattctcgagtaatttatagtatcgaaaaaaatctaatttatattaattatttttatgcagtgtctaatacgaacacgaacacgactgagtaccatcatcatcatcagaatatgatgatgatgatgagtaagaaagagttgaacattggtcaacaagttgtagtgagttcgaggtggaatcctacacccgaacaactccgagctctcgaagagctttataggcgcgggactagaaccccgtcggccgagcaaattcaacacattacggctcaacttcgacggtatgggaaaattgaaggaaaaaatgttttctattggtttcaaaatcataaagctagagagagacagaagagacgccgtcaaattatggagtcatcttcgtcttcatcattatctcctgataatgataatcaaaatcatgaagaaatgacattattaggtactaattattattctaatttttttattttaatttaaaatttcacaaaaaaaaataatgggatttaatttgttgaaaatattgtaatcttatttttttgtttatttatacacagaaggaagtaacaatattaataagacaaagaactgggtacccactagtactagtactaatactcttttagaggtaattttttttattctctctctctttattatgattaatatattatgattaatgttaattatgatatttaaaactgtttggggttagttagagttaaaagtgtgtttatgtatgtatatatatatatgtatgtatgtatagtttgtgtgttgggaaatgaaaagggaaagtgtaaaagctgcagtccatcctttctgtcggggctgctgttatgaaacttagctgattagggtcgttttgggtgttgtgctatacacatttcatgtcgtttaggccaatcattcatgcaccaacaaccaatatatatatatatatatatatatataggccatgcaccagtactactcctttttacccaaaggacaattttaacccttttctctttcatttgataagttcacaccatacataccataaagctagggtgggtgtccttatttggaattttaaaatgtctaatacactttattattttaccatctatgtaatcaattgtttttaattaatgttactttgtttgattttaaataatattataattaatgaatgcatattgatatgtgtcgccttatgatgctacatatatatagaatttttttatattattaatttaatctttaactccataataaattatacatagtgatacctatagttagtaatatatattaatcggttatttaatattattgctcataatattatcaaaaaagcattaattttgaatgttattagtaatattgttgttacctcgttccaggtttagttgttattttaattaaaaaaaaaaaatgaacatattcacaatgaaaaaatattatttttagtgataaatttttaatttcaacattaaattttttttatgattaaagggacttttagtgatttttgtaattttttgtgatttttgtgattaatacatttaatcctaaattttttagccaaacatatgaattattgttttacaattaattacaattttttcacttttaattaaaaaatttattgtgactaaaaatgagtattttagtgatgattaaccattcatgtattttaaattaaaattatgtaatataatatagaataagaaaaagagaaaaaaaa

SEQ ID NO: 189231 - DNA, 3909 bp, Cannabis indica
tctctctctctctcttttcctccactttctctccttccaaacagacagcgccacaaatatctaatcaacaaaccctgcttccaaatactacacccgcaactgagtttcttttgctttcttttgtgttttgttattggtttttctgttcggggtgagaacttgtggaggaaatgaaggttgccgatggtgtttggcgaccgttattcagcacacttgttctcgtgttttgcttgagttttttccccggtggaagctccgatctcgtttcagataagttgacattggtgaacctccaaagggatctaggtggccgcgcgttgcgctggaatctctcgctcgactcgccgtgctcttggcttggcgtcacctgccgctccggcggagttacagaacttcgacttcccggagctggaatctccggagaactgcctttgggaataggtaacctgacgaaattggagaagctctcccttcgtttcaacgcgctctctggttcagtcccatctgacatcgcaaagctcgctctgagcgagcttcacttggaaggtaacttcttttctggtccactgcccgaattcttgttcgatatgaaaagcttggtcagaattaacctcggtgaaaaccatttttccggtgagatatcgccgaggtttagtaatttgaccaagttggtcgttctctatttggagaacaatagatttaccgggtccatcccagagcttgatttgccgacgcttgaacaattcaatgtttcgtttaaccagttgaatgggtcgattcctgagaagctttccggcttgcctgccaactctttcgaggggaattcgctctgtggaaagcctttaaagccctgcaatggcgctgagattgtagataagaagaagaagaagttgtcgggtggagccgttgctggaatcgtcatcgggtgtgttgttttgctattattcattcttgccattttgttatttttctttcgtataaagtctcgtggcgagaagggttcaaaggaaatgaccgcaaagtctactgagcatggaattcataatgcaaagtcaaggattgataatgataactcgtctgctgattactcttcgtcgtcagcagctgcggcaaaagcaaatgctaaaaagagtggtgggaataggagtttggtgtttttcggcaatgctgtgagggtgtttgatttggaggatttgttgagagcatcggctgaggtactagggaaaggtacatttgggacagcttataaggcttctttggaaatgggggttgctgttgctgtgaagaggttgaaagaagcaactgtgcccgagaaggagtttagggaaaaaatggaagaggttggacgattgaatcacgagaatctggttctactcagagcttattactttagcagagatgaaaagcttcttgtttatgattacatgcctatgggaagcttatctgcacttttgcacggttagcattttcaacttcgcctctgatttttctttaatgtttttgttgtcatgtttacggtatcagttttggttatttgcataagtgagcttttattataatttcctactgacatttgtttgacttaattatttgattatatagtttgaataataacaatttacatctttatgatgttagtatgttgatcttgtttcaaatagtattgtggtgattgtgatgtcaatactattcccttctgcttgtctgtttaattaatatattggggacatccttagaatgcataacatgtttatcttactgaaaattctattatctattttatttttattattttgagaaacaatttggcaatgaaagcttgcaaaactgaagaaagaaaaggaaagctggctaaagaatggtatggggaacattgaatcatagatatggtcgagttaaccttacccacgtttagaggcctggagttgtccactgatcattaagtaatcatcttaaatgatctaaatggatatttaaaatgcatttattctgcttcgctgttttccacactttttttaataaataaaggtcaatgttttctgttacttgtctgtcttgtgagttgtgaccacctcaaccatattttcgacatagaaaactaagagaaagtcattctctatgggatagatcttgacgtggttatgtttctttccaactggcccttagtactccaaaatgttcttggttgctttgacagaaattttctttcatcacatgatttgaaagggaaataaccttcattctcaattaatgatttactttattaaatggtagacgattcatacatgcttgaaatacatagttacttccataaatgcttggaatatgactacctgttaaagacttccttacaagtacctcaagggaaaacaggaccaatagatagataataatgttcataataaagaaagaagtggagaattgtaaatcattttctctgcttgaaaaatctgccaagaaaagttcaataaagggacatagtgatattatcagagccagtatttgccctgctaggacacgtattctaagtctaacattatgttcacttgatccacaggaaacagtggggctgggaggactccacttaattgggaaacaaggtctggtattgctcttggagctgcttacggcattgaatacctgcactcgcagggtcctttttcatcacatggcaacattaagtcttcaaatatccttcttacaagatcatatgaagctcgtgtctcagacttcgggcttgctcatcttgctagttctaactctactccccaccgcattgatggttaccgtgccccagaagtcacagatcctcacaaagttactttgaaagcagatgtgtacagctttggtgtactgcttttggagttgcttaccgggaagcctcccacgcattcgcagttgaatgaggaaggagttgaccttccgaaatgggtccagtctgtggttcgagaggagtggactgcggaggtttttgaccttgagcttcttaggtaccagaacgttgaggaggaaatggttgagcttttacaacttgctcttgaatgcaccatgcagtaccctgacaagcgtccctcaatggctgaggtgacaaagcgaatcgaggaactctgtcgatctagctcacaccgagaagacaatgtaatgaacgaatcatattttggcacagaagagggaatttagcatcagtatcctcaacaaatacagttgtaccaccttgagtgaaagattgaagaaatagcagcaacagcaatgaaagagcaatctttcattgctgcctattcttgcttcatcataaagaggctatgctgtgcaggaattctccctcatttttcttctcttggttgtttttcccctttgatttcgtagtagcaaatttattttcgctagttattctgaatgtgaaagggggcaacaatattactttggttttattgtgtgcattatgaatttagtataatagttccaaagcataaacaaccatgcataatttgctcataataataccacttaggatattggttgctcgagtttcttttcaaaatgactaagaaggctgaaagtctcaacaacaccagcttatacgtttggctgtttattcttggagtgttaaactttttttttttttttttcttttaatatattgtatgtactgaaaaaattattgaattgtgctacgtattaccaaccatttatggaatttttttaaaatattatagtatattttttgaatagaaaactcagttactagaagaggtaacaagtcagtagggacattccccaagctgaaacaacaattggagtataatatagaagctcttgcaaatgagtaaactaccatattagctgatcgttttacaaaatgaatagacatattcctcaaagaatttaacaaaaccttacaatcattaa

SEQ ID NO: 189232 - DNA, 4779 bp, Cannabis indica
atttttggagcttgagtcacgtccgcgggactcacttcatgtaagttgtagttgaaattcgtaactatcttgaggacataatttggactttataacttcaaaattgtgattggagtgtgagacatgactttatagagcattgaaatagattcaaaactcaagttgaatcgcgtcaatgagattagtattgagtgagttgtggctattttattgaaggttgctatgataccagtgcctaggttgacatatgatgtcaatctggacgctgggccaagggaaaaacgtgttgaagatgtattttttgaggcctaagtgttattttgacatcacttagctagtttctgtgttttggtaaagtctttcaccagttctcgaagatgttactattttacaaaattgagagactcgaaactacctgattcgcgactaagtcactttgccgaaaaagtgaaaatattaagttgtgaatttgacttgtctgagatcataactcttgtttactatggaaaactagatgaacactcgagacaaaatcagaatcagataagcagaacccaacgcactaggtcatatgtcaacctgggcattgggtgctcttctttaagctttcgatatgtctttttaatacttccaaggttcttcaaatcaagaggtctcttaccccattttttactatgccagagagaatgctttgagcaaaatttgcatttggatgttcgaaactagcacaccgggttgattatcaacctgggtgctaggcccaacacaaggtcatcttgggcactgggctcaactttcaggccctcaggattctcattttctccccaagattacttgtatcttcgttatttctgatgatgaaaaattcctagaacacttttttgggaacatgattggaaacaacccaagttgacaaaatgtcagcctgggcgctgggcctagcaccaggtgtcaacttgcacgctgggtccagtttctagccattagatgactctatttgattcttgacacacttgtatcttaatctttgatgaaaatggtgactattcctgaaagacttctcgaaaaaaattccttggaaatggcccaagttgacaaaatgtcaacctggaagctaggcccagcactaagtgtcaacctgggaactaggtcccccttctggcctccaggttgatctgtttcttcccagaagaacttgttccttgtttttgatgaagacgaaaaaaattctcaggatatttcttcagtttgatgcatggaagtgcccaagcgctaggtgcatgcaacaactggtgtccgggtactcaaaaacgaaagtgcttcgaatttgattctaatgcctcaattatatttgtgacatatcaaattcatgtctcagtataaagtttggcccatttacattaagacggtcccaaaaatagaaatgggttgtcaacatgggcactgggtgaaaccctaaatgtctgggttgactttcaaagtcttgttttgtgtatttttagctctcgagccttggaatcagatgtttcatgtcttcatggtatagaatactaaaagataacgagttggaaacaatttggcggtatctaaacacccattctagagttccagaagttaacctgggtgcagggctaaggacccctcccaagtcgactgctatgattcaggactactcaactttgtgatgttttctttcttgtcaagtgtcaatcattgatgtccacatcaccgggataagttttcggtttaacaattatattttgattagatcaaatcatggtgtaaagaattcaatgtcgtgataaatatttgttgttgagctaattttcagtattaaccaatactttgtggaaaaattcttagcatttctttctattataataataaaaaaaaatcacatatgtattaggagatagaaggggatttagggaccataaactcaaaaatttgaacaaactaattgaaaaccaataaaataaaatcttcgggtgcgtttgaaagtcattgcatataaagtcatgtaattgttcggctagtaattatattatattttaaaatataaagttttaaaatataaatcatctggacagcagattaactttgataaatcttctatattctacagtcataatactgttgtagatgttagagatgaaatctgtgggtggacattcatgaagcagatgacaacactacttatttgggattgcctaatattgttggaagaaaaaaaaaacagtcattttaggctatcttaaggataagatgcaacaaatggtgcaaagctgggaagggaaacttttgtcaaagtatggaaacaagtactcagcaagactgttgcacaagctctacctaactatgcaatgaatgttttcttacttcttttagaaacttgcaaggagttggagagaattttgtgtcagttttggtggcgttcatcgtcaaaaaagaaaagggggatccattggatgagttgggacaagctttgtcgtccgaagacagtaggaggtatgggatatcgtaacacgcatgactttgatttaactcttcttgacaagcagggatggagattattgacaaaaccaaatgctttggtcagtagagtttataaggcaaggtattacccaaatggatctttcttgactgctgaacttggaggaaacacaagctttgtatgtaatagcgtttttgagtctcaacatctaataaagaaaggggcagctgttcgtatcgggtgtggagatacagttcaggtgcttaagaatccttggcttccaagtatggttgatccttacatccacacagtcagtgaatcattggagactcttggtattggagacttgaaaatttaggccattactcagtcaagagtgtgtacaaaagtttgcaagaggacaatggagagagacacacaaatgagagctctggtttctggcgcaaaatctggaatttaaaagtgccaccaaaggttaaaaatttactttggagggttgctgctggatgtttaccaacaaaatcccatctacaaactaaacacgtccaggttaatgaactctgtccattctgtaatgctgagagagaaactatctctcatgtgttgatcacttgttcctattcgaaagactgctggaatagactgggaataggtgttccaacactggtcagtgggactttttcctcatggctagatgagattttttccaggtttgtcgatggtgagcgaatgctgatttccatggttgcttgggctttatggaaatgcagaaacgatctggtgtgggataacaagaacaaatctactggagaggttgtgacattagcaactacagtccttaatcaatggcaaagtgctcaagataaaacacaaaacacaactttgggttattcaaactcacaagatggtgatgagtgctggcattctaaatgtcttattctataaaatagttagtacttacacagaaaatttagtaattaatatttaaaatagaaattttttagtaattatacaatataattacattcaattcttatgtgggttattagaattgaagagtataattggaatatctcacttattctaattatataattactgtcttatagtataattatataattactgtcttatagtataattatataatcacacaaatatattaaattgtataattatctctaattatatcttattcaaattcctatggttcaaattaaattgtataattatctctaattatatctaaatctaattcctctatagctatccaaacgcacataattttgtttgtaaaatagagttgtttgtaaaatagagataattggaagtatatatgttaaatatatatatatatatatatatatatataatatttgaatattaaagaggggagtagggcatggacccaaagccacagccacttgccacataggtgtgagcaagcagacacaagaaacgcccaaaaagagcaaaatgtcaaaaataattaaaccagagagagagaggtgcgtgtaaacagtggcacagaaggggctcggctcggctctgtcctccgaccgcttccctgccctgccttccctctcttctgaaccaaaactttgacctctttaaataaattaaaaataaaatgaataaaaaccacttacacgagactccagaaactaatctaatttaatgaaaggactaaaatacccccaacctactaggaatagaaccatcaggctactaacgaatcagaggactaaaatacccccaacttccttggaatagcaccatcaggctccttatgaatcagatcccaccacgtgtacggtgagattctttgctttacttggatgatgatgatgatgattgatggatggaggacccaatgttggtcaagggtcaaatgatgtgttttttgctttttggcctcgtgggcattttctttcatctgtgttctttagtaatatataataacaaaaatatatatatatttatattgttgttattgttaaagcaataaaaggcgtattatttagtagtttttcctttttttttcagtagaagaaaaattgcttgttcataatctatatttttattatatttaagagagaagaaagtgaaaaagtcagtaaacaaagtgggacaaaacaagaattggcagtacatcttttctctttgctttctctacttttcatgtctctatattaactactctatgtccaatgcctctcttcactgcaaagtaggcaattaccccatctctatatcacactgctctgtctctttttacacaacac

SEQ ID NO: 189233 - DNA, 1077 bp, Cannabis indica
atatatatagagagagtatagctaactagagagagaggtctttacggaaagccaattatagatacattgaacttgtctaataataagatatataatgtaaacacatgtgcaatataaacaaattaacacgttgaccccgcacacaaagagtgtttcaaaataaatgtatacttatattggattattaaagctaatacttcaataattttccattaattaagagatcaagattcatgaataatagatcgatccacatcatatatattatatatcacttattagtgaaaaattaacatatggtaacactacaatcataggtattagagtatatatactagctagttaattactatatgaagttttggtaccttgaggggatagttgatgagacgattggtcaggtactatttcttgttttacaacatctgcagattgagttgttgttgtagtagtagattgcaccgagtaattataaggttggtgggatgtggtgtaatcagaaagggccattgtggatgatgataataagtaattattatgttcatcagcttcttgttgagatggccaagtacaagaagagggttcgaagtaattagctgcagcatcatatccatactcatacgactctttctctttctcctctgatgcttctgaaggaagtggccgcttcccatgtctccgatccactttttactatctttagactctatatatatatatatgtttggctttggcttttggctttggctttgtccaaatcttgtgagattaagacatgaagagagaagagagcatgaataagtatggggatattgatgatggtgatgatgaaagaacaaggaaggctttgtttttggagaaagggtatggaggagctgaaaaggaagcactagaaaaggaaaaatagggttaggtagtgtaccagggtttttataattgccttatacctccactcatatatttcatcttaatttacagaatatatacattacttggtaactaatatgtatgaggtgaaaattaattaaagtttttttttttttttttttttttttttttttttatgtttaaaagaat

SEQ ID NO: 189234 - DNA, 1181 bp, Cannabis indica
tgattgaaaaaattcgaagctaaaatttaatagtaattgctaatgtgtagaaatatataatatcataaatagactaattgtcaattctatgaaccttcattctaaattctaacacaaagttaatctcagtgtgataacaagcaagagggaagaccccattccacttagcaattttcttacatctaaaattatcttagctaaacagtgagtgagaaagcttctaatgtaaatttgatttgatttatttttttaggccagctcaataaggatgtaacttctgtattttgagataataaggatgtaatttctattatttattaaattttccaccacaccgtataaaatgcccgcaccacaacaaaatatatagtttaaaacctttgagtgttttgataataataattataacaataatgatgatgaagaaaaaagatggtcttagaaaaaaaaaatgtagaatagcaatgatcattgatcattatcactaatatgacaaaaaataataggataattacacggcattattttttgtaaaagaattacattcttatgtttaaagaatttattttacaatattacggttttctatagaaataacaagaaaactacataaaagtaatatgaaaataatatttaaataacatcaaaataataacaaaaaataacatacatataacaaaagttcaataacaaattaacaagataacaacataaaaagaccgtattttctgtaaataaaattaaaaaactgtaaaaatatttaaaatttcgtgaaactgttaagttttttgttatttttgtgtatttgtgaaattatcccaaaaataatatgttgatataagattttatatgtaggtgggcctcgaaatggttggtatgccttaatttgctgaaagatcggccttttctattttgggcctagtttttgggcccttgcatggatctcaactcaattctaattggatcacttttcttttctaacctgaattttatttatatattttcaaatttgattttggtttggaaagaaaaaagtagagttttattaattaaaaaaaaaagagaaaataataataaataaagttatcatatttggtatggaaaaaaaattgtataaaaataaaacactcaattcaataaaaaaacttagttcaaacttgaaaaattgatttttttttttt

SEQ ID NO: 189235 - DNA, 4009 bp, Cannabis indica
cttaattaactataaaaacttaaattgaaggtcatggaaaagttgtgttgtttttgaagtagtattaggataaaagagcttgacaaaacgtattatcgtgtcgtattcgtgcatattttatttgactcgtttttatattctgtgttagacgtatcgattcgtttttgactcgtgtctaattttcttaactctaacctaacttgtataaaatcatggagtatttatatttgactttgatgtttgctattaggttctattagaaaacttacatctatttatatataataaaaattaaaatatttttaatttctttttaaagaaaattaattttattttttaactctaatattaaattactaaatatatatatattatatagttatattattatttatttataaaattcgtgtcaaatttgtgttattttgtttagatctgtgtctgatttttcttagcttaacccgtaaaattggtgtcttattagtatgtggaaataccacccataaatagagcattacacacgaagatataaaacgacttgtcgtttgctaatatttcaacggctatgcatcacacgagagagctacgtggacggctataattaaacgacatgtcgtatgttatccgagcgctgaccccacaaaaactcgtttttgataggatagctcacagaaaggtagaagcttgttctcacactcccaaacgaaaatggcgactctttcactctcagctcttcattcaatttccacccgcaaacccatttgttccttcatcgttccgagctcttctccggcagttattccatgtcgaaacactcgcttccggagctacggcgtttctgctagctcctcaaaatgttggatagctttaatgccgaactcgaacatgtcccgtggagtgagtaaggtgaggtctgtggaagaagaaaccctaattccggagcaagaagaagagcaagctactacccaacaagaaggtgaaggtgaagcagcctcgtcgtcggagcagcaagccgtctcagttcctgtttcggcctcggacactctcaccatgttctttcaggtgaatttttcattgttgcatttgttttattttttaatattacccataaaaagtgttatctttttgggtattaggaattaattatgtagtacataggcatttctaatggcaaggccatgttaaattttgtgtttgctcattttgaaagtaccaatgcaagtgtttaagatttcgttgggaattttggtcctgtctcattagctttcaaatacttgaattctgtctcttcttcttgataaatggttgttcatgttgataatactggtctgaattggtttgtttagaaccaacttagtttgctgttgtttaattaatacctaaattagttctaaattgtaccatttcactagttttggtagatatgtctaaatctaaaaagaattttagtgaaagaatttaaaacatatttaaaatttatatatatatatatatttaccaaaactagtgaaaggagtacaattttgaactgatttggcatatccaaggtattaaaatggtgttaagtatacaacaaggtactgagattgttcagaaacaaacaccaaggtactaaaatggtataatctatttctttcttgttttgaatattcaagtttaaaaaatttggatgtatatgacttatgagccttgtctcagcatcattacagagtgcagttgcttaatttattgagtgacatctttcttttgcatatatgaaggcagatggaacaatgagtgaggcaggtattccaaaggtggtcgacggccttagaggtatattaacgcagtccctaacttttcttttttgtttacctttatggtgcaatgctacattttaaagttacatgtatctctttttcaacaacatgagctaaaaatgatgctatatggggtttcaatgggagaggagaagaactgtttttatgaagataaattccatatgaaatgctgtcatacaagagatgctttgtctggatcttatttctcatcatgtaaaactgcattttcattttcaaaacgggtgtgttggtcgatgttctgacatattgaaatcaatagataatcacagtttgttaatgtttctatacaaattagctggaataaagtcgagaaagccaaagtatatgatgtttgaaaaccttggactgacaataagcatatcttttcctttgatctgctctcatggatatttttatatgtgttccttttatgtactacatttcaaaattgaaattgcttactcatgctttatcttgcagcaaattgagggtgtttccaatttgaaggttaatgttattgagggcattgctagtgttgaggtatgtatagattgcttcttatgtttcgcccactgctacttacttcttttgataacagttacacatccagttttgtccatgttttttgactaagttattagcatacctaagctatatgttatccacagtagaccatatgttaatttgtcaaatctttctctaataatattataaatggttttcatcagtgaacattattcagctgcttagatttggagagtactccttatgttaaccttttacatattttacttgattactattgtaattaagtatatatataatgctacttacttcttttgattacagttatgcatccgatatacataagctatatgttatccacagcaaaccataaattaggccacacttagttcacaaattaatatgtgaactcacattattcagctgcttagactgagtatatataattttatgttactctgcacttccgcaaacctttttttacttgattacttttgtaattaagtatacatatttatagttcccaatgtagatcattatgtttgtcactgtttttcagttggaaaaacagacaacagttcaagctactggggtggcttctagcttggttgagaccatacagggttcaggctttaaactacaaacattgaatttaagtttcgacgaggaagaaagtctcgctgctgtgtagatcatgtttcacgaaaagtcctctcgcaatttaaggttcgaacaaaatgaatgaacaagaaaaagtataattttgttactaaagttctgatatcttgactcttcctcctcatgaggcaatcttgtagttatttagtgttgatagtttcattgcctgcatttaaccttgtatgttatcctaggaatgcacattaattgttattgaggataaacactgtcattctggttgaaagcagttttaataatcaaataatgtgattttgcaatttggtaggtatggatggatatatgctgatttaatatttatatagtccaacgtggacctgaaaatatatagtataaatttgttaagatatctctattggtacaactcaatatcgggttttacttattttattgtaataaatattataaaaaatagttaacaaattattgagttacacttcattactcaaaaagattagcataaaggaagtaggagagatgagatcattactttgacaatgtaaaaaagcagatatagaataaagacatagcaatttgacatggtcaggctctctctgtattatgattttgaatagctggatcacagcatggacaagattctattctctccatagccattagataatgtttcatgtttcatgatgatcaacatgtagtacttgtttgtaaggttgtatttagatttaatatgtgggccataggccgccgtacagctgctgagagatattatttcctgacctggttaaggctggttttgaggaatttatttattcatatccacaacattagtcttccaaaggggaaaatttactcaactcagtctagtctagtactactactaataataactactaagttttgtgttttctttgattcatattaatggctatcattaactatatcataacaaaaagtaaactttaatttggacaattaaattttggtattttgcataacacctgaaagct

SEQ ID NO: 189236 - DNA, 1910 bp, Cannabis indica
atgtgaaaaacgtatgtgtttctacaaaaaaaaaaaaatgtttttatttcatatgttttgtgattaaaaatattttagaaactgttggttgaaaaaattgaatgagaaaattttttggatcgaaaattgggtcaaaattgacccaaaactcatttttgggtggttggccgagagggtttatgcacatcaagagcctaactgagatttcttagtcatggactccttttcacgcgcacatcaccccaaatgctccccatccgtaagtgctcatttgagaatcatggtcgaggtttcttagcccttccctggtgctcccacccacaaatttcagtcccttgccctcatccgcgcgcgcatatgtggttgtccctgtacatttgtgtgttggtgactgataaatttggtcacctagttaccagttagtctccaatgcaatttttttgggatattttaatttaaattcatttttaatttaaaataaatattaaaaaattactaaaaattgtagaaaattaatattttcatttttgaacataaatattatatctaaaataataatatttaattttttagtaaattattatgaaatttggatagtgaagagacaatgttcaataagcatatttttatcctacttatactggaaaatattcgactccacatggcaattatacatgtaactaatgcaaactcctcgacactgaatctaagtaattttcctaccacagaaacccaaaaatctgtctcatttagttggtgaacctccctcaacaatagtccatagatgaattggaggtgaatagagtactcgagtaagcaataaaaatgacatgaatactgttttagaaaacatttcaagttggggtgaggtcagaatacgtttaatatctttaataatttcaaaatacccacagataatgactttttcatgatagtggtctgaacgcctatacttgcatgaccaatcttgagaaaacaacatgcaaaactattaaaacaacacaaaaacaaacaaaaaataattaagcaaatatcaccactaaaaaaaaaaataaccacatacctccacaacccttttactagaaagctcccaaaaaatatcatcagaaggaagattaattagtgatttacccttgccctacgtggaaacagatcaatcaaaacaacaccaagacaactgttagaaaacgtatagattatttaaaaacatcaaacacataaacataaaaatacaaataagatactaaacaatgttcattgaaaaactcaaacacagatatctacaacttaaaaaataggacacaaaaactttaaaaaaaaattcaaaaacaaccaaattactttatgaactttgggtattttggaacattcatcctcaagctcatagtcagagtctggatcttccacaataggttgagatcgtttagatttcctcttgctcgtggattcaacaatagatttttgtttgggagccacaggagacgtaggactagggaaattgtctttgaaattcttcttccccattgcagattaaggtaagatattttaggagtttttctagattttttgacaactggggacaatgaattcgaacaagtaacaacctttgaaatgaaaatgagaataatatttataggactaaagcaagaacaagtgggggagaatgagaaagaaaatagtttttgaaagaaaaaaaaactaaacaaaactgtttccaaccaaaaccaacactataaacatgtgtaaatttttaaacataaaataaaagaaaaaatggagaaaaagatgaactgaaaggaaatgagggtaaggcttcaatctcatcattctcaaattttaatttttgtttgaaaaaaattcaaaactgtcacaaaaatgactaccaaaaatcaaatcaactttaattattt

SEQ ID NO: 189237 - DNA, 2027 bp, Cannabis indica
aaaaaaaaaaaaaggaaagtaaagtctcaattctacaatagtagaatgctttctaaaaaaaaagtgattgccatcttctaaaggtacaaaaagctccaattttaaatttatcttcctttctaatttactaaccccaaatctcctgtaaaggcctattagaacgatttatattttgttgtttggagttttttataattaatatttttttttgttctgtaatggatttcattgtgcataccttgaaatcccttaacccatttttaccaaccctaatttttaagctcaaaaattatagctccaactattcaattgtgcaaatcacaaccatttcatatacatcatccagggttgttgaggcttcttacccatctcacatgcttcttaccgactcaaactttgacaaccacatatcactcaaagaaaatttaaaagttgttccttgtctcactcctacgtgagaaattctcttgaatctattaatggtggcagtctcaaaggggaatttagtgattttttggattggtttgcggccatttggtaagtgggtatatttgttgaaaattataatactgaaatgtattagttatactgctctatgatacttttattttatagctaaagtggtagacatcacaaacaatagtgcattataatatttgttgaaagttataatattgaatttgaatagtttcaggtggtgggtcaagtggagatggcagaaatggcagttcaagtgatgggaattatggtggttgaggtgaaaacattagtggtggtggtgcaaaacacaattggacttttctttcatggtaatcttactctttcttacccttatttttttactatatgtcatgttttatctatctcagctggcatggttgcgaaaatacaaaactttcccatgactaccatggctgaactttgtggaattcagagatctaatggagagatgtagggtgcgacatccatatcgaaaatcggtagcagagatctctattggcacataatgcaatcctactcttatagaaaaattctttggtgaggaagtgagaaacataattcttcaaataccaaggcttaatcatcttgaggaagactatgtagtttggaaaaataaaggctcatggtcttttctattaaacagacttatataaatgatacgaggagtagatttgatgacaaattggtgatttggagacctggtatccatccccacatcagcatgatactttggagagtgttataagatgcccttcctttgaaggaaaaactcatatttgtccaagataaagcttgcgttttttgtttggagatacaaaaaaaaacagtctgcatgtttttagagacttctttgtagctcgggctgcttgtttggtggtgagtttgcaatgtttagctctaatattcaaggtgattctttgagggatttcttacacaaccatcgcaaatttcttgagccagacatgatggataaacagttgatgcactgcggctgcttattcatggaatttgaaatcaaaagaataaaagtttgatccaggatattgaggtaaaggtggagaatattatttcaaatacttctagaaaattctctgattttcttaagacagggaactcaatgatggctatacctattcctttccaaccagctccagaaccatgttttgataatcatattttcttcattgatgcttcttggaaggatggagtttttggttttggtgttgtttgggctaacatttcttatcagaatttgagcacttttgttgatcatggtcctgctgctttggctcttgaatttcgttaatggttgacaatagtataattttttctcataagaacacttgactcagaattgcaaccttagcgaatggaaatacaattaatctctccacacgatctctcatctttataatatattaaaaaatttaaacttaaaaatatacacaaatacacacatatcagattactcatttctactctttcccattttttatatgtattgtagtccttactgtaagaagtct

SEQ ID NO: 189238 - DNA, 1293 bp, Cannabis indica
ccccaatccgattggagagtcttgattttggcatcaaattttccttctacaaacttttggaagttgagaaatgtgtttttaacatcagattttaatttgagaggaaatatccaagtgtagttgctatagtcatctatgaagtgcacatagtatcgatatccttctttagatagtatgggtgagggaccccatacatcggtgtgtattagctcaattggtgagtgagatttagtgtgtgaggtgttgtaatgtttgtattttgatttacctatgtgacatgcattgcagaatggtgtagaatttttgaaagagaccttttcattaaccaacatgtattttagtacattaatattgggatggccaagacgcatgtgctacacattggcatccgaattgaaactagactaggcaaacaaagacagacacctacgggattgactccatttatctactaactgtggaggattggcagtatttctgctcttggaggaaacaataaaacttgaactagtgttgacagggacattggatgatgatgatgcagtgagtttcaattgatatagcccattgttaaaagcactccccgatgcacctcctccttcgtgattagatccttcacaacacaaaaatcagcataaaattccacatacactttgttatctttggttagctaagatattgacaagacatttttagagatttcaggtacacaaagtatatcattcagcactaaatagccagttgtgttatggatcttacttgagccagatctagtcacggccaagggaaattcattaccaacaagtagttgtgtagtacctttcatgtcagtttggtactgtatgttggatggttcagaggtggtgtgattggtggcaccactgtcaatgtaccaagagttgtcgacatgagcgtttgtgctagtgaaataggcttgttgatcattgtttgagtgactgttgttggtgttttgggaagccgatggttgactggaactaggagcttgaaatgagatgtcaaaccggtgataacacttagaagctatatgcccaggtctgctgcaaagttggcatatctgtctgctcttgttggatcgatctctgcctcgtccacggcctctaaagttgtaagagcagccaccagaggactgattggggatgtgtccatgatttccaatgttgagagatctgcgcatctgtgtggccaagtgggcagcaggcatggaggagtctcctggagttgagttgagttgttcaagcggatttcttaactctgcagcatgattgctacctc

SEQ ID NO: 189239 - DNA, 2845 bp, Cannabis indica
tagctgctgcaatgccagtttccaatagccgaaaaagagatggcatgagtgcgcatggacatcaaaactcgggtgccctgagaccaaatcttggttcttcgtctcctttccagagagaaaactggcctgccatgaattccatgcaggattcgagaaattcggctactgatataaacatctctttgcctggaggttaaacttagacaaatgatctcaagcagccctgaccgacattgattcttaatattgttctgaattgagtctctctgccctcatctctacattgccttaaaaagtacttatggagcaccaccaccacaggttgaagtaaggggtagtagttttccacctctcattagggtttatacacttgatttatctggtaggatatctgatttgtaggctcatttagtagctctttagctgttataatcagaatttatggatgtaaggacaatttatttctttttacgtctgaattatttatttgcccattggtgacaatttttaaacttttaaatttgtccatgactggagctggcttcattataccctcccaaagtactaattttatgaataaaaaagaaatacttgttaataaaattaacaaaagttaaccaggcaaaaacttttgctttgaaaaagagcaattataattagtattttaaaaatgttaaatccaacaattgaataaatcgagcttatgcagtatgaagcaagtattgtatctttgctactgaagcaaatatccaacaattttagctactaccgtgggtgtttgttactaaaagtctatgcggccaaatactagtggtgccaaatcgctagtgtcatatcgctagatcccaacacttcccaaacaagagttttcctttaagtgcacccacataccaacacttcccccaatgcctccttagtagaggagtggacttcacttcctaaagtgaagaccaggtgggaggctgttggtgtctgctgctaaagtagaagccactcgacaaggactggtgttgtgtttgaggttgaggtagatggattttacattattcttggattgtgctaatgccattcaatctctaaacagtgagatgtttatgcattctcatctgggagtcttaattgacaactgaaagtaaaagcataaaacaacgtttgggagaggtttattttgaacaattcactagaaagctgaacgtggaggcgcatatacgcttgcaaagaaagcattatcttttgataataccttgataaatctcagacataaattcgagtaagaagatttgaatatgacacgatgaacaactcttaagaattcagggagtaatttaatactgtcataataatttgtgtttgcaataacagatatattgtgccacataatgtgaaaccttctttcttggtgacactaaccaattagcaacgatagctgatatagatttttatatatatagtaattagattaaatgctgattttcaatcagctatcctacaatatcgtttggttgattctcaatcgaatatagaaggctatatagtagactcctacctcattttactaattataaacatcttctttcctcttaagtcagcctttcttcaaatctcacctttaacatttttacatcagcaaaaatggagaaaatgttcacattttcaaatattagtctatatcattacattaatttgattcttcttctcacactgatcctattcattacctgctcttttcactgaatcgtgactttattatctccatcttcaatttcattgtttcagtcaaatcgagtcccttggcaatctttgtcatatttattgtcttcaatcatcttatcatcatgatcctctataatgattatcataagcactatagagattgtgttgatgagatcaataaccttcatgcctcatttctatttccatcacacaaagttgacgaagaagcaaaaacagacgatgatggccgagattattatcatgatgatcacatcgacaaccgcaatgattgcaatttcttttatggttctgaccaagatagtactgatttttatagtgataatagtaatgaagatgttgatggtgatagtgatgatgattatgatgatattgaattgcagaggaggagtgaaaagttcattgaaaggaccaacttaaggtggagagaagagttaaagaatgagaggacttcttctatccttggtaccaattactgtctagtttaattagataagattagttttaaaaaaattgacacttactttgtgtaatgtgtcatttaaaaagaaagacttaatttctatggttggttacactatttttaagtgacagacatgctgtagaaacctttttttttttgtgtagaaatttgaacaagttatgtatataagtttctaattttagatattatatgaatgaagaatgtttaatcttttttattaattatattttatctgttgtttttcatcttaatttattattgtttcgacatgtataataaaaaacatataaagttgcaaacaaagattttttactaagctaggcagctagctatagctattcttattaatgcaaataattattttttgtagtgctaattaaaatttaagatattagaaacttaataaaaaaacaaaagaaaaattatgaattatttgattgccagaattgaaaaaccgcaatactttcattgataagtttaattttcagatctataatattaaattatttaaataatatccaatttttattttcaggagtaaatatttcaatcaaaatgaaaataatatccaatcttattattataaactatttaaagtaacaaaaatattttcttaaataaatatggaat

SEQ ID NO: 189240 - DNA, 1110 bp, Cannabis indica
taccaagacactccaaacttagccactataactcattttctcacaatttataattacttaaaaagaaatagtaattttacaaatataattaaataaataaattaagtaaaatccatcaataaatttacccaaattaaatataatcattttataaataagttaggtggctagtgttagtttaacctgtttttaagcaagtcaggtttggacttgacctgacacgactcgacatgacctataaacacaaattgtcaccgctttcgagaaaaattagcatgtcattgctttttaaattgttttagcctttcttaattaactgttgttaatgaaaattacagattgggaggccagttatctatggcctggcagcaatggggcaacgtggagtgaaaagtgtggttgaaatgctgaagaatgagcttgagctaactatggccctgtctggctgtcctacactagaacatattacaaggagtcatgtgatgacggagcgtgacagtagtctccattcaaagctttaatttcattttagaagaagaattagttatggtaaatggaacttaagaatctcaggatttgtttgagttgcagacccagattggtttggcctatcatctgagactgatcatctcaaattactagagccaacttctgagttatccagttaagctaggtctaggctccacgctgggttggtttgggagatgataatcttgccattattctagaactaaattatacatgctatcactttcttaatgcttataatgatttatgaattgatttagcatgtgcttagattttatatatttttatagatttatgaattgatttagcatgtgcttagatatctaaaaaatctagcaagtaactgtgattctactgtatcgatagataagagagtagtgatagcactatgattttttctccgggttatatgagtttgtatggcagcttaacaaggaaaataataggaatagtttggattgattgttagaaagtgtaatgccataataaaatatataaaatctaccaagaatagcattgaaatgtaattttattgaccaatcaaaattgctcccagggtggattaaaaatacccaggaaaat

SEQ ID NO: 189241 - DNA, 2883 bp, Cannabis indica
acacaaataccagttacacataccttcaacacatgatctatgcttcatgggcaactatgcgcaaccatcgcggaaccatgcagcaacccaacgcaaccaaaacaaaaattaaacctgaaagagaactactattaattctgacgacttcaccggagaagacgaccagaatcaataaaaacatgatttgtttcgaattcatgaaaaaaaaaatgtagaaaaactactacgaaactaaaattctaccaaaaattcagtttaatttgtataaaactaatgttctgactttagtttttagatccatgaaaaagttgaactggagttcctaaacaatccaactcaagtataattcaaaaaaaaaaaattacatcaatactataataaaatatttatcctggtgtattttcgttattttctaaatttctaatggtgaatttgttcatattaaatcataaagagacatgtagatagagttacgtacgtggaaacactgttctgatttttaatatttcataatagttattagttgcaatacagttgcattacagttatttcatctgattgaaatattcgtttgatgtaacatttggccaatcacccaacaaccacccaaaaactttcgtttgatgcaaccttcggccaaccaccctgcaaccatcgtctgattgaaaccttcgtctaatgcaaccaccgcgcaaccacacagcaaccaccctgcaattatcgtcttattgtgtaagtgatagtgtaagaggtattttggtaattaaaatcacataaaatgtataaatattgtccacaccttatggaggtattttctgtaaataaagtgtcaatttatattttctatgcaataattcttataattatctataaagttttaaaaaaatactaaatagtttacataatcgaaaataagatgtaactgttttttctatatatgtgataattaattatttgaattttattttttgatattataaattatttaaatttatttaaaatttatatatagtcctaaataattataatatacaagatcataaaaaaaaaattaaaagactattcggcatatcaaaataaataaagaatctttctataattttacaactctacattaaaatacaatactaaaaattaatataaattacaatttttttttcaatataatacaatttttacatctttaaatacatattcccttccccttcaaaagaataaataaataaataaatacatcttccatcaaagatgttattaagtgtagatgaatatgtccataacaagagccaagccaagaaccttaaggcttattttagttattttaatgtagtgccgtttaaaaattcaataggagtagatgcagatagggccacatgttcacatttatattagggaaacaagttaccatgccatactgcttataggtgtaaatcggtcagtttggtcggattatagtatatttttaccaactcaataaatatgtcgggttgtacatatttaattgtaacccgtccaatgaaaaaataaaataagtttaactcgtccaataatttttgtcagtttggtcgggttaacccgtttaaaccgatctttatttatttttttttttattattgttaggtgttggtgttcaaataattaatttgaaaaaataaatgcatagtatatgcctttcaagattaaaagggttgtagtttaaattaatgttaaaaaataaatataaattgaataaatattaaagtattaaacaatatttttcaaaaaaattaaataaaaaattatactcatgtgtagtagctaaatttaacttcaatattcaagtataatcaaaattatcaattataaattttaaatttcaaattaaatactataaaatacaaactttaaatgtaaaatagtttaagtattaattataatttatatattctatatattatattatagataattttagcaaaaaatatgtaaatcggtttattcgggttatttgagcggtttagaatattatttaacacaaccaatatatttattaagcggtttgaattttccataaagttattcaaattatattttttatcagtttactcggaacatttcaaaatttttgtaaacagccctaatagtgcctaatatattggcatgtggctctaatcttcccccctctagccgtgtaagaatttatgttccattcccaagccgcctgacattatatgccctttccttacacgtatcaataactttctctctctctctctagtcagaagaagcttcaaagtttgtgtccctttaggaaggtaaagtcttttcaatattaattatatacaagcttaacccaatacaactacaatcccacttggcttcacatctatgacttcttcaaactcgtagtcataagggtactactattacaactctgctttattatgtactgactttgaaactaacagaagaagagaaaaaacagagagtttgttaagtgtggagaaaggagaagagaactgtgttgttgtagtcttttccttggtcttttgattatcttatgagtaccatggagcgttatgagattgtgaaagatattgggtctgggaattttggtgtggcaaggctggtcagggataaggggacaagagagctttttgctgttaagttcattgagagaggccagaaggtcaactcctttatctattttacttttgggttgggaaagtttgaattggttgtgtttatcattctgtgatttgagatttttactgtttcccatctgggatttagttcgtttaaggattttgtttatgggtatatttcagattgatgaacacgtacaaagagagatcatgaaccacaggtcattaaaacatcctaatattgttagattcaaagagg

SEQ ID NO: 189242 - DNA, 735 bp, Cannabis indica
ttattattattattttgagagatgatcataataattaatgttgaacatttctagttaatgcaacaaaaggacaaaatataagataacactttaattatattctttttaattttaacaacaatgacaagaaataatatttaatacatctatacttagtccaaccacgttatttttattttgtcggacttgcacatataaatatatatatataattatatatatattatattgtttacaattttttttttctttttgagaatggggccaaatagtctatatatacaatcacatttcattgtaagctttttaatttttgagatgttgatggattcatcatgtattgatctaattttttttttacaattaattaattagtaataaataataagctatttatgtatgaaactatttattaataaacaaagctgcatggttaattggaatcatatttaacaaatcattaattttacacaattttacacataaaataaaaaaataagacaatatatattatatatgaatgcttttttttttcctttttctctttaccacatataatgtagttttatctatatatatctatcttttatatatatgcatgatgatcatttggatcaatacttatataattttataaagtatatatatgaatataaattaattctatgccaaaataaatcaaactaaataataatctagttattatatgaacaagagcattgttattaggcatca

SEQ ID NO: 189243 - DNA, 1627 bp, Cannabis indica
tggaaaatttaacaaaagaaatgctgttacaaggaactcaagaaagaccacaggaaaggctttacgccagctttttgtaacagcaactcctaagctatgcgattctgtcaagcaatgcatttcatacttgagaaggtgtgtaaaaacattcatgaagaagctagtttttagtattatatttgtgtgaatggaatagaagttggcttttgattctttgtggtaaggtagttacttggctccaaatgaaattgatatccatatttacctgaaaagcagatattagctaattttaattgggaatgaacttatcaatttacataaccttgtcttgactcatgcctaagaagtatgaatttatgcaaaatcttggtatgatgaactaactagtatcacttttctatgtctccaattgtatgattaaaatcatagtcatttaacatttccacaaattttcttgcagtggtagtagtaaatcagcagaagacaatatgattgataaggataatatcgatgatgaagattcaggaattaagaacattccagattcttttcgtgacattccccttagttcataccctcttgtcataacattccataagttcttgatgatgcttgatggaacactgagtaaatcttatttccaaagatttcttggtatggatgaagtttcccaaaatcaaatgcccaattcaagatcacatatgtttcattccttcttaaggaccaaggaagttgattttaagagattttgttcacaatattggcctcgttttgattcccagttaacgaaaaagcttgatccttcttgtgtctttactcagatagtttctcacatcaaaggcagcctacaagctttggaaacaaatgatggtaaactcacaaggaagaactatgttatgctgtcaaaggaatgtggctcaactttaagggggaagaaaagagagatgatatatgacatatttcaggcttatgaaaaactgaagttggaaaatgatgcatttgatttggctgactttgtaaatgatcttcattttcgactcagacaagaaagatatctcggtgacaaaatgaattttgtgtatgtagatgaggtgcaagacctcacaatgagtcaagttgcattgtttaaacatgtatgcagtaacttggaagaggggtttattttctctggagatgttgtgaaaccaactgctgggggcattgattgcaggatccaagatattcgatctgttttcgataagaagtttgttctgaaacctatgaagaacaagaatggagtagggggacatatcaccaacatgttcactttgactgaaaacttttgtaccaatgctggtattctaaaactatccaaaagtatcattgaactgatttatcatttcttccctcaatctatcgatattattgaacccgaaacctgtatggtccctggtgaagcgccaattttacttcagtgtgagacgaatgaaaatgcaatcataaaactttttgggaagggtaacagcacaagcagaaacgccaatggttttggtgccgagcagtaattttggtaagagatgaaaaaacccgacaaagtataaaggacattgttggaaagcaagctcttatcataactatactcgagtgc

SEQ ID NO: 189244 - DNA, 2322 bp, Cannabis indica
tttggcttccgccattgaaagctctccaaatgttcgtttctcttcttttgagttttatgtcagatcagaagaggggattaacctttatgttgatttgaattcaagcccatcagactggactcagagatttaaaaatgaagttcatatatgtgagaatgtgcagaataataagtgtcggagtttgcatgaggaccttgggcatctcaaggaaggtgggaaggaaatgagaaattctttttggaatatagatgcaggagaaatcaaggaaggacaaatagaaacccgatgctccccaaattcaaaagtgtcacaaaatgatcactctgagcttaatgaaccggaaaattttgaaacattaactcgcttcacaatacagccatgcactgcttctgtagatgttcttgaaaagtcaaaggaagatcaaacccctaagtcatctgagtttaattctactgcacatgacaatataatttctgttgctgactcttgtgctaaagatggtggtacggtggttcttgattcagatgttattggtgctcatcacacaaagtctgtctgtgattctgctgtcaattctatctcagatgatcccttaattcctgagagattagaccatctgaattccaatgtgagccagcacgaaaaacattccttcaaaatggttgtagtgatgcagatcctactgtgatatatactggatgctcagtaagtggttctatagacatgcagtcatcagaagttgcaagctgcaacaagatgcatcttgttcacgttgtgaaaatagtggactcatgagtgggtttgacacaaagaacaatactgaaactgaaaaaaccagattagctaacttaagtgaaccggaccccaattcatacaagaagcatttgcctgcacttgatgaagagagggtatgtctatgtttcccctttctgcataaacgaagctataactggttggcatgtcatattcccatttaaattatttaagttgtttatgcagcatgtcatgtgaactgttgttttttcctctttgtcctaaaggaaatacagaaaaaccactagggaaatttatgctgtttattaggaatagactacatatcttaggccaattttgaattaagactaggcatactgcactattttgaacacattttctctttcatctttaggaattgcttacttcaataatgaaaaaaaaagtcttttttactcgtgtctttgggaaatcatctcttataattattctattagttagaaatctttgtctccatccctccttgtttgaggcattttaaacctggcatatcacatgtaaaattatgagctgaccaacattcttttatatttttaaaatctttttacagaatatttattggcattattgatttctgttctctaaaatttttaattgcacgcacatccaactttacatattactttgtaagcttatcatatttgttccagtgacttgctctaacgttctttcgtttacaggaaaagagtaacattttaaaagagacggaaagttcagagtaaattttcttttcactgaaaactttgatttatcaattttgtggtgagctcagcttatatctaatttttcatctttcagatgttcacaattttccaagtcatctaggaagacatgcttgagttctcatactttggatactagaggacttcagaaaagaaggatagaaactgatcaaagtagttatggtagagctagtgcaatgttctttagaagtacaaaacctattaccagaaaagactttcctagaagatccatgcggctgaagtctaaggtaatctaacactggctttcatcatatgatttgtggttatatttgtttttgcactattgtttaattctatttccaaataaaacagtcattgtttgtttgcaatatgcctaattttcatgcccatctttgaggagctggttgacaaattttgcaccaccatcttcttagccgtttttgtatatgcatcctttgaaaaacaagcaggttcttgttcttgataataaaaaatcatcgcccaaaggataaaactgtgtggcaaaacagtagtagctcgagagaactttgctgaatatctaaatgtgtgtgtgtgtaaaatacaaaataatctgaattagcgtcctcttgagaaattttatatattacctgggctggacattattcttactcgaaaagggaaaaagttaaataaatagaaaaagaatttgattgagatttaagtacatgaacctggtcattaatcttgtactaagctggggactcatttggtacatttgtattgtttataggattgacatagt

SEQ ID NO: 189245 - DNA, 1692 bp, Cannabis indica
ccgtttatcttttccgagttctttttgcagctttcctagtgaaatatagccaatttgatgcagcattgcctacaccaaaagctaaatgaaaaatgtcaaacataatttaggtggctgaacatagaacaaaatttaaagacagtaacaaatctataaaatagactgttaactattaacacatagaaacacccttagtatgatctctaatccttattcgtccttctaacataggtactttaaatgggaacaagatgacaggcatactaatggaatcgagcagcaagctcgggccgggaagttctgtaattaaaagaatgaaagttaacatcttattgacataggtgtagcatgtttttctctgtgatttataagataggacactcacaacttagaacctaagggcagttgtggttcaataaccgaaaattcacagaacaaatgatctgaagagcaaaaacgaaaaaaaaaaaggagagagatgggaaaaatccataatggtttccttctcagcaaatcctgatgacattaccatacattagggagttatttctttattgctaccttatcaatatttattctcccatattttgcaaaagctaccaagaaagatttacttcagatagatttcaaaagataacaatcacaagacataaaatttatttaaaaaatttacgaggaaagaaaagttttaccagctgttgagagacgtcgtgcttctgaagttgcccattccacgaactcgtcagtacgcttatcaacaaatggttgaaggtgattttttaaagctgttacaagcttttcttctctctccttctgaaatgcctgcaaaacgatgagaatgcaattttagtagttatgattatagataaaccagcataatgtacacattacacatgaaatagcatactttcaatttctcctgaattttatgctgtcgaacttcaggatcttgagattcttcttcagcttcaatagatgccaaagacgccaaagcaagttgaccaacatagtcttcaaataattcacttccaaaaagcattccgaacaccgctgaagggtccaacatggattcactggcaattgaaaaagaaaactcttaaataagtgtgtaagatgcacaatcaggagttgtgctcgtgtacttagtagctaagtggttaattatgaggtagttggttttgctcagctggcattaactgtatatcgggtgttaattgcaagatcagcccaactctaaataaagcagatttaattcaattgactctttcaatttcctcaagaagaaccataccacaacaacttagcaaaagatgaagattataaattgcggtttatagaaaagcttacatttttaaggaaataattgataacctacgtttctaatgaagaaacaaagtaatgataaatctgtcagtggactgactacctagagttggtaacaaaatcaaaatgagcattaacaataaatagcacaattctttaatgacccctaaagcatatccacatatgcttataaagcatcttgatatctatttcttggaaaatcattttataaagcaataagtcaacttggataaagcaaactattaaagttgtgagatacaacaaaagagataagtgaaagttcattttcgaaaaacacattacaaccccattattttttcaaagtatgcaacatacaattcaaagttc

SEQ ID NO: 189246 - DNA, 1927 bp, Cannabis indica
ttgttctcctagaaaaagataaaaaaggtaatgagatgacctgttttaagtttggggaatatggaaaaagacctgatcaattatttgatgtaacaaagttttggccagaatttgcttttcatcatttttttttttatctgcaagtatgatcagacatttttcacatgtcatataaatgggattaataaaatttaaacaagatgaagaacattaatgtttaaataaatatactttcaggcttttacccaatatatatttatatatgaagaagagaacaaacaagactcactctcaaaactaataccaatgaagattcacattgaactaatgacaatactaatctttaccttttcattcttaagggggttagaagaattaacaatctccaagaacatattaatgtgtacaagaactaaagaaaaccatgggcccaataatctcctatggtactttcctaagagaaaacaaatgtacatgagaagaaaagaaaaagaaaagatttttgttcttgttttttacagatgaaaaagaaaagaaaatcaatcaaaaggagtaagctacacgatgaaccactcgatctctaagaattccattgtacaaagctgctctgttagcaggcattcctttatacttttcaccattcattttcttcaactttagagaagtagaagaagaagaagaagaagaagaagaagttgtttttgaattgagagaattgttaatcacactgtgctgtcttctaaactcgtcaccatcactcctaggatcaatcacgtcctctgcaaagtggacccttttttgcttattatgatttctccttttcttgttctcttctgcaaaacccaccaagaatatataagaattcgtttacgaaattgcccctttttcacattataagaccaaagatttcaactttatttttatctttttgggggtgtttgggataacataccagaagaaatacatgatcgtagaatttgagtttgaccgactgagaattgggctgtgggcacagctttctggagacgaagagcgaggagaatcacagtgccggagaccgccatggctgtggccaacaccactccttgtgagcccagtattgaagacatcgtttttctctattttcctttttgcttttgttcttttcaaaaaaccagaaagaaagagagaaggagaaaaagaagaagagtggaggaatattcaaatggcttacattagataaataagtttggttatctttgggggtttcgatggtaacggcatagactgtatatataaaaatattggtatacacatatacacgacccacatgccttattttaatgtttttgtgaaaaagattgaatatgattggtgggatctttttttgatcgacaaagtatatatttgttaattgtatgtcatcatatgtgtcagcatgggaaagtgtttggttcatgcgaaagtaactgttttacttaccactttttattattatttttacccaatgttagaatttggaagcgtggttaaagttcaatctcaaaactaagtaataagagcaggtactagcagcgccttgcaaacctagttgtaacttgtaagccaacgtactcgatggatgccacctagttgtaagccaacctcctcgataggtaaaaaaaaatatttaaacccttactataaatatcaatagtatttttaaaaatgattaaaaaaacatatattatttatagacgaaattactcattacgagatattaatagttgtttacttaaatacatatttatatgacatttttttttagatatttttatagtatttgatatatcatgtatatgtaatttaggttttcacagtctatatttaatgtttttatttattcaagcagttttatttgtcactgatgtcggaaaaatcgcgcgagtttgctattggcgctggaaaa

SEQ ID NO: 189247 - DNA, 2429 bp, Cannabis indica
attatttttaaaaagaaaatgataaaaattaatcatcctccataggaccatatcttaacttgaaattataatattcaatatcataaataagtaccccagaagatataaatgaactttaaacaagtcaaagacacgaaaagaaaaatataaactgtccagataaaaaccaaacaaaaaattcaaattaaaagatttgacctttcaaaattcgaaacaaacagttacaatgtaatggaaatcacttggaggggaaaaatggaagatcagaacacgaaaacaaagattttcccgcactgaacccagacaatgatagtcaacacttcctaaattcaaaagtactacgatcaaatccaaaactcataaaaacgggaataaaacaagttaaaaactggatcgagctgaatttgaagtgaaggttaagattagaagatagtattaaacaaaacttagtgcaataaaaccctaaaaaagacactcaccgaactgagcttccgataatagtatgtagagaaaccgagtaaggcgaaagtcaacgatgcgaccgagatggtgtgcatttgaacatccagaaaacgaagatttgatggatggagagagagagatagagatctgtaaacgcagaacaagaaatgcagagagagagagagagagagagagagtgtctgtgaactctattcaaacataaagggcggagaatgagttttcaaaccctataaggctatagcgttaaggatcgatcatctttgtttttggacggcttagatttttccgtgctggaatatctaccgtcgatttagatgacttttcctttctcggtcttcattcactatttttttaatgaagaatttaacgggcaaattgttttaattcatcattttcttctcctttttacttttatttttcttttttttgctttaacaagatttcaccttttttcgaaggaaaatttgtcctaataccatacatttattattctctaaaaattattacaaaaaataatatataaaaatatatatgtatacgtgtttactggtataacttcttatcaattaagacaaattaataacttactgtattaacattaattgaagcacccacactatcaccagcatgaatcattgttaaggttatgtttggtaggaaagatgaaaagtaggatgaaagaaaagaataggaagaatagagaatatgaaggattgagaggaaagtagctctattttatattgtttgttattaaaaatggaattgaaaaaatagaatgtaaattaattactaaaattacagtactattctttttaatataattaattatttttttttaaagacataatactgttatttttttttgtctttttattaaatccctctattttaaaaaggattaaaaattttgagttttgatatctcccttcgcttttccttcgttttctctttcctttttgccaaataaatgattttacttatccctccatctattttcttccgcccatgtccttccaatcttctttccaccttaccaaacatagtgcaagttttatttggtttaccaattcagtccatatggaattatttttaattcccaaatgaaattacttttggcaatcaactccttaaattttaaaattagtagtaattaagtccttccagtggatttatttcacaaatttaaatgaactttttaaattattgaatataatgtagattaataacattttagactttgtgttttgtaaaaattatcgctcgaatcttatgttttgttaaatgacaaattgaactctatattttctaaaatagtacaaaataatactatgagttcaatttttgacaaattttttaatatataaccaatttgaagataatttctaatacgaatagatgcaaaacatgtaactagtcttgtcataacactgatcggattattattaaattttattttaaaaaaataaactcgaggtactatttatgtaccatttcaaaaaatataaagttaaatttgtcattaataaaatagagaatttaattaacaaaaatttacaaaatacaagatttaaattgatatttactcgtataatattatgtgtaaagtatttagagatataataattataaacttttaaagaaatgattcgcaaaatggactttctttttaagtcaatttgtactttaacttagcttgttaattctttgcaaaatgacctcattttaaaaatttgactagtcgtctaaataattcgaccacttagcatgtctagagtgttagatgtcatctcgaaaaaaattatgcattaaatctaggccaaagtagaacaaaacatcggacatatttacaaagttcaagcttttagtttttgatatatgagtgaccaaataagaagaatggttgaacttgaacttagtagtgtcaaagtggaagaagaagaagaaga

SEQ ID NO: 189248 - DNA, 3313 bp, Cannabis indica
tcgttaaactcaataacttctgcaacttttggtttgaccaccctatacctacaacttgttcagctttaaagaatgtctaataacgaaaacggaattctaaacaaaggttaaaatgagaaattgaaaagggagagatcctttgagggtaaaaccaaaacatttcattttgtatttcccttttcagaatgaataatttttcacttaaaaaacatgatatttaagatcttatatcatattaatatttagaatcatactttgaatactcttactcattacaaattgaagatagagacctttttttgagtaggattacaactccaatttataactgcccaatattttactattccataacaattccctttttgacaatgcaaaatctttggagataacttagtaatttattcaataataattaataataataataataaatatatttctttagttaaattattattggatcaatgaggcaagatgaccccatgcaaaatctcatttcacaggtatagggaaccaaagaaagatcatcattttaagtgtttaaaacaacttaaaacgaaaaccaagagaaggaactaaaacttcttttggctataacgttgtattccgttcacgtcaacgattcctggagggaagacggtatcagtcgcggctctaacagcaaccttcgccactgaagtcacgttcaccggaggagtgaagagcggccccacgagcggcagttgggtaagaggtcttgttcgttggaaaacctacacatgccaataaggaacagttattctataccactaattttcggtttacattgttcaccacatatagaacacaagaaaaaataagagattttaccatctctagtggtgaaccgataacgcccaaaggtaatttcatgcttccaacctggcgagttccataaatgaatccgggcctcaaaaccactcctgaaacagacgcatgcaagtcataataaactgctgtataattgtcaattgtaatctaaataattcatagctataagttgaaataactgaagttatactgagaagaagattaagaaaaactcacccccataagggtatttaactagtagctccgcttcagcagctttctacaataaaatacgacacaaataaatacttccagttctcttataatcgaatcgacaagaataggtcattaagaatattattagctaaatgcaacactcaacacaaaaaaccctgtaaatcaatagtacatattacaatcacagagaacaggtaagaagatacatgtatatacatacatacatacatatgttaacaacaaaagtgaaacagaactgaaagtgaaagtgttaacagcaaactcatcttgttatataccatgcatgaagaaacagaactggtcaaaacaaatgattaagatggtacctttccctcataatatccttgcaataaataattaataaagccaaagtcagcagcagagatgtagacaaatctttttacacctgcaggaaggagacccagatttgaaaattaaattcaaaacttaaggccaactaatatagaaaatgagagaagtagatgcattgagagagaatcagagaagaaaggaaattcaaagtgacaaaagtctgtatttgttaatgctggttaaatcttaagttaatgaacactagaaactatagcatagaataatctaacacttagctctgcatcaccaactcatcccagtatttagttggaccaatttaccctaacccattaatactaaaatatctacagctaaaaccccaaattccacccaggttcagaatgaccgagcactgaaatcgtaccggtttatttctcatcctttttcgacacactttctgcttcatgtttagagtttagagaaatcctttcagagttaaccaaactagtgcagattacacttaaaacattgagacaagtgttatacctttttccgaagcagctctaatggcattgatgtttgctgtcccgttaatcttatacatgtatgaattggagccaaaaccaccaacgcaggagatctagaaaataaaactttaattaacagaggaaattatagtaataatgtcagcatgagtatctgataagcatgatttttcttttgctacatggtatatcctcaaattatacatacaatgagtagaaaaatgatgaacaatccatatagtaataatctcatccaagcgaaagcatgagcaacaatgtaatagtttgaaagtataatataggttcactgttatgttcatgcacatagtaagatcatctgctctaatattcccttgcttagggcattcaaacacatttcaatgagtaaaaaagattcaataccacagcagtgaccccgcttaaagcttcgtcccatgaaccaggcgatagaaggtttcctgacaattttcaacatggttgagagccatcgtaacgtctaacggaaaagtttgttgatagaaacatttcaaataagaaccaaaccttgatgccaagacacattgctagcccatgactcctgtatagaggatcttccagatctggacaaagaggaaaggaaaggagtagtaagatattgtagctgcacaaagtgaaaagtttatagatgttacacgatgaaaccaagggactaaagtttgatccaaaaacatgacaatatgatatgcatatcctaaatacccgtgtgctcacttgaaactccagttattggaaagaagtataatcttatctgacctgataagctatcattgttcgtcaagagaaaagtttatattatgagagtagatccataatataaatttttttaaagcatatcagcatattatgctatttaattcatctacattattagcatattacctcattttgttgttctaaattatcttggtcatatctcaacccaaaatcgacagaatgcacatcattgactacattagataaatttcaatattcatagaaaaaagccaaatgattctatttcaaatatttataaactaaacaattgactacttattttgacattctactcccaaaaaacccaaaaagttatacaggataaaattgatcatggtaaagaagcatacctgctcaggcttgacaccgacaaaccacgatctagagcttctttacaaacatgtgagccaacgaatccatttccacccaatacaagtaactgaagcgaaatgacaaatgaaaacgcataaaagcaaaggaatccattaaaccaaaccaaaatatgagcaaccaacttcgagtactgcccacaataaataataataataaattaccttctctgtaggaggaggagg

SEQ ID NO: 189249 - DNA, 4335 bp, Cannabis indica
ttttcactctccagttctgagatgagtttatcagaaaacttggatgcctcaacatgtttctgacattcaaggagcagacaaaaattcttttcctccaaatcttcaataaacttctgcaggataaagatctcgatctgggcatttacagctctgtctagttcttcttcaaattctttctttcccaatctgctttcttcctgtaagatatgcacatcatactgcaaacccgccaatcgagcctcagttgactgcatataactagaatgttcttgcttttctacaagaagggaacagcggagttcttccacctgatgcactgtggattctttatccttctccaggtcagtatatttctcttctaattttgtaaacctcttctccagctttcccagtctcttttcaacattttccaattgagacaccagggtgcttctttcgttcagaagattggacttctcattgttcagcatctggcacatttcttccaagctcttcgattttagtcttaactcttcaagttccagttttgcaccagagagggaattctccagcaaggtgttcttctctgagagcctctgcatattctcagtgacaatctgtaattgtgacagaagagcagctttttcagcaactagagttgatttttctccctggagaaagttggaggattcttgcaatttcatgaccttgtctcttaaatcctccaactcaagattcaatccagacagggagccttgcaaatgagcattctctgttgaaagtttacccatatccctcatcttctcataaaaggcttctttctcgtctctgtctcttttgcagatctcattcagcttcaagttctcttcttgcaagtccttcacagatctctcaagggtttcaggatttaaaccaactgaatccacttgcttcaatattacttggtatctacttgtcaagctctttagttccccatttaaatgcccaatttcctgctggagagagtcactttggtcctcctttcgtgcaacctcctgttcaagtttctgtttcatctccttcaagctaaatatttcttcttgtagattctgctgtgataagttgcttgaaaggttgagatcagagagattcctgttttcttctttaactcgttccatttcgtcttccatgctacgtttccgtacctccagatcattcaacatttggagcccattcttaagatccaacgccaaggctctctggtcctcttgagattcagaatgcaacttctgcagagcttggagggttgcttcaacttgcagaaactttgagtgttcctcttgcataagggtctgaaatttattcaattcatcatttttttctgtaagttgttgatctttcctagatattttctgcaacaaatcatctgcttctgactgcagagtttgattcgatgtctccaactgaacacactgttcttcagcactttttagtctagcagcccccatcagaatttcattattcagacgttctacattagcttgagcttgagaaatttcagcttccatcatagcaattatctccatgcactgcttgtactgaagtgctgcagcttctttctcttcattcagcccagcgacagctttctttagtgcttcaacttcagcttctgctctttcaatttgctcattaagtaatctggcattttcttcagcaagtgacagtttagattccaaaatagatattttctcaagacaatatttgtactgaacaagcccagcttctttctcagcctctaatctacaaagttcttgattgagattctgacattcagcttctgccctttgagctcgctcactttgtccctttccttcctcttgggcttgagataacagattctccaggctagatatcttctctaaacactgattgaattgaagaagaccagcatctctctcagtttccagttctgaaagggattccttcaatatatttatttcaatttcagctttggttgctcgttcatctagcaggccagcatcttgttgtgcatgcttaagttctctatccatattagataacttctctacattttgctgatattgaaaaaggagagtatccttttcagcttgcacctttgccagtgttttctttaaactttgaacctccgtttcagcttttgatgcacgttcagactcaaataggacctggtttttcagcttctggttcccatttgatatctgagaaacacaatcaaaattttgtccactctcttcagctacagataacatttgaccctttttcgtctttttgtctccaacctttgggctttctgttgctgctcctcctgaattaaacatctcgtgcagctgtttcagaccccttttgtttatccccaagtccgaatcttccaaatttccaccattgcttttcaatgtaaacaagttggttgaagagagtcccaatgcatctttatgcaagtcatctggatcaagtaaagcacgaattggatgtggcatttctggtgtatggggttcaacctcaggacctgcggaagagtttgactgtgattcatcaccaagagcataaggtagttggttgggaaatgcttcttgcatggttcgatgggcatggcgcagctccacagttgcatggtcatacctctctgctaatgcacgataagctcgataaaactcttcaaccagcttcataagctctggacgtttcttataatacatttctgccctccttgcaaaggaatctgcatcttcttcaatgagcttgatcattgatttgactttggcatccatgtctgcaaaagacaattcggtgttaatgttacagacatctttaattattgtgtaaaaaaaaattcaccaaaacaaaataaatggtgaaaaagggccaattcttggaaagaattccatacctgtaaggttttcttgaagccatttagaattcttggggctaatgtggctgtcccaccaccaagaatataagcgtctggactctgagtgcaataaggttcccatgactccagctaagaccagccacaaatatggtcttgaccttatatgaggatggtccttgtacctgtacaaaaggccaagatactggatccaggccagaatataacttcaacagatttttgccaccaaattatatgcaaagctagacttttttgctcatgtatataagagttccttcaacctgaacaataaatcattcaaagaaatgaagtcagaaacttcactgcagatctaaattatgaaacttatcagaatatgtaatggaaagagtggatattctaattaccagttcaatataacagatccaataatatagtaattgctactcctttatttatttcaatgagccttcaagtacccaaattgagacctgttgatccagaaaaatggaaaggatatcagatcataagaaactacttagtgataaaacacaattaataaacaaaggatgtaacagctaaatacattaatattaatgaaaaaacaaacaacttgggactaaaactgcaaagatgaggcaaacatacctgtaactccattaatttattttctatcttctgaaattaccaaaccaaaacatgactcaaacgaaagaatcaaaacttaaaataaattatctacattactccacagatgcacagttaagaacacaaactttgaatgctttaatacagaattggatcgaaaacatgcgcaccggaaagagaaaaaacacacaaagatgcaaaaggacaatcttttcactaaatgactttctactaaacagtaactgtgattttttcaatcaaccaaaagatcaaaatcttattgaaagaacaacaacccaagtttgatttccaatcagaagtgaagctacaaatcaaatcaacaagataagcattacgcataggagataggactattgattaatgaaaagggggcgactttttttccatattacgagaaacgaaagcttacccgatgaatgaatccagtgatgggtttgttaaaaaggcaagcaaagccaccattgaagtgaaagcaaagcattgattttaagcaaatgggtatcggctaaaactgcaaaaaatcgatattttctgctccatttggatcaaaaacaccaaaacaacgaaaaactggtaatgggttgtggttagcagctgtgatagtaccactcagctgcaaggaatacctcttaccccattttctctcactgaactccaacagtatttctgcacacttctctctctattgggagctttgcattatatgctatcatctaatctgacatgaaactgacactgtttgatgacttgtgaactgtaaagagaagagagatgagagaatgagcctagtaaaaaagtaa

SEQ ID NO: 189250 - DNA, 4125 bp, Cannabis indica
gaactatggaaactagttagtgagaaagaaaaaaaaaaatcagacttttacgagctaaatccaaattttctctccaatttttatgtttcttagatatctaaccctaaattacagttgacagaatgacaaatttgatagtttaactctcaatttcaattttaatgtgtataatatattttgagaaatttgaaaaaaaaaaatcatttttttattattaatgtaggatgagaagtttgagattcggaaagaaacgtacaggggtcaacagtatagtcagatttactttgctcgtcttcatatgttgaggactatactctattcccttgctcctaattggaaaccgcatttaccaggttcttgcaaattctaagaccaattttaaaagaggttcagctacgttgtagtggttatatgttaatagaaatctttaatattgtcatgtttactttgatttgggttttatatactactttgtaggtttgtgctgtttagttctgttgctgttttgctatcagttcgggctgtgaactttgttctcatgttgagttttgtttgcagtacgtactgttttgggattagaagaagggaaggaatgtatagttgttgggaccttgtataagcacatgaaactcaaaccttcaattctagaggagtactctaaggaggtatagttgctactcgtattagtgcacatattttgatgtacgggtcattttgatttggattagaatggaatattcagaaagtaaagtctgcaatctttttgtttacagagaactgttgccccactggtcaaggtacataattttatgcacactgatgattaccttgtcttagaagatgaaagtggaagagttaagcttagtggccatgctctttcgcctccagtttatgtgacaggtacttgtcatgtacaaaatagtaggaaaaagtatgatttttttttggtcgatttcattaggtatgctttttgaaattgttattccttgactaacatgatactgtgacaggagtggttgttgctttgcatggaaaagcaggtcctggtgatttcgttgttgaagatgttttggaagctggcctaccaccccaaattgagacaccactaaaatcaagtacaatcacttcattttgctattttctttagaactactgtgttcatggtctattttctcacagatagacattagaaacatccaattcaagccagaaaagaaatagtttagtcataacattgctatgaaatatgacaattggttttcactcctttcagaagaagacaaatatgttgtttttgtatctgggttgcgagttggaagtggcaattctaaccctctccagtttcagcttcttgttgatcacataacaggacatctaggagatgaaaaggttcatcttattttgtctttataatttaatgcggcaccggatttgacaaattttcgccataataactttctagagctatacaatgaacaggaacaaggtattgcagcacaaatagttcaagttgtaattgctggaaattcatttgaaattcctcgggaacttcttaatggacaggtgaggaaagttagatatctactagacataattttaccaatctttagattattacatttaacttcctctcttttggaagatatgtttatagttagttttgaataaacatgttatagaaaaagataggtaaatgtaagttgtgcctcgtttgggcccccaatgtttgtctgcaatttggcacttcattttatatccttacattctcatagtttaccttctcccagatgtggttttgccaagatttattacagtgaaattataattcattgcctcttctggtctttatccatattttgcagactttggcttcaaaggatcaatcaaggttatctgagccaatcaaagagctggatatcttgttgacccaggttcttttgtccttctgagtgtgaacctactttgttttcttaatcgtgaaatgaaatatttatctttcacttctgctagattgctgcaggtttgcctgtggacatcatgccaggtcttgatgaccctgccaacttttccttaccacaacaggttgttgtttgtccatgctagaattctattagctgttcttttttttccctttgctgatgttctttttcttgcagcccttgaacagatgtcttttcccaggatcatcagcttataacacatttagatcttgtacaaatcctcactgttttgaccttgacaatatcaggttgaaaaaatggataaactttgacttctgctaatgcattgaagggaatttgatttgacattattatcttttaattttcagattcctaggaacatcaggtcagaatattgatgatcttgagaagtattcagaagcgaaggataaacttgagtttatggaaaggacattgaaatggaggcatctggcacctacagcacctaatactctcggtacaaattaacttgcatttctctctctatgtaactttttgccaattggacctgtttgacttggaaaatttctttggttctctagccagttttttgcattattattttcccaagaacataaaaatgaaaacaggccaatcaatccaccttttcactgattgtagtagaatgtcataccatcccttgcaaaggctatgtcataagctattatttttatctttcagggtgttatcctttcactgatatggacccctttttgattgagagctgtcctcatgtttactttgttggtaaccaggacaagtatgacagtcgcttaataacgggtattctcttgtgcatttattattgtcaatatttttttacactaaaatgtagaaatataatttatcttacatttgtatattccttctgcttctcatttgattacctttctgactgtaggatctgaagggcaaatggttagactcatttccattcccaaattctgtgagacaggcgttgctgtagtggtaagctgttttatctttacagtattacccaaaactgtcgtagttattattaatttatttggtgtgaatcaactaaggcatgaaactatcatctattggcctcaatgtaaaatttattgcactacttttggctcttttgttcgtagtttacagtacatgtaggatctattatattgaattttatggacgagtcttttgtcacaatctgagattatggtcattttcatttgttaagctatttttattaagacctcaaatgatatatatttttttttcgatttattattatttttcaatactaatgttagttttatcattctcaatctgtagctaaacatgagaaatctggaatcccatgctctctctcttgggactcaattaatctcatgataccataccaaactacgatatggtaagttttgacaatcaagtaatgctcttttaacaagtgatcatcaaaggagtaggcaaaatgaaaatattatgtagtttaaaaatttattaaagtagtttgaaaaacgatctccagtgttgtaatgggttctcaaaaattattcaattgatctggatatttttttggtaacttcaggccttagaagtagaaaaagtttcaaagttagattaaggaactggtgaatggtgatttgattggatgaatctatggagcatttgcttgccttgtcatctgaatatgttatttacaatactcggtattaagaggaggctatgatgttttattttcttaatttttgcttttgactgttaaggtactacgttgacatattttctgatcttaagtttttaagtttgtttactatgtttcatttctttgtattgattgtatcatcaagactacagtcttaagtggttcagtatattgccaaatcttcttctttccaaataaaaaataaagtaataattaatgctatggccaccatatggtaccaaacatattgagttagatatattttaatttaaaatagagaaaattatgtaaaatatgaatttttttaaaaaaaaaaatgataaatatggaaaaattagaaatttattaatttatggcttttttttaatataagttaattgtgtgggaaaatattttatatttataagtttttattaaataaaacccaatttttattttattaacttatgt

SEQ ID NO: 189251 - DNA, 4771 bp, Cannabis indica
gaacccatctgcaaacttagcacaaaaacgcactttcatcattctaagattttaaatgacaaaaattcaaacataaaaaactgaaaaatattgtccaaatataattcacaagtataaagatcataactttacaacaatctccaattaaggaattatgtaaaaacaagaaagataaacaccaaatacgattagcagagactacgaaattagaaaataagagaaacccattactgtaattggatgataaatcaaaacccagaaaccaatttagcgatggagcaaggtagagtgagaaagatatacctagggaaggtgaagacgggtgtgaattgacaccgaaataagagtcttcgtgtttgtttgttttttcactttgcacatcctttttccccaaattggcaatagtatgtttctggcgattaaagccttttcctgtcaacctgtttgtttgtttttatgccgtaatttagacaaaccaaacagagattaagaagtaatgcttgtgaaacattcttctattgaaacacacgtgacccttttggtgtttcaaacgtgacattttaagggaacgtttgtttgctcatctattctttttccactttagatataaatatgaccaaaaagaagaaaaggaagacaagagtgaattcttttgttctgtttttatttatatatttatttggtattagtcaatgtcttctaacttgggtacttatacatcgggaagacttttcaatcaacgggacattgaagataaataaaagattagaattagaattagagagttccctttaaaaaaaacaaaattatctaaaagagtgttaaagtgacatatcatcattacatatttgtttaagaaaaatactaaaatatcaaatttatatgttttaatttcttatgaatgtgatcacattgttgaataaatgttgttggtggtcacaaagagtgtaaaatgctattggagtgagtaagatgaatatgttattgtgtgtgacctaaatctagttgtcttttacacccccaatttaaaaaagcttcaaatgtgatcaagtcaactaaagtagtaacgaaagaatttgttttacactaactaaggtcataatataaatatatatatatatatatgtgtatttgtggaaaactacactatattttctatgtatctaagttgtaagtggaaagtaagataatattaatgtaatttacttaagcatttaaaaagcatagtgaaaatttaattaaataacctaattaatgctctaataatagggaaatttagttcttttagaaagattataaaactatagtctatttttcatatgtacgaaattattttaaagtaaaaaaagaaaaaacttgtacacaaaagtgacataagcaatcaatcaaaaaatttcaaattttatatatataaacacatatatttattgaggaaaagaaataatgtggattgttgtccaaagtaaaaaaaagtatgaaaaacagtaaaaaaataatttttttctgtataacagtaaaattaaaaaaaaaatgaaaaaaaaaacagtatgagatataaattttttcaaaaaaacatataaaaaaattatatgctagctcttaagagtttctatagggatttatttaatcaagtgtaatagagttcttaattaataaacaataaataaaaataaaatttaaatattatcttattatatacaaataaaaaaatattttctaataattggatcatatcaatttttgattggattttaaaaatatcattcaataaccgatttaataaatttaaaatgtaagtattcctaacggtgtctttagggagctacacaccattgtgctagcttttctttgatttcaataacattctcactttgcaaataaaaagtttgaaagtgcatatttttaactaagtccttcaagttaataatgtaaaacttcataattaattagtgaaagtatagtttattctccatgtacacaaaagttgaactaataaaatatcaagaaagctccttgaagttcaaattttaggaactttttctgataaccatctaaaatgaattcaataatggagtcaaatgaagaaaccataaacacttgttgcttatttctcaagattctttacaactttttagataaattggtttattggttgatcataatctttgtttgctgattcttaagctaaaactttcttatttttctttctaactagtgtctgctgtgttcttctcaattttttactatttagcctttacaagaaacagtttagatttctacaaaagaatttgcttcaaaacatatcccaactagccaacttaagtggaaaatggatccacatagttttgagattattttgttaatatgaacctgtgaaattgtgaggttagccatcactacaagtgtttctctacagttacattctcaccctattcgatatttttgaagattcttgctctgtcttagctgatgaatccgaaagaagactaatcgaggcctcgtcttcagcttcttgatgaagttttgacacaaccaattggtgttccaggctaacagtaggaggcatagtaagttcaggttgttctgaaatgaattgcatcaaattcttttcctttacaagaactaaaatggggtacaagaagacccctaaaatgattactgcacaacttacaaagaatgttttcacagaagccaaacacataacaagaacaagcaaaattgcaggaggaatgcacagcattgttgcaccaaatgtttcaaagggaactctgtatggtctgtgaaggtctggcttttcgattctcagtttaatgaaggctgcaaactcgagtaacattccaatggaatataagaagttgagaaattccaatatttcttgaaagctcatccatgacaagaatatgactccagtagctgagcacaaaatgcttatggttggggtcccatatttagacctgcaagttttaacaatccttttaacaaattcatttgaagtttttcgggtaattaatagagtagacaagtactaacaaattcattgttaccttgaagcaaatatagctggaagcattcccatctcactcatcccaagaagttgaaaagcatcactactcatttctgcttcaaaaagtcccatgttggacattgcagcagctgcctgaatccaccacttgagccaaaatccaccaattaacaaaccaacttctgcaaagtacccatcactccactcattaggggaagaactcaaagctcctgtcccagcaagaagtggaatcaagtatgaaaaaaccaccaaaatcacagctccaaaaagtgcctttgggaatgtcttacttggattctcaacttccccagcaagagtacttgccttatcccaatagtttaaattccaaaacatactattgaagtaccctctccaatccacctttttcaaatccacaacaagccactgcttaggcttaattcgaggaattgaaagaacactcattacaacaaatggtaaaaagagaaaaaaatggctagagatacagcagaaaagccaactatatgtaagcctctgtagttcaagtaagtcaatgagactgtaattcctagtagagctgggattcgagctagtaaatgattaaagattggtaatgaatgtttaaggtaatcaaggaacaatacagggtaaagggcattgtccataaccccactaaaccatttccaaaagccttcttggaaaccccaaaagggtccaaaggctgctgatatccaaagcacataaccaccattttcagggaaacttgtggccaattcagctgttactaaagcttctgggatactccaaataaagggaaatattacaaaaccaagcaaagacagtaaagggccacctccagctctaactgaatcctctactccaaaaggacccccagaaacatcatagaatatcagggcaataagaggtagtaatgtcagttttgggtttttattcttaacaataggattctctgcattgcttatcatcattccctcttcaaccaaacactactaaccctttaagacccaagagcctaatgaagaaaattatcaaaaaaagtgtacctttattaaggattgattggaagagatcactcttgttctgcagcttttgttgaatctcacatggagtttgaaattggcagaatccaatctttggggtgaggctgaagttgaggatttaatgtttgataaaagtcaaattttgattgtatgatacaatacatgtatagcacacaatggaggcatgtgggaccccatgtgacgtcaattgatgattaaatgtgtccatattcctatcctaggagttagtagtaggacaactttgtagtttgtactataaaattatcatataataatgacactattgaatattgataaaaatattttgactcctacaggaagcatattcactattgaaaaagatttaattatatttccacattaaatattttttttaataaattatgaaattttattagtagaaaaaataataatttataatttaattgggatatttttttaattagagacacaatcagaataagaattaaaaaaacaaatcaaatactcattagtctgattctcaaatcgtttgacaaaaaaaaaacagatgaaaaaaatagcaacatcacaattgaccttaagaatacttatattttattttatccaccgcttagaagacacaacagtagaaactcttgcaacaaattcaacttcgtagcttgaacactcaaattgtataaagtac

SEQ ID NO: 189252 - DNA, 2861 bp, Cannabis indica
atttataactataataataaaagagcccaaaattttagtcctccaataattaatttaacaaaaaaaaaaaaaaagttaaatacacaaataattgaaaaattggaaaatgggtgaacaatttgtggtcccaagtgagacatgtgtaatttattttattctaatgttctgaaaggggttagggtaataatcatataggaggggtgagccaccctgatagtgagtgataatacccttttcagttttggccctttctcggaccttccgctcaccaagatctctttccttttcatcgatcacccaaggtaaatctttcttcctttttttcttctcttcattttaagaattgtatttcagtaaacaaaaagttcattctttattttgttgttgatttattttttctctgtggtaacaaataagaagaattgtttgtatgtatgtgtgtttgcttatcttggtcttgtttatatcggtcaatttgtcttggactaaaagtttctttgtataataaatgatctagctcactctgttatgtccctctaaattttgactttttcatggtataatgggatacacctcttaatgttattattattgttgtttaatgtttttttttccttctttctgtatgagtgtacaaaatgtctcaatatgttttgtgttgtttttggttcagatgttatgttatgtgaagtgaaaaatgctattgtttgattgcttagacttctgagggatttggattaatctgaacactgaagtacaataacttaggaatgacaaaaacgagtcattcccggtagtattgtcttgcggttaattcacaacaaccccttctcctgaaatctatatgagcctcatttgatgtataaacaaactcctactaataacttgtatagcactaagactttatggtacaacatgagatgaatagcaactagattgtgttagatatgatttagaaagtactcgaaactaacggctgatgagtagagtagcttattgtattattagaacgtagaaatgaggtaaggaaagtagaaaaggtacggtaagaagtatgtcgttccatttcaaaactaattaggaatgagtagtccatgttattattaatggtattaaggttactaattaaacttaattagttgttttctcaatctcccttgcctgctctgcctaatcttgaactgtatttgagacttggctgttgctttgggagattttagggagttacagtatccacaacaagaaaaaatcgatttttgtagttgcagatgaaatccagagttctaggtttaatgattggcccaaagtttgaaaccatatctgctaccactgctctgtgtgcttgacgtgctatgttgaagttgatggttagggtaatgcttatatgtagtactataaatttgacttccttctacaagttgttctagattctaggtataatataaacgtgtatggattgatacgggagtagttgatctgaacatattgagacatatatatatgatggatgataagtatacacttttaatataggatcttcttgacgttcttgctggcactgcttttagttgcaagatgtataaaataatatggaactcccctgttgttcttcccttatgttagctctaatgtcgacagatgaggaatgttactgcagtaactaagaaagattcacaatggttggttttgttactcagaatagaatctattcaatatttatagttttttaacgtatttagaaggatatgaatcttagttgcgtaggtatcatggtcacaatcttatatattttatattgacttggcttatctgcaatttattttgctttctacattaaaggatgttaaaacaacatacttttgttggtttcagaaatgagtaaatctcgtagagaatttagaggttatcatgtcatggaagatattgattcattccagatcctattgaatattcttgtaaatcatttgaatgagtagagagctactttttcttgaacttattatttcgttcagtttcacaaaaaaacttgaatttcttttttgatgccaggtgtaaaaaatggctactgtgagcatggcaacaatgaaacttacaactatttcttcatttaaaaccacaccacatagtagatcgcttgccttaactcagaatagatgttctctgggctctttaaggaaaacttctaaagcatttggactgaagtcttcctccttcagagtatctgcaatggcaaactacaaaatcaaattaataggagaagatggaaacgagcatgagtttgaggcccctgacgatgcctacatactcgagtcaggtgaagaagcaggtttggatttgccatactcttgcagggctggttcttgttcgacctgtgcagggaaactcatttctggatcagtggaccagtcggatcaatccttcctcgatgacgatcaaatcaataacgggtacattctgacatgtgtctcaaagccaacttcagactgcgtgattgaaacacacaaggaatctgatctctactaagtattgtgactcaagtagtggaccctcttcagatgaataagtaatggacttatgtggcttgccaactaagtggcaagccaaatgggatgatgttagctatgatgtcaatgtacacaccagatctatgcattgaattttatttatttttgttgaaactgaaatgctccggtgattttctggttacatatatattggcttgactcgaaaacattcacattacatttggtacttgaatttgatgttgatcttcttagtattttctctgtttgtgttctagacttcgagtatatatactgagtttttagcaaggttgcatatcatattcgttgttcgatgct

SEQ ID NO: 189253 - DNA, 3203 bp, Cannabis indica
aaatgaataaaatataagcgaaagaataaatttgtaatataagtaattgattttattttagttataatcggtttgagttatttcgtgttagttgtttttattcattataatattgttatagaaccggatctattttaattataactggtttgagttattttatgttatttatttttattcattatgttataaaatttgttatatttttttttttacatgaaaattggttatatttcaattataaccggtttgagttattttgtgttatttatttttattcattatataatagaaccggttctatatttgtttatatttgaaacatttacttttggtaactttttcagtgatttttttcggtgacttttctgacgactttttcggtgtcactaacttttctggcgaaacttattattgttttacaaatatctttttttacaaaaatatagcataaaaaatcccatataaatgtaaaaaaaaataaaaaaaactcataaccccataatattatttatttatgccataaaaaagtaaactcttataattaaaattttgagaaatttataataatttataatattaaaagtattattcaaataatctatttcatacgcgataaaataaaaaaattcaactcgtgcaataaaactgttagaaccttatattgggtgtgttaatttatttttttttgaatttttttaaaattttgtaaagaaataattataaaccctgagggcatgtttggagctttggatatgagcttgggattgaacaaacttaccctaacctatgtttggcaatttttcaagttttggttggattggacaattttatctatccttctaaatttttcctaagagcatgggactttattaacccatcaaaaggatgagttaatttagtccaaagttgggaatttttttctaagttattttttgaatgtatgataaaataaaataaaattgagattattttacaaatacataaaaataataaaaaaattataaaatacagttgtacaaaatttcaaatacttttacgatatatatgattttatttatagaaaatactatgtggtacttttgttaatttattattgatttttttgttacttatatgttattgttttttttattgttgtttgaatgttatatatttgttacttttatagtttttttttttctataaaagaccgtaaaaatataaaaaaatctttaaacgtaattttttttacaaaaataatactttatgtaattattccaataaaatttatatatttttttttgtttccattgttcaaaaacaattatatattttgttttatttacaaagtaattgatttaaattagaaaataatattatatctatcataaaaatattggaatattttttattgacataatttttaaaattattatttttattccatattatttaatttaaagtactatttccatttataaaaaaattatttaaaaaatagtttatccaagctaatacaatcctactctatacataccataccaaacggggccttaaatggaaatgttgagataaaacaaaatgatgggaagtgaaatcacgcgccgtgtgtagcgtgttaataatattgggagagaaaaccaaaagggcaagttctaaaatgcaatcccaaaaaacgtgtcaatttagtaacatatcgtaatgttaccaaataataacataccaaaaattaatttttataagagcacaaaacttttggagagagaaaatggaacataacagagtattaatactaatcattaataaattaaattattaaaaattaaaaatataaaataaaattaaaaaaaaaaggaaataaacgcggctgctgtatacaccgaaaacgagagagaaagagagaagaaagccttgctaaaattgattccacctattcaatcatcaaactcctcaccaaaaaggtttctcagggtatattgaagctttgatttcgttaaaagttggatttttttttggtttgaattttccttttcatctaattcttgatttggttttattattattataattaattttgggttgggggggtttttgtgtttctttttaagaaagaaaataaaaatgtttggtaatttgattctgggtttgtgatcggctctatttttgatgattttggttcaatttctatctgggttttgctctgtttgtgactatcccaaatgggtcacaggtagagcttcgactttggattcggattctggacggattgggggcttgaccgagggtttctttggatgatttcggttgggagcagggatgcgacgaaggggctagggttagggtttggtgttggtagtcttcgggaagatatggaggacactgagctggaagaaggagaggcttgctcctatcagaacagcgacgatgcgaacatcgatccagatgttgcttattcttatttggtaggggaatttatctcattattacacctttttatggtccgcaatagttttgatcttttaactgaaacttctttttagaattgcttcaacttctgggttgacttttattagatccaagctgtttaattagagtttgaatctttatccgattatcacaactcataatttgtactcaagttttagcttatgcttcaaattcagaatctttcatagaaacttagaaacttctaggctgcctaccgcaaaatacaaataatagagtttagttagatacccggtgtaggacattgttattatcacaacttagtttatgtaattgggttgaactagctactatctgctttcagctgagttgatttcactatcaggataaaattactttgacatactttactgagatatgaaagcaagctttagaatgtttgcgacatggctatctttgaaagtgtgagcttctgaataccttgttctttatgctttccatgcataattttacaacttgcaagaacggcccagaatatatttttaaccttgtagaggtgttgagttattttcccattcaactgtagagttataagctactgcgaaggaagttaatatggggtttttgatgtgaatcaaatgtattaaggaacctttcagaattttagtaacttgtgtttttttttttgtttttttttttattttttttgtggttgagggtaataacatgaattctagttaatcttgaagtgttgctgctcttggttatgaatggtt

SEQ ID NO: 189254 - DNA, 2591 bp, Cannabis indica
tctatcttttctacttttcatcttggtaccagagcctttaacgctcctgccatggcatcagacactaccccacagtctggtatggtcactcctcaaccgacaatcccacctcacctctctgcttcttcttcttcctcaaataccccctcctttaattttccttctctcaatcaatctcttactgtgaagctcgataacaacaactacatgatctggaaaaaccagatcctcaatgttgttatcgcacaaggtctcgaagcttatctagacggaactcttcctgcaccagatcgatttcttgatcctcccctcaacagttctctcaatcctaattatgtttcttggcagcgatacaatcgcctcctgatgtcatggatttatgcctctctctctgaagatatgctcgcccacatcgtctccttcaacactgcttctgagatctgggactctctctctgaatattttgaggccatctccttgtcgaatctgagtgatttgcgcacttctctccagacattgaaaaagaacaatctcactatcattgcttatatccagaaattgaagacgatttgtaatggtctcgctgctataggtgagcctgtttcccgcaatgaccatattattgctctacttggtggtttgggtaaagattacaatgcctttgttacttctttcaaaatgagaactgatactccctctcttgctaccattcacagcttacttattagttttgataaaatgattcaatctcaaactatagttgagcaattggatctcactcaagctaatctcactcatacaaatcgtcctaaacgccctttctattccccaaaacctccttctcctacttacccccttccatattctcctcaatcccatgtaccttctcctagtgttcttggcgtaccacctgcttctctacgaccctggcaatcttcttcttcctctgcttctccacgcccacagtgtcagatctgcagtaagttgggtcacactgctctctcttgttaccacagagctaatttctcttatcaaccatcccctcctactaatttgaataccttccttccttcttctgcctcctatactcttcccacaacctattcaacttgtactacccctcctcttaatcctaaccagtggcttatggactctggggctactcatcacttcacccctgactataatctcatggatttggctgctccatacacaggttctgaacaggttacggtaggtaatggtaagcaaattcctattactcatgttggtcattctaaattaactactaatgtttcctctattcagttgtctaatattcttcatgctccttctctttctcatagtctcatcagtgttacaaaattatgtcgtgataattctgcgtatgtcgaatttcatcctgatttttttgttgtgaaggatcgagtcagccagaaaattcttctccagggactgcttgatcgtggtctctatcgggttactactcatccttcccttcctgcttctcacactccagtttcatctcctcagttatttcttacacatacctctgacttggcgacttggcatcaacgcttgggacatccagcttttcctgttgttaatcgtgtccttgatttatgtaatattgccaagcgcaaatctgtttctcctttattttgctcttcttgtcaaatggccaagagccatcgtttacctttttcattgtcaaactcacgagctgctgctccttttgatttaatacatatggatttatggggttcttccccccttacttctattgatggttacaattattttttattgattgttgatgatcacactcgattttgttggtattaccccttgcattccaaagatgaggcatataatagttttctccactttcataaaatgattgatactcaattttctggcaaaattaaatcggttcaatctgattggggtggtgagtttcgccctttgtccacattacttcactctcttggtattactcatcgtttggcctgccctcatacatctgctcaaaatggtcgtgttgagcgtaaacatcgacatgttgtcgaacttggccttgctatgcttgctcactcctccttgcccctttccttttggaattatgcctttcatactgctgtgttcttaattaacaggttgcccactgttgtactttccaatgcctcaccatactttactttgtatggcaagttgcccttgtattccaatcttcgcattttcgggtgtgctgcctttccttttctacgaccctataaccaaaataagttacaatttcgttctcttgaatgtgttttcattggttatagctcaagacacaaagggtatatgtgccttcatcgtgaaactggtcgagtctatgtctctcgccatgtggtcttcaatgaacattcctttcctttttgttctgcctcttctcctacttcttcttctcctacttcttcttcatctcctcctattctcattccctgtccctccattccttcttttcctgcttcctctcctcctgtgtctctcactcctcttgctccagcttccccttctccactttcttttccttcctcgtcctctgc

SEQ ID NO: 189255 - DNA, 1067 bp, Cannabis indica
tattataatattataaataatatttagaaatttatgcgctatattgttttattctttttttttttaactctgaatttatgcgcgatattattgaattaggacaatgacaagtttttatgtttgattaatggtcatatcttaggtttttttttttttttctaatgaatggtcatttatcttatttaatatatgaaaatgagaaagaatattattgaagaacatttaacgtaaaagtagaagagtagcgtgtgtgaacttatgaaaccaacaagggcttaatagtcatttaagaacatgatatgctcactcaagactctcaagatagagaggtggcatttactgcaccatttagatttagattatctcagcaaaaaaacaaaattatgataaatattaaaaaggtatacttagcaccaattaatattcttattttatggaaatacatcaaacaaacatttcacaatatgttatcaaaaaaaaaaattaatcagatttgatcattgacaacattcataaaaaaaaaaaaaaaaatcagtagcatagcactagcaatctagcaccacactgaaacttgcttaaactatttggatatcccgctggtgaagaaactaacatcaaaagcgttacgtggcaggccatgattggtgagagtcctccggttcggcacgcaataaacagagcaagttaaacactgtgatcacagccgtataaggataaattgattgctggatgaaagctacgtgtggtaacagaaagggccacaaaccagggagcttcagttattcccgccaacaattgatgcttatttttttctaaataaagaaatatgaaatggaaaacgctacgcggctaagtaaacaccaatgaaacgatgagcagaataaccacagggccccaaaaaactggcaggtagggaccggactggacagaagacacgacgagaagatgacaaaaatttgaatgtcgtttctgggttattgatgtaataaatactcagaagcaaaataaaaagacaaaattgattgatccatatagataattaatgttcttttttctttttcattttt

SEQ ID NO: 189256 - DNA, 1906 bp, Cannabis indica
gctgtaccagttagtagacacaactcaaagtcccagcctccaagacccatttcagtgtcatcatacctctgttgcaccagatagttgtattttgaattcttgtcaatgtattgatatgcaaaccttagcttgtaatgaatttgcaattaataaaatggccaactattcatttgatttctatccctctgtatttcatacatttcaccaaaatgacatcaattcttggcactgaaaacttggtcatccgaatcctaatgttttgtctaaaattttgccactggttcctcacacaggaactctaaaccagctgcaattttgtacagcatgtcaactaggaaaaaaatcataaacaaccatttcctttatctcttagccgagcctctaagccactagagatcattcacactgatctttgggggccttctcacattacagccaaggatggctatcgatattatgtccatttcctagatcactatagcaggtacacatggatctttcctttggttcagaaaaaccatgcctttgacacttttattaagttcaaaagcatggttgagaagcaatttaacttgcctataaagaatgttcaagcagattggggtggagagtataggatttttgctcgtttcttgagtgatcaagggattcttttcactcattcatgtcctcatacacatgaatagaatggccgtgcttagagaaaacacaggcatatcacagaaacaggtttaaccattcttgcacaatcgggattggactttacttactggtggtttgcatttcagtgtgttgtacatactattaacaggttgcctacacctgttcttggtcatatctctctgattgaatgtttgtttggcaatgtacctgattacacactcttgaagccatttggttgtgcctgttttccctacttgcgtccctacaatcatcataaaatggagtacaaatctcaacagtgcctcttgttgggatactccaacaaccataagggctacttatgtgtgaaaataaagatggaaggctttttattgctagacatgtggtgtttgatgaaacttgcttccctgctcactcctcggccaaacacaatcaggtatcatctaattccactatccctcttactgctgtgttttcttttccaactactaatcaccattctcaacctgttatgcatgccactgctgagccctctgcaattccacttgcaccagctgtgtccaacaatgctcctctgcatactgcccaaaatgtcccaggcagtcatcttaacttggcatcagctcctattcatcatatatctgaggaaaatattgctccacagcagccccccattgttcccaatggttctcatgatcaagtgactgcggccaatgacccacctgttgcaccccaggttactatagctccccacatatctcccactaccaatcctattctcaataacactcttgatcaatccttgagtcccactgaaaacaaccataatacacaaccttgtgctactgctactaccccctcatgcacacattctatgaccacaagatctcaaaatgggattgtcaaacctaaatcatatcttgccacaaagcaccccttacccgaatcactacttcccagtgagcctaaatcactaaaagctgccttaagagatccaaaatggttagcctccatgaactctaaaatcggttccctcaaaaaagcttcaaggttttgaggattctgcccatcccactcacgtttgccatcttcacaaggcattatatggactgaaacaagcccctcgggcatggaatggccgactcaaaaccacactacttcaatggggttttcaagcttcaaggtctgataatagcttattcatctatggctcgggcaactcattggtttacctattggtgta

SEQ ID NO: 189257 - DNA, 1484 bp, Cannabis indica
tattttaattaattgtgataatgtgaaaaatataattgaattcaaaattctaattaaccatcgtgaagaaaatataatagttcaaactttttattttttttataaatatatatataaaacctcttggtcgagttagttcgggttgattggacgggctgatattttttttaatcacccaatataaagattggacagattatattttcgtcgggtttttcagtttgtattttttgtcgggttattcgatttgatttgggcagattattcaagttgatcagtttataaaaatttatgtacaaccctactgacccgtctattttgttgtatttttgtcataatttcaattttgtttataggactagttgtagtaaacatatatttctcattaattttttcaagtgtacattgctgaaatcaagcattacgttagaaaaatctactattatttaatgtgactacacattatttttctacaaataatgatattgaaattaaatatttgtcaacaaaatattatttttagattaaacataatttttaataaaataagtgacatcaaatctatctttgtacgtaattgctctttaatttatttaactattcgtgaaaggacttgaatgcttgttaattttgggcaaatttgataatgtattttctttgggaaataaagtacaatatcctatgattaaaaattattagagataaattaattaagtagatgagaataaaagctaataaacaagtggaagtatatagctcagtaagtgttaaaaaaagaccagaaaatataattaggacaattgtggggtataaacagaagtcattctttgacttttatcaaagtttttgggttgaaacttttgactatttatatcatttattgcaaggaaaacacgtcatagttaagaggtgtacgtaagaacaagataataccaagtcaaaaatggtaatactaattaatcatatataaatatatatatgtaccctctaattctaattaagtataataaaaacatgtttagattagtaggcaagaattaatgttttttttctgagaagaggcaagattgatgttagttaggatgttattattaagggagaaaaaatatataaaaatggaaatgtataaaaccaaattaaattccttacatgttttttttcttgtagaatttcttggagaaagataaataaataaataacaaaaaatctttgacaatctataagacatattttacaaactaagacaaaaaaattaaaataaaagaagtatattaaattttattcaaataaatatatataagaaaaaaaattattaaaagctgtaaattattcaaaaaaaattaaaaatgcataaagttctttgtaattactgttaaaaaacaaaaaataaaaaaaaagaattataattagagctacttaatagttattagtaactattaactattagtattagcagtattgtaagaccatctccaatgtaaaat

SEQ ID NO: 189258 - DNA, 2193 bp, Cannabis indica
tctctttccccgctcctcgtttctcctccatttccatctccgccgtctgagactccgctcatcgttctcgccgctagtcctggtttcgtttctccctactattgtgttttagggttttatttcttcattttcctgctttcggaaggtaactacagcagatctcgtacttaatcgctcattttttttccttgagaattgttgggattatactgattgatttggttgtggttgttcagttctatccctagctttaaagatgaagctcgtcaggtaagtgattttatacatttctccctgaaataatactatcgtctatgtactgtgctaatttgtatttgacattaattttacaaatgaacagattcttgatgaagttgaacaacgagactgtgtctattgaactcaaaaacggcaccgttgttcatggcaccatcacaggtttctttctgctccacctaatttattattgtttttccacagttaggttgaatcgccttttatatgaacgataattgactatttctctggtgcactgtaatgggaaacctatactgggagtactcattttgtcttccaaattgttgtgtagaaaaaggaagctaagctttgagaaatgggtattcgctatatgcatatgtgagtgtcatttgtgttttgtttgtatttttatactaatatattccatagacagtgtctgacaaggtttttatggtatatttgtatgatttgcaatttcggagagggtttgtcttccttagggttttagatgtttttccccctttctaagaaaatcttcagggatgtgtgatctgtatgtttgttttaacgatgctattgtgaactttatcatattgagttaaaaatttacatggtaccctgcaaagtgaagctagtgaaattcggcaactctgcaaagttgctgaggttgagttcttactcttgctttagccctttatgtcaattttgaaaaactttttttttttcatgttgtctggatcaataactcttttagacgtattgaagtaattcaatatgggttgaaggtaagtgaagagttaacgggttcacatcgtagtgtagctcctgtaatgtcatacaatatacaacaaccctctcctcgaggaatagctgtcatatttgtcctgagaaatcacatttctctttttgacattttgaagttccggcatgtattctttagttatgagtgttgctatgattaaattaccacatatgcaatttccataggttgaattttcacacaatagatgtttattgttgtttcatgtttctgttttcatgtagaatgttcatgtgatagtggcctaatttatacgccaagggtaaagtaaattactgtatacttttacatggaacttactgactttactggagtcttaagttggattcgcatgtttccttttttctaattgtttgaattatggctggccacaggagtggatatcagtatgaatacacatttgaagactgtgaaacttactttgaagggaaagaatccagttacccttgatcatcttagcgtgaggggcaacaatattagatattatattcttcctgacagcttgaatcttgagactcttctggtagaagagacacccagggtcaagcccaagaagccaactgctggtattgtgaactactttgtagcatgtttccttttgaccctgtcattctacttttctatgctttacattttgcatgtactatagtactatactatgctactattacttacaattcaaatggttttataaattcagggagggctgtgggacggggacgtggtcgtggccgtggaaggggtcgtgcacgtggccgttagatacattacactaatttcaattctcaaggcacatggttatgtaaaaacacctatgttgtaatgaagaacttattgcagatcttttaaggtaccaaaggagtgacaatgttggttactccatttagttgtctatcgtgggtgattttgacactaacatttcttgcttgtagtgttaaattttggatgttgattcaacgagaattagtactcccaatattttggctggcagggttcattgatcaacctgccccattaccaaaatcaaccattgatggaatttttagtgatttatcccatacagccatatcaaaagttctcgcaatgaccattccaagactactccagctttggta

SEQ ID NO: 189259 - DNA, 3512 bp, Cannabis indica
gattactaatatatggttgatatatagagaataattctatggtagtaacattagttttgttctcatattatagagatattttttaactattgatttatatgacttttgaatgtacgtcttatttaatatatagtttatgcataaaattaaatcttagctttaaaagttgtgacacctcttttaaaaaattaaaacaaaattatactgacataaaatggaagttgagactttttaataaatatataatattataaagaggtagatacccctattttcatcttcttcaaacaaacttttttttttgtagaaaaaaaaaaaagaaacttcttcaatcaaacttacaaactcgcaatcttttatgttctttgccttgcacctaagtccatcaaaacgacgtcgtttcaattttagagcttcctttttaagggattctttttcattagcccgaactactactttcaaacatggtggaaggaagtctttacgatttgattgctcgtgctcaagcttgaaatcagatgtgaatttggaaaatcaatccaaaaaataaagaaaacaaagccacaatttcaacaccttgtttacaaagcaatctttgagggagatattttttgtgttcccaaaaaattaagagcatcattttgcttaatgttgccactctctgtaatctgcctatttcataattgaattaataattatgatatagttagaattttatgggttatgagtaactcatcaaattcttagacgattactatagatatttaacttatgtcaaaaatttaaaatgtttgaaaatttcttgagtttctagcaaagacaattaagaatatcataaaagatcttgcaaacttataggagtatagaaatatttgatatgtagttcaaagattatttaaataaacttcgaattgtaatcgaactttcctcctcagaatttcaaagtcgtatattgatgaaatgattaggtatatgattagttactagcagctattaaagttcttctagggatatgcctttgagacaataaacatattttaaatgtcatcccatctacgactaggtcccaagacaactttggattgatataatggtcaaatacttagtgtacactattactaaatttagggatgccctgtgagtttctcgagacactccgtataatttttcttgtgtctattctgctagctatcgcattatcgggacatgcaattttttctttccccgaggcaatcttttaatatatagtgggtcgcttcatctatatctgaacgtattttgactagtattcttcaaggtgcctcatattgggtcattcaatatgcaagccaaattacttcaagaatttaatatgcgtgccatatgtttaaacacccataataattgctcgaaatatggttgtaacaataaccaacttgaagataattcttagcatgaatagatgcagaaaatataatcagttttatcataatacctctagatcgagtgattattatgttttattttgataaaaaaaattaacttagggtactatttaatactattttaaaaattaaatagtctaatttgtcatgtaacaaaacagatggtgcaatagacaatttttccaaagcatagggtttaaaaactaaaaaaaaaagactaaaatatacaagtatatccaaaatacaagagcattgttatgagacactcatggtgcttagtactacaataaagtatcgtcttataattggttaacaattttctacaatatttattaaaataaaagaagtaaaacttaatattaaattgtatcaatagatatgattagcatttctcaaaaacacaatgtttagcaaaaacaaaaaagcatcaaaaacaagaaaggtacattgcatccctttttagaatgcaagtgaaaaccacccaatactttttgtaaccaaaaaaagaaaaagaaaaacgtcattccaagacacaatgaataacacatttaattaatgagcaaacattagtagtgtttagtactttctagacgtgtcacattgtaattagctagcgatctctttaaaagttattacattaagctatatgagacttaatacttaattacacttacaatgatagtaacatgtaggaggatgctaagcactactgataccttttagcatttttcttaattagtttaagagtgggttgagttgaggtatgtaacacgctcaaagtcctttaagtcagctcgcaacctactcacacatcatattcatatattacgcatgttgcccactaatgccacattctggttcaccatgtcatcggatgggatgtcctcaccatctacatgttactcacgtggtatataaaaaataattattaatacttaattcacaagtttctaattttttttaataaatagatttaattacactaaatagatgatatattaaatatgtaaatacacttggtgcttaattgaggccctatgaatgtcctatgaacctcaattaaatctctagagattcaagtttgaagtctcctccatttccaaatcctcctcaccactagaccaacctagtgactaatttttcacagtttatgttccacttaaaaaaatgtgtaaaagattttttttaggagaaaaaaaaataggtgcatcctatgaggtagagaaacttgagaataggatatgaaataatactaaaccccaactatgatttggaaatgaatactaagaggatagcaatagtgagctagggtttgatagtcaagttctcattaatttttagtaaatatttttattgacaaaaatttgaagatatgcttatcaaactgtttacaatagaatagaaaaaaattctaacagtaactttaactaaaagtttaataagccacgagaaattaaacataaataataagaactatattaggtttccaaactaaatgtgcgtttgacaaatttaacccatcaatggttatcaagatcttctaataagcattgggacacaacaatcctattattaattgagaaattttcaaaaatacccattttttatgtttatttacaattttatggcctaaaatttttatttacaaaaatatgcttgtaaaatttttaaattacaaaatacactttgctcaacaaaaattaaaaagaaaaatgagaaatcaacctcacaactataaataaattataaaataactagaaaaataatctcatgacaactataatacaactataaagaaattataaaacaaccaaaaaaaatagtttattatttttagtaaagagatattttgtaaataaaaaactttaaagcgtaaaaataaataattccatattaagtatttttgtaattttttaaaaaaaattttggttaattatgtaatttttttatatataaatcacaaataagagaaatagcacgaccaactatgttataaaacttaatcacaaagaattggttcaggaaagataaggtcaataaagatcttggaatccccaagatctaacgaccagagagagagagagagag

SEQ ID NO: 189260 - DNA, 5324 bp, Cannabis indica
ttcgtttgaatttcattgacgcctactcgagttttggctttttcgtcaattatcgacatgtcgcgacattgttcaatttcttttcgaaatgttatgttagttctttctattcgcgatgttttcacaacatggtgcgacttatttgcgagttcgttttggtcggatgtgcattttgaaatgttagttgtttagcgatagtttcatgatgtgttgcaatatggtttgcgacattgcaggaaatatcccatgttgatattgtcgttatacgtatttagctgtatcgcaaattatgtcgcgttcatttcgtgaagtatcgcagaacactgggctacgtatctgcgattctattttgcgatgattcacgacttatttgtgattcatgttacaatattcattttattgatttttaataaaatttcttataattttgtagatggttcctgaacttaaacttctagtttcccaacatttcacaggacatcttacctatcggggtacaaataggtttagagatatcaatgccaagtttacaaagcttaagttgattgatatgattaaggctagccctttcggacacttctgggaagctagatagttgactttctctggcgcttggttccacagcctcctcttacggaagatgaaagtagatagtgaaaaggaagatgaggtttggtttcatataggcaaaaatgatatgagattcggatggatagagtttggactaattaccagcttacctatgggtagtgcccttacagaggaggaaatagaagccaactccaacgaccatctagtttggacgtattttgaagggaagagttgtgtgcagttggattcaatgttgctccaacttgagaggtgcgaagtaaaagatgatgcctacaagcttggactgatcgctttcattgaaggtgtattagtatcaaaagagggcaatgtccaagtttggcctgacatgttaaagtttgttaacgatcttgaattcttcttcaagtatctgtggggcgagcgtgattttcgtaagttgatgcatacattaaataagaatatgcaatattacaaggataatgttgacaagaagaaagggaagaaggttgctcatgaggcaaagtacactataagtggctatgtacctgtcttttagtactgggcatatgaagccatagagaaaatgggcaagaagtatgctcaatacagtgggaccaggttcccaagaatggtaaacaggaaaactccggagggccaacagaaataagatgtaaaggcaaccgatattgcactattgttcaacactcgggtgtgtttcttttctgttttgcaatttttttttgttaatactagtttaaaagtaaaattattagttattcgcggcgtaccacgacttcatttacggttactagatgtatgctatatttgcaaaattagtttccgatttgcgacttgtttcgcgatattttgcaatatcttttgcaataatcatatttatgcttacttttaatgcgtgacgtgtatcatgacagtttgtgatattttgcgttattttccaatttcatgctatatatgattttgcgacatgtcgcgattatgtttgtgacattttcgaccattttcaatttatgtttattttttttttgttttccacttagtcgtaaagaagtgtttgtttccccgacccagtaaaaaggaatatttcaagtcaattaatgagggtaaagctcttctttgttttgagagggacaacgatcaaacggtggagggggaccgtacacaagagtttgtgtttcaaggtcaagcgaagaccattaatgaggtcgtgactaaggcaaacttagttccaccaccaccagctccaaaagtaaatgagccatctacatcagccactccgtgtgctccaacctatacatttttggataatgacctggtaaagaggttggatagactagaggcccagtaggctgccatcatattctcacagacgaagttactgagtagccttatcaaaataaggcggttccttacggagagtcagaaagatcttatggagagtcagaaagatctgaaggagactctcttggctaagatggacattttgatggcaatgttgaatctgaaggagggggagccacagccaacccaagcaatggaagatttccgacctgtggagagcgataatgaagatgtgttcccagaagattaggaaccagataataatgagacaccgtctactccaacagaagcaattattacagccattgctgatacggatcacagggcaatgtcctactcctacttgaaagactacactgaggaaaagaagaagaggcgagttcttccagagaacgtagatctaaaaagaccagcagaccatagaatggtacgtacgctaaagatgtggttgattaaagacattcccaatacctgtcctaggaatgtgcacactggcgtcggtgatgtgaagttcttcacaaagttattgttgatgggggattggttggacgatggtgtaagtatttaattattgtcctcttttataatgtttttattattttgtgttctctgttatttttatcgaatgtcgtgacaaaaatgttgtccatattctgattattttttgtttcacgttatctatttatcaatatgtttgcgactttttgcgatattttgcgacatatactgtcctcagcttgtggttagtatagtactttcacaacatgtagcgacatatagtgatttaagttgcaatgaactgcgacttgattcacgacatctcgcgatgtagattgtgatatgatgtatttgatgcaagatttgtcctttagtttaatttgatggtctcattttcatgcatcatatagatgccatttcacacatgcttaggaggagacgcagtcaagcatggatcattgtgcccgtattgcgagtctcaccgatacagtaaagacttttaaattgatatgattatttattggctagtattaaagtttgtttagtctttacatatgttctacttattttgtctttactcatgtgtaaaatatttcactagtttcatctttactcatgtgtaaaattttaaaattgataaatgtcgtgaaacatatcacaaaatgtcaccttttgtcgcaaaatatcgcaaaattttcaaaaagacaaaaaaatccatttatgttttctatgttaaaaacatatcgtcaaatgtcgcaatatgccgatatcatcatgaaatagttatgttccaataaactatttatgcttttgtatatcacgatgttaatcatgaaatgtcgcaacatgtcgttatcatcacaaaattattatgttgtaatatgttgtgcctaaaatcgcagcatgtcgcacgatatcacaaattaaaagacaaaaaaaaaactatttatatgtttctctatgtcggaaaatatatcgttaaatatcacaatatgtcgatattatcacaaaataattatgttcaaataaaactatttatgtttctgtatgtcgcaatgttaatcgtgaaatgtcgccacatgtcgatattatcacaaaattattatgttccaatatatcacgtctaaaattgcaacatgtcgcacaatatcgcaaaatatttccctgttacaaatctaaaaaatgattcatattctttccatgtcgataatgcaatcgatatatatatcgcaagatgttataaaaacatacccgtaaagaaaaaactacaaaatagatttcataaaccatactactaatgcatgcaattaaaatacaaaaacgatgctcaaaccctggccttgtatgtagctttgttgtagcctaaggtgccacaatttgagcaatagcgaggttccacgactttttgaccgttagatggatatcggttactccatattcttcctgtattggtcttcgttggatgacctacgggtttcttctccactggtaccccgactctcatggcctgcatgtgttctagaagtacgcaatcatcctcctcaccgacaagactaattgttgcatcgtaagtattcttccacgcctcttttgtgtaatagggggaggacaaagcatacaggctgacattctaactaagcaccgcgacacatgcatggggacgaggaatttttaacagttggaacattccgcatgtgcatgttctctggactaagttcacatcaccacttttctcacagtcagaaccctcagaaccttttccaacattgaacaattgtgcatcgttacgtaggatgcttctaaatctaccatcctcgtgttgctttaccaaatcttcctcaaaatgagttgccaaaggggtagcgcacttaattgcctttttgagacattcagcgaaccaatttaacagtgtgaaccttatgaactcaactagagtagttattggatatttctagaattcttatgtcagtttgttgaggctttcagtagcgttgtttgacattatgttgtacctgtcgcttgaataataaggacgagcccacttttccaatcctatactcttgacataagcagcgatgacaggatccgtctgttgaagcacctgtaaatgtctatcacattccatctttgaccatgcgtaagcggccagccatatttgcgtgttacatacatcagtcttgaacttgtgggtgacattcatagaagtatgtttgtagcatgaacagtgacatgcttcgggaaaaataacctcaatagcatgttcaatgctttgatgcctattcaatacaaacactaaattttcaacaactccgatcgcttcccttaatttctttctaaattctattattttcagtatgaaacgtttgttggctttgtttctttggctaggtacataatgactatattgcaaaacaagaaagaataatgttatagttgtttgcttattatatatacttcatgacacggttgattaggctaatgatcattggtgctgtttttattttcttaaaaatgtgagaatttacaaaattcaagtaatttgatgatagtcttgtacataattaaagtttcttgtaaatacctaaatatttagggtaaatactattttagaccctctgttttgtaaaaattatcaattggaccttttgttttgttaaatgacaaaatagaccctgtatttttcaaaatggtacaaataggaccctaaactgattttttgttaaaataaaatttaataataatccgacctaaaggttttatgacaaaactgtttacattttctgtatctgttcgtgttagaaattttcttcaatttggttatattaaaaaaaaagttatcaagaaaaattcatgtttgagtacaacgagttcgagcg

SEQ ID NO: 189261 - DNA, 1867 bp, Cannabis indica
taataaattatttaaaaaattgagcagaatacaattaaaagatgatatttacaacaatttttatagttcaaaaacaaaactctacatgaattataggagaaattttatttattcaattctaaattaggcagtttaaaattagagatgtttgcaattccaaatttatattaggtgtgaaaatgtacaataaaagtcccttttcttgttttctttttcttccaagaaagttttagccttcatatgtagaagtagatacactatgtgaaactattattctttcatattttgttcccatcattttaatttgttgaatgaattttgaaattgacattaaacttattcaatttctttacagtattctataaaaagataaaagaaaagaaaaagaagagctaataagactgtcgtttagttttatacaggtggagttgcactagcagcagcagcagcagcagcagcaggaggagagccaggaaccgatgaaacggtgtcgtttttatgtcttcctgtagctctaatgtagcaaaacaccgccaccaagaaggtggtggcaagcccaccaagaataacacccccaccagctactgacttattgattgaatggtgatgtttgctcaggtggacattttcaacttggatgccctcatggtgttcgacgaattgccccaatggggctttgtcatgatgaccagtttcttttgagggctcagcagcatcttttcctttacttgggcttggtgttggttcactggaggacatggtcacctcaggttggtgttttcctagctttcttattgtatctgttttagctttgtatggacttggggctggtgagttgtttgataatggttttgagctagaccaaactatggtctgaattttttgttgagtttgagctagacccagataagcatttgagaagattaagcaaaggagaagcaggtgagccattttgaggattggttggtggtgtttggaaatgtctgtgttgtgaagctatgagaatcagtattctggctttgggtcttatataagggggtttagattgagagcatatcatatatgatcgtgtggtttgatggaaatttcccttttgtcagattccatgaatagtttattcaagttttttatgtgatttgatttaatggaggttgtctgtagaacaggaaaacatggaggaaatgcacgtgtaagcaagcattagaatatttcgatatacaactaagatttcaatccagggaacaagatatctattgtatttatttgccaactcaatcaatttgaaatggaactcatatgataggtagcaaagttaaataaatgttctatttctcattaattatttataggaagatattcagaacctgctttatgttacttgactattctcttatagaaatctaactgttgttatcaattattagacatcaataattataacaattctttaaaatttctgagtgaattggaaaacaataaaagagaaatatttattggtccttggattataccatttggtatgacctgtgtttatacagttttacattagcaattcataggactactacttcatgggacagtctcaaatattcccaataaacaatctcatctggccttgatttacttgatttgtgctcttagaattggaatgataatataaagaaaagttaactgctctgctcatattctgaattgtaaaaactacactcaaaaaatagattgatgtaggttttgtgtccaaacattgtcagcttgaagatagcaccaatttgtctgtgtcttttaaacatttttgaaagcactgattttaagatgttggtgaatgaatagctaggtgacctatgtctctttttatctttgcctttgg

SEQ ID NO: 189262 - DNA, 1670 bp, Cannabis indica
aaaatgtataaaaggtgcatcggtatacttattttatgaggtgcatttagaagcacttaatatgatatacctctcgaattatgattttatagaatttcgactaagttaaaatggttaaataaattctactactgcaattatagtttataagtgataagtaaattattttaaataaatgaacaaaatataactcaacaaagatatttgcaacaattaaaatggacaattttgttgggtaatacttctgagaaaataaatctatttattcatattaaaatttacttatttttctttttattattattattattattattattttattgaatgagataataatggaaaaaagaaaacgacagtgaatgtaacgataactaacaaacttgatacggacaggaagacaaaacagaaaacggaaaacaaaacataaacaataaaaacgacaatgaaccaaaaaaacgacatcaaatataaagaggcctcacgtcacggtatttggcgttgtaatgaaacgacatcaaaactgcatcaagttgcaataaaacgacaccaattataaacgacaatgaagccaataaacgacagtaaaaatctttcttggtgtttgtagggaaatacattcccccgcttcttgcactcgcgtcatcatcacgcgctcctacttaaagcatgcatgaataaatattaaataatataacatgttattttatttttgaattcacttactttgtataactgtttatttattgaattaataataaaagaagtttatttatgagttaagataaagtaataataaataaatagcatggatttcttgcacttcattaaatttaataaccaatcaagttgatgcacccaatattttttttaatacaagtgcactatatataatttgttctttaatatatttaagtggtctactaaatacatatatgattatttaaatatatttgtaataggcaagaaaaatttacaaaaaattatcaaactaaattaaattacaaaataacttcaaagaaaagttataaatatatcatcactttagttaaaatatcttatttaaaaaaataagattactaaagatatgagaagtcttactgtcaacaatttattataatcttttactcgatttctgtactcgaaaatatatatcaaaatatttttaatttttaatttttgtaaatttttaaattgttttgaatgatttacaatgttgaaaatacgtttgaaattttttgaacacgcatagtaaattagaatattcgaaactctacttttgttactgtaaataatttaaatttttttaaaaatttacaaaaagaatactataattataacaaatactattaagaaattttttaataaaaaaatattttaatatatgtaatttcaaacataaaaattctaatagctcaaataataattagcactaattaactgcacaaaatctttgttttatatataaatatatatatatataataataatacccaaggaagtaggtactatatatgtcaacataaatgttatccttttgctcaaataatcaaaccatgagctttttccttacatggcactcattctatcactctcaactaaatatatttaatatgggatagtggaagtttagtcatatgtatatatgaaaaataaatgaatatatatat

SEQ ID NO: 189263 - DNA, 3767 bp, Cannabis indica
agagttttgctttgatgcccacctgtccacggtaatggaacaaacttatattccatcgagggctgaattcgtctaaaaacttcatcagcgcaccaggtctctctgggaatatgaaacggcaaagaacctcgtcttcaacatgtgatcttcctcccatctgaaagaaactcgaaacatggtaaactaccaaaatgacatggccacattgttcattggaaaagaagtcactctccccatattgatagagggaagtaaagaggttactacttataactgacagacaaagccgagttaagaaaaataaattaccaagtaacgcaagtggtctttaaccaggtcattatcagtgagattgtaagtctttagttgagaagactccattcgctcttgcatttcactgagttccgaaactgtgtgaactccaacactgcatagtatgaaaaagttaataaaacgacccatgtgcaaaaaataaacagctgctagagactgagaaagactcctcagaaaataaatgaaactgaacagaaaatttgagatctgatcaatattcacaaatcgacaagcagttacctgtacaaaacaacagcctctttatcggagctgtatctatatttaaactcagtaatgttcattggccctacctgccaagacgtaaattgacaccataaatgcgagagttgtttaatgagaaagttattgaagtcacatctacataccagttcacaaaactgcttgaagctcccaggctcctcagtcaaaagggttgcaagtactgcctcttgtttgcgaccaacattagcaagttcagtcactactctcaatttatcaaaattcatatttgccccactggttattgctacaacattttcccctttaatgccataatatctgcagtatgcttcagctccagcaagagcaagagcacctgctggttccaaaatacttcttttctcctcaaacatgtcctgcaaacgagagccatgacattatgttctcaaaaacttttaatgataagtgacatcttctcaactagtttgaaattaaaaaaatgcagcctttttcttaaatagcgatcatgtaaaatggaccacagctcttcatgccacaagaggacaacataataaacaacaccccccaagaacatgctaatcatatgcatacttctcgagtaaggatgcatcaagagataagcccaagaacaagcacacagactttgaatttgacacacataagaagccttgccttaatcgaggcacaaatggcgtcacggtttacaagaactacaccatctacaagttctctgcatacacggaaagtttcttccccaacctccttaaccgctacaccatcagcaaaacctccaacctggtctaagatcactctttgcccgtgatgtaatgataaagccattgcatttgcatcggttggttcaactccaataatctttacctgaaattgtaacgtacatcatttaataaacatcagtaagtatgaacatagggttcaagcccaaccagcattcttttcaaagaccctcgctgtacaaagaaaacaatgaccccaaagtaagagcaaagaaagagacaaaataatatgaataaactgactcaagccttcagtctccgatcataagtatgtgttagtgaattttcaaagctccaaaaataattagggagtaatttagagaaacaaacaaaaaaaaaaaacgaaggggtttgaggggagaatccaaatcaatgaccccatattagacaataataaagcacacggggagggcccaagtctccagtcaccgtgcacaagtttgtggctagcgatttaacaaagcttcgatatttattgaagtaaattcctaaaagaaaaaaaagtgaaatctatcataacattttgcaaaaagaaaagttgttcaggaaatctaacatagcatgttgaataaaagaaaagtttttcaagggataaaaccaacaaacctccggtgagactctcttgacataggcggcaataccagctattagcccaccacccccaacaggcacaaagatagcatgcaatggggttttgctttggcgcacaatttccatcccaaccgttccctgacctataatcacatctgggtggtcaaagggtggtataaacgtacgaccctcctctataccccttttctttgcataagcttgtgcctcatcataagagtctcccactagaaccaccgtagcccccaacctctcaactgattgccactatcaaacagagcaaaacacaaaaaatcattagacatctttcttggtccgaaaatttaaaacccgtcatcataaaaataaatggaaaaagagaaccttaatttctggtgtggtgacaggcatggcaatcagtgcattacagcccagttccttagcagataatgcaactccttgagcatgatttccagcagaagagcaaataacccctttatccaattgttccttggtgagcttggccatcatattatacgctcccctgagcttaaacgagaaaacctacaaaacccaaaagagaaaaaacacattcaatcattttctcaaacacgtaattgacattctcgactacccaattcatactcacaggctgtaaatcttcccgcttcaaccaaatgttattctgtagccgttccgagagctttggagccaactgaagcggagattcaatggagatatcgtagaccttggaggaaagtatattagtcaagtaactcatcgcatcaatgatcccagcatcgtcctgttcaaccacccggtccggcactgccccaacgtaaccagctgggtactgcaacgaatcagcggagaccctcatccgaggcggcggcggaggaggaggagagccctgaaaagcgcccatttcgcgtgtcaagacggtcgacgaagatggcggttttggagtaatctcagcagtctgtttagacagggcgcctgcgatggtgactggcctgaagttggccatcctcaacccgcgggttcctttggggttcacgtgggtcgggtcgggcccaatgacatgagccaccgccgggtttaggcgcagagtgtccatggtttctttctattttcagtttctctctcctcactatttgtgtttggtttagagagagaaagtttgtgtatagattttaaaagtaaatgagtgaccgttgattgtaattttcaatgggtatttatagtgaccggagagagcaggcacgtgttgaaactctcacactaataatacctacttattttttttttgaaaaagaaccaaagttcaaattaagccgagaaaaggttcatgggatccacagggggaaatccctcctcttgaccattcagatgctctttggaggaacttctagcatctttggctaaaacatcaacaaaagaaataacatcacgagtaatgaaagcacaagaacaattaactaaactttttttcaattccagaatcgaagaaaaaagagaccaacatctccaattcggaaaagattccttcagcaaggaattcacaataacttgagagttagtgaagatgcacacgtcctcctaattcttctctttggcccaaagtaaggcgagtttgatggcttaaagttctgctgcaatcggactatcctgcttccctgatgtagttctgatgaaccaatgattaataattctatcaattgccaccatagcacccccaaaattaccttctttgaatgatccatcagtcgcgatcaccttcgaaacaactccaggactaggattgcagtgaaa

SEQ ID NO: 189264 - DNA, 3068 bp, Cannabis indica
agagagagaaagagagaggaaaaacaaaatgtaaatttacgcatataaattcaaatatagagttgctgataaacatgaagaaacatcaaacacacctgtatcaagatgaccttccatagatgtagtgtgctgattaacagggaaagcaccagctctgaagtcaattccgggagtagatggattctgatgataaaaatttgatccttcaaaccccccaaaccctgaagaaccaacttgtgaataaagattggcagaggaagaagtcctttttggaaagttggcttgcatattggagtttgacttagatgcattaaggtttgccaacatcccattttgcctagctagatcaacataattggctgcaagagagagcttttcagccttggcctggtccatgagctcttgctgcagattttggttatgtccggttttgaacagaaaatcagaattattatcaaggcccaggtgatgctgggactgagcctgactattcatatctctacttctaacatttgacagacttaagccagataggttagctgcaatatcagcaagatcattcattccagaagaatgaccattttggatgtttaaaccacgaacattcttatgctcaattgaggaaattctgcttcccacaggagggaggccacaactaggagatcttccaactaccttcggttcgggagttgtgctccttgacatagaggaacccataggtgatgccaaggaataagaacctgcagtactgcgactttgaactccagccatgccatgaggagaaactccattttgcagactgtcaaaaagttcagcactgtcgccaaaagaattacggcttgaagggcgtgacaggaagccagacaaggatgctggtcgatcaactccttcctgcacatcatgtaggatagttaaagttaatggacatacttataaaaataaaagaccataatagctaaccttgacaaatctatcctttcaacagtagtacgtaaacaccaaagtgtttcaacccaaattaggtataaaaagagcccagtgaactaaatcttgaatatgcactattgtactcacaacaacaaagttctaatttcatcgggtttcagtttctagcttgtacctacaataatctataaaagagtagtagtgaactccacggaatataacctctaaataaaaatcacgaagaagataaaaaggaaaaaggaaatacaagataaaatttctaaaatggaatttcacccaagccgcaaaactaaaggaaaatgaagtacaaacggcagtaattacctgcaaaatgtcagcaaaactcttcctccttgcaccaagtccactggttgtcattccagttgaactgtttggagctctatcaagccacccaaaagatgtctgcctagaaagattccttccatttccatttccatttctcaattccattagttcatgctccgccttttgtacagaaagccctggctgcatcgaaaagagtgacgaactctcaacatcctcagccatctgcttcgtcctccggtccccagaacccccaaaagaagacccaccagcttgaaatctctgtgcaacacgccaatcctcccttgacaacaagggagggggcaatcttgggttgatgttatcatgagaataatagtaagaaagataagcagggtgtgaacgaatttcatcctctgataaaaccccgtcattagtgaagattctaccgctaatttctcttatatcagagttcccaaaaagactaccaacagcacttaaggaaccctctactgtaggtggagcactgccacttctgtacatattcagatctctttcccgatccatgatcttccgatttcgctgctcttgaagaattaattcaagctcagtctgaatactatcctctaaactcccactgggtccttgcataccaatatctaggttagataacatacccatgtcgcttccagtagccatgtcaaagctaaaattttcctacaacagagagagaaactataaagaatgtcaaataatggaatattttatatttataataatataaaaaattctagatcgaaccctaatcgtaacaaaagcaaaccgataaggtaagtctcaatttttttaatctctcaatcaaacaaatatcacaagtattcacaacagttaaaagagtaataaatttcctgtaaaaagaaaatcgctttagaaaataataataaattgaaaactttataatggaatgattcgaaataaatatgcgaattattttcaaacttcttattattttctgagctaccaaacagataataacaattaatcacccaaacaaatagaacaaattccagacctttgagcaaaaccctaaactttaaaagaaggaattccctaagccgatcattgtcatactccagaaattgaggaatttgaatcaaatacagcaaatgttgttgtagaatagagacagagaaagagaaacgttaagcaagcaaaggaatgtcgtatgtagaaccacttacggcgtggaatcgaagctgaaactttctattttgattgggtgtaaaaacgagaaattctttgatccaaaaaagtaacacagtgagaaagaaaatgggatttggtgggttatatgaagcttattgatatgataattagtattcgattgaagtgatatgtttggttagaaagaaaattgacaatgaaatttacagatacagaacgagaagagtgcgatgcgaagaaaatcgaaatggaggagaacgatgagatcgcgtgtgcctgggattcttcataaacggttgcttttttttattattattattattattatacagggaggatggaaactgaaccatgaccgtcggattcagaaatggacggagatcgacggtatcgacattcgatcctacgtgcatgggcttttattgttaccatcatttttttttcttaattaatatttttttttttttttttaaatttgtgttattttttttttcttttatgagtgggggataataatatcctataaatgagtttggtagggtctcattttggagagtgcaatcggaaaacatgct

SEQ ID NO: 189265 - DNA, 3039 bp, Cannabis indica
catccaattttctttatttgcattgacttcgtataaaacttcatcctgatgcatggacaagttttatcaacagtgcatgattctagtgtttggaaaaatctcactattaagttgttgaattattttatttgcttcactgaaattgaggattcatcattcataaatagaaattagagattgatgagatttatcatggtttttactaaaaaaaagaaatagcgatcattcccaagacttacacgctgctgcaaaacttcattctgcaaatcttttaacctttcaactctccatttcatggtaacaagctgcccaactctaaggccagggagaggaagaaatccaacagctaaacacgggtcaaggacaggcctctgcaaaacaagagcactccggaaaactaattcctgtttagcatcctctggtgcagaagtcattgtaccagaaggagcatgtgctcccaaatttctatcaccagaaattccatattttatgttcagtatactctctgattgtagatccttaacttcatctgcaccaaaaggataaaaaaaaaagccacatcaagttacttgcataatcgtgggctctaaatagcatattcgctgatgttaatcatatgattatccataccctcaggtactatcttccctaagcatataataaacaagattccagctctggcattcggagaaaggacaagtggaaagaagccagaggccggtctcccatcacgttgtccagcatggacaaatccatcttgcagatcaagccaagcatcgtagactgtcagtgtggcttttacttcagaatgtaaaaaaatctgaagtatattaaccgatttgagatcagtgaattgagaaataatccagggtcaattaaaaagaagtacaatcattatacagtgcacaggtaaacttttgatatctacagaggtgatcaaaaaataaaaattggactagcctcccctagcttaaacaagcctggtatatggaaacacaataaacaagcctttgatatctacagcagatgaggtatgtattaatgagtaatcaatatgaactatgaaacacaataaacaagcctggtatatggaaaagaagctagagaattcagaataaattcataaaagtctggacacaaatgtacacattaaactcttatacttcataatacagcagttttcatcttctttgtgcatatgcatatgtaattaatttgtgaagatgtgcagctaatgtcctgaaaaccaaaccaggtgatcattatcaagatgaataaacaacaaaagaaacctgactggaggatgctagaaaattagctatgcttatagtatgtctacctgattctgaacaatattccaattcatattggtagtcattgtcactcttatttaatttataatgattagcccattacaatcattactctcgacatgttcaaagaatagatgaactagtcctttaaaactcaaaatatagaatacctgcagaagcaaagtaccgtcattgcatttatcagcaactcgcatgctcacatggaaaggatcagtgaaatgcacagcgagagtcctgcagaaaatatcaagtgaattcgcaaataaatttttcatttgaaagaacttctatactaaacaaaaatagaagaacaaattaatatcaaactctaggagaatgaaagttgcaatgcctgtcaaatgtttggttatgagatattccgaattcaagttttagggcaatagtcctcatgccatctacaatgctcgttctctggggaatagctgctcataaaaaatgatgcaccaaacacaggtaagtatctggatgctatattactctttatgcgatgcatgtgtacgtgtgtgtgtgacatatatgaaatgactttgacttgaggaattgcatcattgtctctgaacctgaagaggatcctcttgccagcttgtcactgatagcgcggacaggaatccacaaaattgacgctatattgcttgcccaatccggaaactctattctaccatcatggagtgtcaactgctcatattttctactgacagtagaaccattttccaaagcactgtcacttttcttttcggtggaacccttagatgaatctgcatagctttccatctcaattacatgcgactcttcaattctaaggccaggaccagtatcgatatgcaatacagcatctttcagggagtagttaatgggcctcactataatcccaacccactgtgactcatttataagcaaagcagatgaaacagctgcagcaagatcaaccaacggtcttggtttgaaaacctaaaaaacaagaagaatcagatactgaaacagcctgcataatctggttagaaagaaacctactgctcaactttatcaccatgtcacattcagcatctgactgaaaatttaatgcaatcaggttagtttattatacactaggtaccttcaagattggtcttgtaggcttttcataactcaaaaaatcatcagtgtctgcagggcctccctttgaaaagctgtgagatctgaatcttaagtgcccaatctgcccagtaagaacacccaagacataggaacctggcttttggggcggtaaatctaaggtaattgtgttccgaccaggttttagtacaatggcacttgagcttttgagtgcctgtaatgtaaatgaaactttagcaacttaaagtacaaggatagtcgtaaaacatgtataagattatgtccaagaatgcataccttaacaccctcatcagcattaaaagtagccatcagtgtcaaactaagtgagtcaagagttatatcttcaggaaagccactccaaacggttacagagagaatgccaggatccccatcgcataattcaattggaggcccaggattcccagagaatgtaatcaatgaagatacatctagaggcacaggttgtttcatttcactatgagcaagacgaacaacctctgactgaaatgcttggcgttctttggttaaaaacaagcttttatctagtgaaagtaatctcacacaagatgat

SEQ ID NO: 189266 - DNA, 3687 bp, Cannabis indica
attttgaagttgttttattgaattttataatagcgtctgagctatgaaatttctgaaaagagataagtgagcagtcaatttcttaggataatgattgcctatagaataatattagtggaaaagtttttaacatttgtttaagaagaaatgcccaaaaattttatctgtattattgaataaacaactctctaagtaccaatgagcctgaagtgctctcaaatgaatatgcaattcttttggtccattttgtctgcagaacattattaaatactcctttagattaaagcaagatctgttctgttttatatacaaatttaataataagttaccgtttcaatactttatcttgtttagttgacttatattctctctctctctaattttgcgtgtgtgataggtatcttatttcttgcaagaagcatgcggtaattcctaactcagcagtacaatcattggttttctgaggtcagagttcataaaccaaagaatgagaagtatggcataggtgttattcttgaccagctaatggatagtgatatatctccacttgtagatataataatggcctttgagagctcagatatggatgcagttgacttacttcaagaatcaaatggtaccctcagtgaagaacatcttatggctttgatgcgtgcccttgactttaaacttcgagttgttgatctacaggatatgtcattgaccaaggagttcttgaggtatgattgagattagttacatatgattatggtgttgattgttatttctagaatgttctctaatttacttcaactgattttgttctcattagggatctttgccatggaggcttggcttgccaagttttaaacttaaggactaatcatattcaaaagcttgctatgtctggaaagtttatacggttacacacccttaatctggatttttgcactgcactcaccactttgcagcagaactgtttttattgcatgccacatttgttacgtctctcaatgtgcgagacaagaatcactaatctctggacaacttctgctgctttattgaaacttccttcgttgaaagagctacggtttcaaaattgtctctgctgcaaggacaccggggcatgtccatcgtctcgtgagaaaacaagatttcatggaattgagagtcagtcaagtctttgttactatgatcaagcacagtctgctgatagtggtgatgctacatttcattcttctactgcaggcgaaacagttagggacctgatttgtaaagactcaatgttaaagtgtgagcttggaattggaagcaatgagaacaactcaaaagtaaagacttcaagttaccttaaaaaaatagatatgttcaaattatctgctgatcttcctgatttggatggaagcaaaggtcttcaaaatgaggtaagaagagtggttagtaagtagattgatgtacttgagcttgaaaaagattagattagacaattttactctaacatttagtttggcaacatgtagatttgggaaagaggtgatttttctgcaaattcacaaaagcaagacttgaagaatcctgcaattacattaaggaagtatgtatctcatcacccttcaccaatatgcttcgagaaacattatcgagagtacatggttgcttcattgcctcatctagaggtactagataatttgcctgttacaaagatagacagattaactgccaagactactagtagaaagtactttgagtacttaccttataaaaggcagccaaaagaaagtgttgttgatattttgcataagcgcgagatgggtggaagcaaggcacgtaaccagaaaatgtcaatgccaaaacagcttcacccttaccaccataatcaattgtttttctcaaggtctctttgtgctgcaaaacttggatcttctgaatggccacacttgagtccagtatccaacttcagagaaaaatttaaacaagaatgcaaaaggcctcgtccgaggcaatttgagtatcatccttcagatcctagtcttatggtttttggaaccttgagtggtgaagttattgtaatcaaccatgaaagtgggaggactgttagttatatcccatccatgggagcaatgagcagcgttttgggactctgttggctcaagaagtatccatcaaaggtaatccgtatcttgttttactttattgtttgtgaaatttgtgttattgtatctcctcataaaattaatttgtctagtatttaagccttgaaatttcagatgtgacttaatgagactatgcagttcacagatgcaaaaacaaacttattcatttcttgttacactaaactagtaaactgattttgttttctccttttttattgagcatgtagctcatagcaggatctgataatggttctctgaagttgttcgacatcaaacatacacctcaagaacttgcagagtccaattggggctcctcaaatgtaacctttgcaagctttgagcaattgacttctcttcatgtaaactcaacagatgacaagtttctggctagtggatactcaaagaatgttgctctatacgacattgacagcgaaaaacgtttacaattgttcagtaacattcaccgagaaccgatcaatgttgctaaatttgctcaccattcccctcacctatttgctacttcatcctttgaccgtgatgtgaagatgtgggatttgagacagaaccctttgcagccttgctatacatcttcaagctcaagaggaaatgtcatggtttgtttttctccagatgacatgtctttgctcgtgtctgctgttgacaatgaggtatgcctgtaactaataaatacacaatcacactcacactcacaatcatgcaatgatcatataaattatgaattatggaaatgatgaaattgcaatattctccaattttgctatggtaaatggtgactaagtgttgagagttttgacaggttaaacaactctcggcagcagatgggaggctgttgatgactcttgagatagcttcaacaggaagtgcttataactatactcgttcatattatatgaatggaggggattacatcattagtggtagttgtgatgaacatgtcattcgcatttgctgctctcaaactggaaaacgactcagggatgtctacttggaggtactttttcaagttaatgagtcacttttagctgatttgtttgtgtactttaataagctcttgtatatttcattcttgtttgtaggattttgagacaggaaactcaatgttcgtgcaatcattaagaagcgatccatttagagtgagtttgttttgttcattctagtattatgctttcactgaccaaataaaggcataataataaatctaactgttactataaaaccaggatttcaacctgagtgtgttggcagcatctacacgcccaagctcaaagtgggagatcatcaaggtaacttggtaacattgttgtttattgtgattgttatgtgtatgtcataaaagttggaagactaaacatataatttggtgtcaaaactactaaatttcaggtcaatatgctggcttcatccaactctcaggaacaggaagcaatttttttctagttgctacagtctcagaggttgaacttgacatatacttatcaagtaggaagactacatatataattttgtgcaaatcaaaactactaaatttcaggtc

SEQ ID NO: 189267 - DNA, 1032 bp, Cannabis indica
gaagataaacttaggcctaatatggagttgctcgagtcattggggctctctagagctagcagaataaggttgctatgcaaagacccacgtgtgcttgatagtcatctagttgagtcagttgagttgtttaggactcagtgttttagtgataagaaaataacatcaataatcatgaggtatccaacattactatttctaaatccaaacaagaatttgaaaccaaaactggatttttttaaagctatgggctttgcagatgatgatgttgcaaaacttttgtcaactcatccttatattctactaagaagtcttgaaaattatatcattccttgttttcaagtgctaaaccgagttcttggtactgatgagaatgttctcaagatcatgaaatcaggttactggatactcaagttcaaattggaagaggtgcttgagccaaacatatctgttttggagagtcttggtgttcccaaacctataattgtgagactcttcatgattcatccaagatcactgcttttaagttctcaaaggattagagagatttttgatgaagttctgaagttgggttttaatcccaatactttgtactttgctctagcgtttcggtccatggctgtgattaataagaatctgtggaatcaaaagttggaagcttacaaaagttttggcttgtctgaagaacaggtgtattcagcatttagaaggcaacccatgtgtatgcttatttccttgaataagatcaagaaattgatgagtttctttacccaaaatttgcatatagaaccttcagtaatttgcaagaatcttgatcttttacattatagcttggagaaaagaattattccaaggtgttcagttctgcaacttctgatgtcaacaggtgttttgaagaaagatgtgaatgttgtttattattttcaaatgagtgaagaaaaattcgttgagaaggttgtgaggaagtatgagattgtgtgtcctgacattgttgaagctagcaaaggcatggttgaatttcaagggtttcctgtt

SEQ ID NO: 189268 - DNA, 1497 bp, Cannabis indica
caaaaaatcctgagacggaggtgatcatggtgctctaatttttctattaaagaagggaaccaaaacgactacattttaaactaaaaaagacaaacatacaatccttagctgagtcatttttcttcaaaatggatgatttagaaaaatccattgttgaagcaagagaagagcttatgatttcatccaatggaaatggtccatttctaaaaacagcccattttctcaaacccactgtaacctccattaaagatccttcctttaagctcctccataaagacacccattgtcactcttcgatcaccactacgaaatgggggaacttaccattcgaggtggcattcgatgggtggcttttcccacaagataaatggaaggagtgggtcgaaagtttgagtttcaagcacagacaaatatgggaaaaagctggaatttttgatgcgattatggggtccacgtacaaaataaacaaatacccagaagtggttttggagctagcgaaaaaatggtgccctgagaccaacactttcttgttcctttggggtgaagcaacggttaccttagaagatatagctctctgtgggggttactcagttttggggtgccctgttttcagtcctctcgagtcatcatatatggaagaaatggaggaaatgctaaaggaagctcgtttggaaatcgtcaggtcgaaagctaagaaagcttgtcaatcggcatggatgacgcgtttcatgggggacaagagcgatttggagcatgtggcttttatttctctatggctatccaggtttgttttacctagtccttcacgaactaccatatcaaaacaccttttcccacttgctattcttctagcaaacggaactagagtggctctggctcctgctgttttggcaactatttatagggatttaactttgttgaaaagaaaaatggtagatttaagtgagtccgaaggagaacttattctctgggctccttttcaactagtccttgtttgggtttgggagagattctcatcgttccagccaaaacgaaatttagttcaagtcggccagcaaaggttggctcagtggcataaagtgaaaaaaccaccatctccttttgattatgatggaggaaccttttcatggcgtccatatgccacaaccatggatagtatctgtgctctaacccagatttatggagaaaaagcagattgggtttcagttgattcagattcaagtgaacaactattgtcacttgttaagtatttgaggccaactgagttggtgggaaaacattttgatggttattgtattgagaaatatctcccacatcgtgtagctaggcagtttggcatggatcaagatttgccaggtaatgttgctcggttcaatgagactcctagtactgcttggaaacaatataataagccaattgactttagaaagctatacatcccatctatgtcttataattcatgtgttaccttaagatacttcaactggtggaatgata

SEQ ID NO: 189269 - DNA, 2080 bp, Cannabis indica
acagttactaggaaaaaataaaataataagcagcaggagattagttgcaaaagtcctttctggaagaggacttttcagacatagccaacaattaagttcactgcagaatatagtccctttgagttataacttgaccacactgaagagccaaaatataatttaaaaaaaaaaccatgttaccaaatgcaacaaaactaaggtctttcagtcctttactccaggcactctctcaaaggtttaattttgcaattctcatatcagcacaattggctaaaattacaaattgatgtcaatagctttgagtaatgtttagacattagttttcacaggaaaaataattggcaaatctatactacctttgtcacaggaagtagagttgcagcatgagaaaaggccacatcagttaacgaagatggtaatgggttagaagccacatcagatgaaaatgttcgtctatggacctctcgcaaagcgtgcaaagaaagttgccacaagagctctacaaacctgcagtcaacactcagggctcatgaaccattacaactacaactattcttgaaacagaaaatcaatgtactgatgaacacacatcagtttacaacccacactgtataattaacatactttttttttttttagacaatgaactttaacatactttaacttaacacaacccaagcaaaatgcagcaactcaaactttccaataaagataaaataaacttcttattttttcaacatccattttgtctacacacttttttgcatccaattctgtattttctacattttaaacacaaaaagaaaagaaaagaaaccacctaactgagcatacaagcaaattattaactatgccccaaaactaagatattcaaccttataagaatctgtattttattttcaagttatttctcccatcaaatgcagttctttgtcaaaaaactaaatcatgaaaacgtaagtgacaaagtcagaactcactaaccttggtccacagcacgtagcgagggatgaaaccctggaattgctcctcggaagtgccccttgcgattcaagctcactaataatcccttgaacaacctaatcaacaaattccgtcgtaaattcaactaaaaaagagaattcagcccacaaccacaatcccaacatccaattctttctcaacgacactaaaatcaagacacagcataaaatcataccttacgaaaatcccgtgattgagccgaatcgaagattggccaaaccttatcaaaatcctgaaagatcccaaaacatttagggaacaaaaataagcagatcaaagcagaccaaagatgtcgacacatataagaaccgcaccgccataggaatgtacatatagagcttcgaatatacaaatatacaaaaaaaaaagtgaaaacagagaaaaaaagaaaaagaaaaagcagaatagagagtgtacttttgcagattgaattggtcctctaagcgataatcagaatgaagtaaagaagctgttctcccaacttagggttagagtgacgaaagagtccaacccgaggtgtaccgttggaacctccgactccgattacggccggatccaaccctaagagcaaacagttagtgtacattgcactctcgagctctatctctctctccttctctctgtccatcgtcatcaccactcagagagctctctctctctctctctcctctctttctctctctactgtaacagagttcttttcttctttctctctttgcttctctctgattattccggttgttagttcaattttattttaattattttttaaattttatctggttgtctctcgataatttttatatattattcttttgaaaacgattctttaaaattacgaaaacggcataaatttgaaatagtttgggggcttaatttgaaaatttgaaaattacaagtagtttagttgaatttccggtttttaatctcatttagtgggcccccacgtgtatgataaaaggcctttaaattggcccaaaagacttaaaaactcaacgacgctaaacgtgctcccgttttgtggtcgcaggccagcttgtcttttcttttttttttt

SEQ ID NO: 189270 - DNA, 852 bp, Cannabis indica
tgagtttaaaaattgattacttatttaactaaatgtataaaaaattaaagtattacttttggttgagccaaaaatattttggttgaaaaatatatgctttccacacatcaaaataattacttcaaagcgtaaattacaattgtacaacctttgatactaaataattaccgtttaagcaaaaaatattttataaaggttaaagaataaagataattataagtaatgtttaatatttaaaatatattatatcggtagaaaaaaaaaaaaggaagatactcgggacttaggtgaaagaattggtatacacgtggaccaaataaatttacaaacttttgataataaaacaattattgttatatctgtaataaatttcaaatatctgttcacagaggtaattttctgctttattaatgagaatattgatgaataaaggcccaattttgttcttgaaaattcttgaacgggatgtcattaatccaaatgcatatctttctactatttgggccttcatttgttgggcttgatataatcatctcaatgtcaggctttttaaagttcattacttttcctcaaaagtgaaaaattaacaaataattcaattaagggaaacttataaaaatcttgggttttaaacaaatatttacaattttactgttacacggtaaaaattacatttatactgtattgagttttctttttcttttatacagtggacatcgaatatcaagaataatgcatctatcttccatacccacggatagaactaccataaaaacatgaacacacctggaaataaccattaattccggtgaggttgaacaaatacagtgaaaaataaataatcatggcaaa

SEQ ID NO: 189271 - DNA, 3757 bp, Cannabis indica
caatcaacatctaatacgcccaaatgcgaatttgagttttttcaatccacacaagtacatatatctgcccattaaagattgaatgagattaaatcgtacggattatattaagtattttatgaacactcctatataagactataaatattttaattcagtaagtaattgatatagaaataacttaaataagatatcatctcttattgagccttaaagtatctaataataatattatataattaatatacatgataagataaaggtcattttgtatcttacaaaagttattgatttaaccatttattttgttcaagttgatgataatattaaaaaaaattattgaaaattgagcttatggtcttatttgtactattttaaaaaatatggaatttattttgtgatttaacaaaatagatagggtaatcaatatatcttttacaaaatagaggatccaaagtagtattaactctacataatataataaattgacaaaatataattatatatatatttttcaaacaataactcatcaattatattttgatccagacaaaaaaaaaaacaaagataaataactattaatcaagagaaaatgaaagaaagttgcacaagggaaaaaatggtgagaatatacatattacttttcaaaatggtgttacaacaatgattttccaccattttatttttaggttattaaatagtggtctccaagggagtacaacaaatgaaatagggtataggagatcatggagcaagtggtagtgttgctggcttgccacttgctacatatatgtatatagttgatgagaaagtgctagttgtgcgggtcgtgttagaatttgtgtaagtgtatatgtgagaaaatagtttgtgattgtaagacgttttattttaaaactaattaataatataggaatagtttataaatatatggtattatcttcttacattttaacaatatgagatatagggagctcatcctacctagtctaaggaaaaataaagttcatgttggctagttaggcaggagaaactcatctttttccaaatatatgaagccaattggggaaatcatctttttcctaatctgagaaggagaattgtacctcacatttcctacacaaaagaagcttgccttgccaatgtgaaggacttattattcataatgtgaagaagcttgactttccaaggaattatgtggaacttaatacttaattatactaatagtaatatatgacatattttaatgatgcctaaataccactaatatcttttaatatttcttagcttttttataaaacattcttaattaagtgacgttttcattctttattttcttatggagcttgaaaatgacttattattgataattaaataattatgcacgacctgacctgatcaaaatatcaagatcagtgatcatatacgtacatataacttcttgaaaagttctcattttatataattttattttcccatttaggtattgtaataattaattaattaatatatattttggacaggtgatatgggaaaacaaggaaaatgacccaaatagcttgcctcatctagtttatgtcagtagagagaagcgtcccgctactccacatcactacaaagctggtgctatgaatgttttggtaagaatattccacttattattaaatcttatatatacatatccattacgtattcaaaatataataagaaaattatatggtaattaattaataatattacagactagagtgtctggagtgatgacaaatgctccatttatgctgaatgtggattgtgacatgtttgtaaacaatccaaatgtaatcctttacgccatgtgttctttccttggtctcaaccctcgtgactctgcctttgttcaattcccacaagtcttctacaatgaattgaaagacgatcctttcggaaaccaaatggttgttagttttgaggtcagtttctattatttcatgattaatcactattcccttttgtcatttatttattaaaaaaatatatatgtttaaattatatatgatgcatggtatgagttctatctatactatatgcagattattgggcgtgggatggcaggtatccaaggactcgtttacgcaggaactggatgctttcatagacgtaaagttatctataatttcgatttggataacgctgatattaaaggtttaatttgcatgccttttacacaaacacattgatcacacatttatatatatatatatatatatatgattctaatatccaatattcctttttgatcttctggctctaggcaaagaattattagttgatgaaaatgagaccacgacatttggaaactccaaggagctcatggaatcagtggctaagacctgtacagaaccagtagtactttatgggaagaataatattgacacaattattagttctcatcatcatcaagatctctcaactatggttcaagcagcacaccaagttgctcgttgtgactatgagcatggtaccacttggggtgcaaaggtactatattggaaatgctaagttgtcactattaatataattagtcaataaagaatttcatcgatcaaaactttatatttatttaattaagtctaaaattaatgacgatgatgagtaatattgtaggtgggttggaaatatggttcgatgacagaagatgtcctaacaggaatgcaaattcatgccatggggttgaaatcggtgtcatgcatgccaaacccaccggggtttatgggcattgtaccaacaagtgggcccacatcaatgacccaagtaaagagatgggtaactgggcttcttcaaattttgttcagtaggaacagtccaatcttcgcaaccttgcactctaagcttcaattcagacagtgcttgatttacacttggattcttatctggggcctacgctctattcctacactatgctacgctattctgccagcctactgtatcattaccaactcaagttatttacctaaggtatacattacttacccatatctccacacaaaattaattaaatatgttgcaaataataaatttacgagaaatactagcttactaagggacatttaagctgtgaattatgtgtcatgttattattgatataatttaatattagattatacacattttaattaaatatataaatatatatagagaattgttaatctactcataataggcatatagttatggtgttggagattttaaggtacttaattaataaaaatgttctaaatttattgatgtaacaacatttatatgtgattaagatgacttcataatttgaaaaaataaaataatactactgcataattattaggtattatattaggttaatgtatgcatgtaatgtttaaaaattaaaatatgcacatatcgttactcattaccataaatttatgcatgtaatgttctcatgaaaattttgaataatattgagtgaacaaaaaaaaaaaaattagatccaagcaaactgtggtaggatactcaaaatttgaattctatttttaatagcttaaactatttaaaattttctaaaatttacttgagtcttgttactacactcaatattgtcatgagattaatatttgtaaatccactatatagggtaagattttttatttgataatattttattaagttttacatctatactaatatatgcaggccaatgaaccagcaatgttgctatttttagctcaatttgttatcgaaaatatggaaacctaccact

SEQ ID NO: 189272 - DNA, 3542 bp, Cannabis indica
agtgtatgaagtaatttccctaatataaatatattaaatttgaaactataataggttgaaaaaacaaagttttgaaatcgtccataaaaaactgaaaaaaaaaatacactttaactagaagggcataactaaattgtacaaaaaaaaaaaataatcctcaaaacgtatttatgtttaaaccatttttcgttatgtctttttaggaggaaggaagtacaggttttgtggtatagctcaatatattaatcttgtaggatcatccattggctatacaatcactacagcctttggtattgggtaagctatatatttgtatacacatatatagtgctataaaaaaattcaatgtctctcacatttttagcaatttaaaggttataatctggtcgagtgtgtgttcttgaatgaaatcagggccataaaaagagcaacttgtattcataaaaatgggcatacagcagcttgtcatgcatcaaacgagctctccatgctcatatttggtgttgttcagattgttttgagccaaataccaaatatcagcaagctatcaggactatctgtcatagcagccatcatgtctttcacttactctttcattggcattggtctatcagtctctagaatcgcaggtcagtcacatcaaaaactacaattagtgtttttgtttgtgaagatttgagtaaaatagaatgataattctactgtagatataatttttttatatcttactggtagggtgtagtccatgatcctggccatttaacatagttgtacccttttgatagaattttcttaaaataataatattggtatgcctaatactgaattgtaggaggggaacatcccaagacaagtataactggtgtagaagtaggtgtagatgtcacaagtgaggagaaaattgtgcgctgctttcaggctcttggaaacattgcatttgcctatgctttctctcaaatccttatagagatacaggtgagagcttctctctttttggtcttcaaatgaaatagtcaagacaatatctataatctttgaacaaaattgttgcaggacacactaaaatcaagtccaccagaacacaaagtaatgaagaaagctaccacagttggggtcactatcacaaccttcttttacatgctatgtggaatactaggctacatagcatttggaaacaaggcgccggggaattttctaaccggttttgatgagcctttctggcttgttgactttgctaatgcctgtattgttgttcatctcgttggtgcttatcaggtactgaaaccataattctctaacaatcactctgatttccttgctcttacttttccttctcgagtttatctccgatatggaattgtatgtaggtattttcccaacctgttttcagttcagttgaagagaagagtcgaaaatggtggccggagacagcttttgtagtgaaagagtatcccattaagattccatttttgtgtactttcaagttgaatttcttcagagttgtgtcgagatcattgtatgtgacggcaacaactactctgtcaattatatttcctttcttcaatgacattttaggtctacttggagcattagttttctggccattagctgtgtacttccccatagaaatgcacatagttcagacaagggttttgagctattctatgaaatggtgggggctgaaagtactaagtggagcttgcctaattgtttctctgcttgctgctgctggttcggttagaggcataattatagagctcaagacatacaggcctttcatgtctgtatcttgattcttgatgacagtgtactttaaatactgttatattgaatttatttaccttgagttttcaactagattaaagctttaatcaactaatcattgtttagtgttagtatccttgtgaaccagaattggccttctctgttattttattagagttttactaatttggtttttagtttaatcatgttcatctattgcaccaatatgcaatttgagattcattagaacaataatgagaagtagaaaagaaaaacaaaaaataagtatcacgaaagacattcttttgataaaaatgcaatagtacccaacaccacctcaatgtgtcatatttctgttagtggtctcgcatatttaatttaataactatggtagaaaactagtagtgttgggcaccaccacatatatatttatatatatatgggcatgagcactccttgacttacaatgaaaaacctagtaatcaacatataatatatatatatatatatatataggctatggatatatataaatcaaattgagatttgcacagaaaaaagaataaacaagtcattaaaatggcagcatgtagtaaagattttccatatttcatttctggccttgtatgtaccttttggccattgtaattgggatacaagaatctaaaatatatgttcaagtgtttaaacaatgcatctttcaatttacacgcggtgccattgttgagatcctttcttcttccagaagtgcatatggatccacatactggggtggtgaaattggagtttgggttccatcatgaacaaaagctggtccaaagtactggccaataaaagacaacaatcaatacttaatattttataaaccaaaaagaagtaacatacatatccaaaaggagaaccatagacttgagaaaatatatattaaggaaaataataagcactattcccaagtaatcatttccagcccatattctgattctaattcccacttattaacattgtggttcttaatcttaataaggattactctaattcaaactaagttatagaagttcaatcattatttaagaactctgagtccatcattgaatattagcagactttgaattatgtgttattatatttacaagtgtgtgtgtgtgtatacgtcagataagcaaattaatatctctgaagaaatctggttatcatctattcaacaacaacaaacaaaaaaaaggaagtcaaaatggatagaggaagttacaatactgaagataggaaagagcacttacaaaatatagagcagagaaagatgctactgttattaggatcaaaggccaaaacgccaagaaaaatgttcctccaagtgttagtagcagtttggctcgagggattaacccctgaaacagatgaaaatctcaagtatgttaccttgaaaggtgaaactatataacaactaacgctcaaaaagaaataaaggaaaccaataaacaaattgaagggaaaaagaaaaggaaacaagggtcaacctcaagtccttcactgttcaatttcaaggagcgctccctttgattagcaagacttttctcaatttcagttgatactgcatttctctgtatgaaagctctagcttctttcccaatctcattattgactccatattcacttgtattggtttcttcttcaagcaacgaagtgggagtcataccccttctcctcaattctttcatgaacaacgattcaggaggttcttcacctgaaaatcacatttgtgaggcaaaaaaaaaaaaaaa

SEQ ID NO: 189273 - DNA, 1548 bp, Cannabis indica
ctaaaaaaaaaacaaaaaaaaagactaccactcaaattttttgaataaaatgataccggatttacattatctgactacagattttcctttctttttccttttctattttatgagtgaaaataataagctagaaatttgctttgtcctccacaaacttgtgcaaaaaactcaagattgaagccttgggatcgtctccacttaccttatccttgatttcaaaaattcccttcataattcgggtgtaaagtctctccagctgtggaatgttgaagttttctgattgatccacaaaattctgctttacagacttcaccaggtttgcaaacttaacatctaacattgcaacatcaagagatccacctccctcggtaggatcagaaacttcaacttctctggcagaagcttcatcattattctgctcagcaacagatgtttctagcctttcaggatttacatccattacttctgattcctgagatggctttaatggctcttgttgtcgagacttctcttctgcagtaaatataatgtcagcaattgtaattttccaaaatctcaaatttgatgaatcatcaaagcatccacaccaactactaatgttaacaaatagagtactgccaataacaaaagtaaataacttcattagctttactagaaataactttcacaccaaaaaatgggttcaactgctctgtttagtttacacaaaactgtacttcagttcctaaacttcttaaatctagcaattatctcgtgtgcactagttttttcatggagagataatatgctagattttaaacagcaagatgaataaaactgtgtaactcatatatatgaaatcacagcagcagaagcctgaatacctgtatttgcagtatctacattcttttttcggcgtttttagagcctcataactttgatccagatttacctctggctggacatttcgaagtcgattacttgccctagttgttcccaactgcacaacaggagttgaagaaaagtagatcccccgaattcttctggtatattcattggaccaccttgtgctgcaatcttgtcacagcatgcaacaagagcagggtccatctgtgacagcattccatgaacctgaaaggaaggtaaaaaaacatattatgatgatgtttctttacaacgaactaatgcatttttttttgtaaagccaactgagacaagaactgcttacagcatctcgaagctcatagcctctgctaacgatcctagcaccattgtaatcatctccattataactctaaatttcagacagaagaaaatgataaattatgacgaatcttgataaaaatagttgaagtgtgatgcccaatgttttgagcttgtcacagcttggaatagcaaaatcatcaaggcaacgacaactgacaggaattaatttcagcagaaaactacagagctcaactctttcatgcgggtaaaggggaagaatcaagagagtaatattgcaggcttgtccagatggtaaaatttaatctattgataaaagtttaaggaccgaaaactttaaaagtt

SEQ ID NO: 189274 - DNA, 1491 bp, Cannabis indica
ttttctgccaaagactgcaaatagcagtaaaatgaataaaattcagagagaatgctaacagttcacaaacatatgaaagtattacatgtcagcaaatacaaaattgttacacaaaactaaaaaatgcataagagagtaactgagtgtgtgccactaatttgataagtccctttaattgtttgaataaataaattccagttttgtaacatataccagatatagaatataaaaaaaactcaccaatgttctttctggctccaagacactatttaatctttcaagtacactatcatcagccaaacaaatctcatctactagaaatagatcaccccctttcattgcatgaacaagaggcccatcttgccacatgaaaattgtttgccacttctgatgcagctcagagagttccatcaacattacttccagagtctccatcatatgttgatcagtgacactgggacatgaaattgaaccttgtttgtacttttctatcgtcgcttgcagcagggacaaagttgcagaggcctcacttatgtctgaagaaataatctattgcaaaaaagagacaaaagaataaatcatttgagtaatatataatgaaagaagaaattgttcaagagaatgggaagaaggaaaaaataacatacaggaacttggtcgcaacagctaaaagcatcaggtatgaccaattcttcaactatcttcttatattcagacatcaattttgatctctctcgaatagggtaaaacccctgaaaaagtgtataaattaaaattccaaataacagataataacagaaagaaaaaaaaattgaaaatacaacaaaaccaaccccaagaaaatcagaggtttctgtatactgatggcagttcaatatatgcaattttaatcccaaacgattactcagcaattgacagacagtagtcttccctcccccagtttcgccaatgagaagtacaggctccttcattttgtagcaacgctccacaagaaagtacagtctctccatacttttactccaactaacactggattgaataggatcagaatggtgaagaacaaattagaaaaacaaatagcaaccagaataaaagattatttctgaagcaataattattaaacccataccattgaacattgttcacgactccaactccattagaaacaccaggaacctgaattggaaattttatacaagttatttgtgatccaacatcttactccaatgcatttattatcagtctttagtgaaaatatacaaaaacagcaagttttattttgttattaactccataacaaacttcaacatagaataagaaaaaagatacacactcaaaacaaactcaacaaaaagtcaacagcattccagtgtcgcactcaatgtaactcaagttctactattaaatgaaaggtcaaaaagaattctcagtcatggagaggagaaactaaagagttattctataattcaaaacttattattattcagcaga

SEQ ID NO: 189275 - DNA, 1266 bp, Cannabis indica
ctattcataaaagtgaaaatttcaataagcatgctgtgtgtttgaatttttgactcaatatttatacatatatataaaaccaatgagagcctaaatattgaaatactatagaacatgaatgtagtttttgcttaaaaataatttattcaattcaccaagattttgttatgagttatcacaaaatgcatcataagcttattgcagttaagtgagttcttgcagggtcacctgtcacggtatgttgggaaaatgccatatataaccctctgaatctccagattgtcgagagagactccctatagaataaaaatatatgcatgatctttaaaaagttgtgtggacatcagaaaaaaagtagaaggattctactagcttttataatctgtagaaactagttaagggttattgcttaacattgcgatacaagtcactctttgaacttgaaggaccattgattcctttggtgtagatgaggacacagaatttggaaaaatttaaagaagcacaatatgtaacaccatcaatataaatgactaagtagaactgcgagaagcaaatgaaaaaacaaaccagttagaactgacctgataatcctgcattagctcccagtattcttctaacagttcttccagtttaggtgatccaggttggggatcaatgtaggtgaacatataagtagtacgatcagtagggcctgaaccagcaggaaaggcctgaaacgtttactgttcagaaaaaactaacaaaaaagtgttgggtcaaggtgagggacagttttttgtgtcttttttatatcatagctacctcccaaaagcattggactactgagttcccaaccttccttattgttgaactactatatataacatcacttgtagaattactaccaaaaccgcgagcacaggatccgacaacaaggcaaacaccatctggcttccttccacgtcttatctgcgtgatagaacagaaaaaggaatgaatttcaatattccaaggaaaggagaaatagcattgacataaatatctgcttgaaccatttcaacttaatataaataataaatatctgcttgaaccatttcaacttaatataaataatcatttttccaatgtgatttctaggctgtgttacagtagaggaattgtaaacttaggtagacacatccatcatcaattatgcatagttacctacctgttttacaataggtgaaaagttccccgttgcatcaattatgagtttagaagataaaatgttcccatcagctaata

SEQ ID NO: 189276 - DNA, 1104 bp, Cannabis indica
atatatatgttttttttataaaaatagaactttattaattaaaagaaaaaacttgagattgacacatataatatagtaaaaggggaaccattaggtacatataacatatgtatggttaactcttattgatcctcaaagatcttgcattagtttatcaagtaatgctagctggaatttgtgagaaaagtccaagtttttggaccatatttgaatatcataccccaacttgaattattaaataacaacacaactggacttgcaataatatacactgattataaaggttcaaatagccttaacaaaaaacaaacaaacatcctagttcaaaattacttaccatttccaatggggtctcttttaaaaactgtacaagaagtggttcttgaaggaggacaagtgcctgaatattttctgtacaaagatggtcatggcggatctcgggatgtcccattcatcgatattccggttgttgacgttggtcttcttgctacttcttcccaagagcttcagaagctcaactcagctctcactaactttggttgctttcaggtatgaaatctgacaaaccatgctttaccaatttgcaaagcattgtatgattttatagattatattcttagaaacccatgtcataaattatctaaagattcacaaaaaatggattttcagcgttgtgtcttagtgagttaccaagtgtactataaaatattcaaataagtaaaattatagacttgatcaagatagtcatcttgaaccataattttgttcatttgacaccatatttgacttattttttagtgtatttggtgacactaactacaccatatgcagacttgggtatagacggtctagatatttacttaaagttcacctagctcagggatccaaaaattatttttttctcttttaaacttacatattttttactaattttaaaaaatactacattttttttttaaataagagcctaattttttttttttatacccactaaatttctgagcctaccttgactatatgtgtaagttatagggattattttacaaatacacaaaattatggttgtacggaatttttacgctttttatgattttatttacagaa

SEQ ID NO: 189277 - DNA, 1742 bp, Cannabis indica
aactataaatattgtctccattagagatgttcccagttcccaccactgataattgacaccttatatcagtgatctttattaattatatgctcacaacaatgaagattctattgtgttagtaataacatctactagagaattggtcgttcaaattcaagagaagttgtaaagtatggtttacataccaatattaagagtaatgacatatatggggatggtggtgctattctgtattcgttttataaaaggttgtcttttgtaagagtttaattatttaattattttaagtcttgtctatattatcattaggccggctctgtgctaaaacgggttaggcgcgagcttagcgcccacccaacttaagggcttaaaaacaaaaattattatttcaaaaatacatatatatttttttagtaatttttgaaaataacacgtacacattttcttttaaaatggttcaatattttggtaatacttaaaacttaattaatcttaggacttaattaccatagtttataggagtcattagtttctttccctctccttttttcccttcttttacctttaaatatgtagtaagcatttccaatattcatataatagtggctatattgtagaaccattttgctcatgaagtgatcaaaattgaaatcgtaatcataaataataataggttgtgttgaatgaaaaagagtagaaagtgatgtttattttattgtacagtatcagatattctttagttatacaaaatgttaacatacattacatacattttttacattgaactatctgtcttggacttgtgattaggagtgtaaataaatttggtcgaatttgatcttaattcaaatcatctaatgattcgtctcgcctcgccccgctagatcaaatattcggattggatcaaatgcaacctaacttattcagatcggatctgtttcaactcgatttatatatatttttttttataaaacttataattttatatttattttaattttgtattagtattattttattttattttccaaatctaatttaggtcccgaatctcggtctcgggtcccggtccgggtctggtcctaagtctcgacctgggtccagtcctaggtcctgggtctgggtcctgagtcccgagtccggggcccgggtctcgggtcttgggtcttaggtatgtttgtgtctaagtccaattctagtgccgggtcccaagtgcgggtgcgagtgcgagtccaagtctcgggtcttggatcctgagttcaggtctttaattaagtttttttaatatattgaaaccagatcagatcacacacagatctcatcattcgaaaaaaaattaggcggggcgaagtagatctgatccgaaattcaataagcatttgaatgtttcgaataaaaaatgatctgtcagatcggaacttcgacccgatctaactaaatagatcttcttaccatgtctagttgtgattaattatatgtagtctattaaaattactttttacttttttattatataataagagaattatgtatattatataaaacatatattagtgatgaaccaagaaaataagaaggataattaatatataaagatatatgcattgcatgggaccaaccaggaccaacttcatatatggatggaaggtgatgagtgaaaattaatgggcaacattaacctttgtcgattgagtcatagaattaaaaatagaatactatagtatatatatagagagagaaag

SEQ ID NO: 189278 - DNA, 5192 bp, Cannabis indica
gtaaaataattccaacaaataggactccctaacaatcacataccactacttacagtcaaagcaagtttggccaatgtataagcaatatcattataagacctattacaataaacaaaactaacaacttgagcttattacaaagactaacaatataatccaacactagacttaaggaaataataacagagacattgtttttaattttaagcacaatactcaaacaatcagattcaataatgatagtctccatacccaaaagaaatatattgggacaaagcctttctaatagcgaaagatttagccaccttaagcagaaaacaaccatccaaattccaattcgttgaagcatgaacaatccccactacaattacttgaagagcttagagtcgcatctgtgttgactttgagacaatcaataggaagatctttccatttgggagctacctggggaaagtggtgccaccgcgtaggcaagccaaagatggtgccaccactggtgaaggaggagcggtacaacccatcagacattgcgtgttgtgaaacgttcctaaaaagtcacgagcccaatgaacattgagagcaggagacaaattaacattgtgatggattattttattacgcttgtaccatattctctacacgatcaccgtaaccagttcagtcatctactttaaaagggtgtcaataaatctatgaataaattcaataaaattcattgggttaaccagaggatctaccaacataaactcacagattttcctacaaggaagtagagaaatacaaccccaaagagcatgatgagtagtttctccttccaacccacacaaaggacaaactgcagataaaagacaataatgagccaaattaattttagtaggaatcaaattatgggactcttgccaagcaaaaattctaacctttggaggaatattaagagatcaaatatttttccaccaacacgacaaatccccagacggagaaacacgaggcacgaccaaaatgcaaagagccaaccaataaccacttttaaaagaaaaccaatcagacatctcaaagttccaaataatcttatttggcacttcgtttgaagaccatgtgatggaaagggtaacctcaattttactagccaaaaagctagatcgaataaagtctttatcccacccttgagccatcctttaagaaagagaacttcctttaatcatcaattcgatggggagatgtcaagatagagggtaactctaaaggagtccaattatctaagtaaatgataatgtccctcccattccccacacgccagatcacccttgaatcaaagagttcattggcccataaaatattgttccacacaaaggagcctttcttgaacttcttaattttgacaaagtttctcttttagaagtacaagccttttaacacacgaccaactaaggaaccaggaacattataaatacgagaagcttgtttagctagaagatactgattaaataaccgtaggtcctgaaaatccataccaccatcctccttatgcaagaaatttttttctcaagtacaccaatgcatctttttgttaacatcagttctaccccaccaaaacttagtacacttaaaatgaacattttatataaaggctttcaaaagcttaaagagattcatagtattgtgttggaatggattgacttccatggagaagaattttgacttccacccattgagctttttctaaattctatcactaatgacatcaaacaaacccatcttgctatgtcccgtaaaacaaggaaggcccaagtaattctcataggaatcaacccccttaactcccaacaagttcactagattagctttctcggaactaggcacatttaggctaaagcaaactgtagacttgtcaaagttaattaattggcccaaggttgccccattctagctcaaaattttcttgaatctaacacaacacacatcagaagccttgaagtagaataagctatcaacaaaaaataagagatgagaaataactggagcatttcgaccataggaaacaccaaacaacaatttattctcacaatctcttctaaagacctcattcaggaaggccaaggcaaatgaaatgatgtcaaacaccatattatctggattctcttaataaaaaccagtcgtaagaccatcttcacatgggctcttcaaatggtccatttaaagagagcttctttaatgttattaacatgaaattctcgaatcaacctatcatccaaagcattagaaatattcataggaactgagttatgatcttggaaaaagcatcatttgaggttggttctaagtgaacaaagtagaaaaataatcttgaaaaataaccccaatttcctcttatcctgacacctcaatcccttctttatttcaaagatttagaattttatttttggcacgactactagaagagcacttgtggaagtacgtagaattcttgtcacctaacttgagccaatcattcttttccctggaagaccggtatttctcttccttctcatgaagaacatcaagctccttttgaatcttacgaagctcctcacaactaacactgtcaagattagaattcataataacgaattgtttaagctttttattaatggcagtgtagtatcttttctgaattttcttattctagacattaaatttctcacccacatcaagaacattaagttagacattacaatttccacacgatcttcctcatcagcctaaggatttttatagtggaaacgagaataagccacatggttgccatgattccgataaacaaaaatagaagatagcataattggcatatgatccaaacctttgaggataaatgagagaaaaaaagtatttagatataagttaagcccaaaagaattgaacaacaaacctatcaagatgttactaaacaaaggaagaatatcactgtttattgcactaggtgaacttaggaccctcaaaacccagatcaagttggagacaatcttgaagagcttttcaaaaaaaaatcgcaaataattgggtttacccgaaccttaatcctttttagagttagccaaaatttcattccaatcacccctacacagccaaggaaacatgttattatgagcaatatggggaaagagattctagaatttgatatgtaacgaagagtcaagatgtccatacacctttgtaaaatgccaaggaaccaatcccatcttgtaaactagcacattaatatggtctcaagaaaacctgagtaaagtaacgttaaaatattatttctaaaataaacacaaaacaacttatgaccaactttctcccctactaacttctaaaaaaaactcaaacaaactctcaacaattccatttgagagactgtacaaagagtttcagataaaacataatgtcgggatcaacttcccgaatattggcatgtagagctcaaacatcctatcatttcccacgccttggacactccacgccagcacattcataaagagaggcagctctgcaaagcaggcacaactaagtcaacagaagtcacatcatcatcattgttcatctcaacgggtgacatgagagaacactaatattcttatccaccattacttccaaaccaccatcactaaccatcacaccctcttcccttgcaagttctagccccataaccttctcatcctaactcaaacaaacctccatcgccctccatttggaaaatttcaaagaagagattgacgaaacaaaaccctccttacccaaattttttccctccctctctattttatctcgtcgcccacctcccgcatagccaccatcttccccttatcctcattcttttcattcatagccaccctacttcctacgaacgttgaaaaaattcatcatttaactcccaacacaggtggatggtaacatatctttttccaaaacatccttgcatggttattgtggagagtttaaccaaacctctcccatgcgcatacgatgaaaatgatggctccccatgcatcatatgattttaagttgtagtacgcgacccttggaggtgatagacccaaaaacattcatttcatcattttttggcccaatatttttcaaaaatacaactttttccattaaaatctccaccatccgatacagaagatacaaattccttatttgatgcatagtgtgtggcaaaatttccaatgatagataagttttaatctaaaattaagggtgtactcaaattagaggaaaaaaatatattttaaatcaatcgagagttgtcatttttccattattggaaatatgaaacttttcattattttgattgtccaatttgatcactaaattagataagtcatgaatctcatcaatattttttcctttattattttgatcacctaccaaaacggaaggagactttaatgcaccatatggaaattttgcattaatgaccttcctgtatgaaactttattatcgtctgagaaagtaagcattgaccatctttggcgctgtgttccatgccataagtctgatgtccttccccaacgtaccaccttgcaccatattactagtacgaggtggccttccaacatccttgtgacaccttttcgatgagaaaaaagacttatggatagggtctcctcgaatgaaatcattgtatttccacttgtggccgctcagtttggttgtctgcaccataccacattcctacaacagatagctaattataccacaacaaaaacaaagctccggaagtcgttcatatttaagagggaactttgatttttcatttcctttaatcaagctaactttcataagttttagtacagttttggtgatatcgattctaacctgaacacataaacatattcctaggcaatcattggaagaattttcaccgactttagtcaccggtgcaagaagctcttctaactcacttaccctattcacagtcatacatgaaatcagcacaagatggattagaatctataattttaccctatcaaaggccaaagtatgatagtcaccaacccctgtaggaacttcaagggccaataattgttgcaccaataaccaaagaccaccaccaaagcacttacgtttgttgtttagatgcaaaaataaaaacaagaatgtcttatttgcaactgccttgacagtcactgagcgattaatttttaaaaaaaaactctcaatgctttga

SEQ ID NO: 189279 - DNA, 1688 bp, Cannabis indica
atttaataccttaaggcctaacagtttgctgaaatcagaccttacttgaggaacctttgccaatacaccaatgccctagggacaaaaatgatactgaatttttaatgaaacacaccttgatttctgttgcttctttctttgaaatagcctttccagtgaaggatccctagtacaataaatatcaggcataatgctcctataacagccccaacaataatataagttttttcattgtttccaccatcggagcagtgcttagattctgcaagaaagtaactaaacaagtcaacatcctacaatattttgatgtaatattagttcacaattctaccattgaacccaatgattgtgtataagcagattggttttgctattgaggcagaaaatataaaaaatttatagttaccaatgaatataagagaatattagaatattggatgccaaataaaggatgcagccattcaagttctagtaagctcatggaaactttgagaagaaaaacacaaaatggttcattgtaatttttaaaacagtgattttttataaggaacaagatgggggaagggggggtgctcattctttaaattctgactacggctgtgagaagaaacaagctgatgaccagctatatataatgcacaatttttatcatgtcatctgtcaaataagatctataataaagatcaaatcttcggacatgagaaaagctattaaaatatgtgtctgcaacatttgttttcccatttgatacaatttgcatagaaagtatataaccgcaaattatctaaagagaccaggcttaaattatgtaattaatttcattctgaacaattaagcaaaattctatttcagatatttaaacccacggacaagactatattagtaggaagtttgtatgtagcatatatatattcaatatatgtgtaagaatgacgcaccagaaacaacagatatagcagatatcaaaggcccatatactcctctttcagggatcctagttgtcccttttccagcaaaataaaatcgtatctccaagacattatccttcacaataacattatctagaggtatgactaccggcttctgcgcaccccctgccttttgtacaatattgaaatccttcaacactaatttttcctgtaacaagatattcatgttcaactcataatttaatctccgacaattcatcattccgtatttgaatatttacctggacatatatgtcaaaaatgcgcctcccaaggctttcatatgtgtgtccatttgtgaatgttatctccgcaaaatggagattcactgtgtagttcccattttccaaacaatgatgaaaataagtgagtgaaattggtgctatgcgggctgctgtatatagctcagacatatttgatgacggagaatttgcaacgtaatatttatattggacatcattatcatccaggaagtctccagtactactaaatccccaatcacccttttcgtttaaaaataattttgcagtgccaccttctacatctccatctccctcatataaaagtacattgttattggtcttgactttaacgtcatttccaccgctattaacatgccaacaagttgaatctgccacaatgatatggttagatcacacattatggggaagcaataatgtgtaaaatataatactgaatattcagcaaaataaaatgact

SEQ ID NO: 189280 - DNA, 5018 bp, Cannabis indica
agagagagagagatgaagtttgaccattaccaatatcatgtattcataaatcacaacattgttcagtatgatagcaaactttacctttttaagtgcgagactatctttctcaggagcaatgttgtgaatggcaaccaaaacctcggcaggtgttaaagctggaccagtatgagctgaaccctgcaataaaattaaaattcagcaaatccttgtcattcacttctatgtttctgttttattaattaatgcacactaacccaaaaaaaaaaaaactcttttccccaaaagatgcaagcccacaacaagaaggtaaaccaggtaaggagaagaagcacacttccaaaaataaagttatttgttgatacttctcctctaaatgatcgctgcaatccctgacttaaatgattcgggtaatcatctattcataatatatgtatattgcctattctgtttcttcttcatttacttagattgtggattcaatattgtagttgctgattgctaacttaaataatttctattttttttttctgaaaaagagacagaagtcacttgtctaaaactggcctcctcccaagtcccaaaatttattcaggagcctcacttacggccgaggaaaaccgtggttacaatataacacaaggcacaaaaatattagatcatatacaaacatgagttatttaaaattgcctatattttagtgtagaatattctctagttaagtcttgaaatactatccctcaaagccttttgtcttaaatacccaagtggccacccagaatttgatcttttcccaaaccacttcaaccccattatcatctccttcaaatattctctcatttcgtaccatccaaacaccccaaaagactgccagaatggctgctgtccatagtcttttgattcttctcccaccttttagcttgcacatgattagttggttgcatgtctgaggcatacaacactgaatctcaaatttgcccagcagtctatcccatagattattgctaaaggatccctccaaaaacaaatgagaagacgtttcagcctgctttctacagcaaacacaccaacccagagatagtagctgatatggtctttttctttgtaatacctcatggacattgaccttgtcaagtactaacatccagctgaacactttcaccttagagggtgcgctacctttccacactatcttggcccatttttcttcaatgaatgagggagtggtgtcacagtatgcttttgaaatttgatgtgaagttggaagttggccactgaagtaccttggaatgcccttgggggaatcgcccagggagtgaaagttttgggaaacggtcttagacaagtatgtagagagactagatggctggaaaagtgcattcttatcaaagggaagtagggtaactctcattgtcctatcctcccttcctacttactatctctccctttttaaagctccaactatagtcatcatagccttgaaaaaattgatgagacttcctatgggaaggtggtgatttagctaggggtaatcacttagttgcttgggaggacgtttgtagatctcgtgaggagggtggttttggcactggaagattggacatgagaaataaatgattacttatgaaatggcttaggagactcccattggaatccaagtcactatggcacaaagtaattatgagtcgctatggaaaagcaaaaaaaaattgggattcaagatgaggatcacgtatgtcaccaaaagggccacggagagatatttcagacctatacaatgagttcccgaaattggtaatgtttagagtggatgatgagaaaagcatccgattttgggaagacacttggattggaggaattcctttgaggactgcattccttgacttagctgtgatctccaaggcaaagaacgagagcataaaagatgttgtagctgatcaaggggtgggtgggtgtcagtgttgtgagctggaactttatgttcaggagaaatctaatgaagagggaaatttgcaacctcatagaattgattcagcaactggaacatgttaaagtgcttaaagtagtgaacgataatagagtgtggaggtcggatcctggagggattttctcatgtaaatcaacttttttctagttcacatcagatctgagtagtaaaggccgattttgtactaaattctttggaaaagcagtgtaccttctaaagtcaaagtgttcagctggttattggcgctaggcaaagtgaatgttcacgataaattgcaaaaaagacgtccttacttatccagttccccgggttggtgtattttttgcaaaaagaatgaggaagatgtgaagcacctgttattggaatgtaactttgcctacagattatggactaatctaatgaaggaattcgagaattgttgggtattgcataataatatcccatatttattggtgagcaaattagttggcagcaaaagaagaacaaaactatagaggactgcagtgttagcaacattatgggttgtgtggttggaaagaaattctaggacctttgaaggttctatcaatcgaggttttatgggaaaaagtcaaattttggtcagctacatgggtttacaagactaaacaatttgaggagttttcttttttagatctttgtagagattggacaatactactatagacatgtcttaatcactttaggagttgcttttatagttcctaaggcgaagttttgatttgaacttacagtttttcctgttcgaactataatagctattgttactacggttttcctccgccatacgtgaggatatctatacataatgggggatggtcagtctaagacagaggcttctttctttttctcaaaaaaataaaagaaattcgactacaccatggatgtcacctttttttttttgaaaaccaaccatatgttcccaaaattgacattcaagggaagaatagagcagtttgattgttttactaagcttgtgaaaaattttgggtattctcaataccagagagttaatacttttactcatacaacaatcttcttctatagcaaaaatggctattggaaattgctcgctcaaagaaaggaattgtggtctctcgacaaaaatttgttcttgatcttcaaaaagaaagaagaatgctcgattgcaaatccttatactacagatcacgacaaagttgggaactaataaaagtactctagctgacaagatattgcctttctgttaatttatgagcagatctccctcctccctcacacacaaaaaagtgtatggtctgatacttctaatacagctacatttcatagcgggaaatgtttaagcttttctcataccagattctattgcctgaacaatcgagtgcaatatctcccacacaaaataagtgtatggtctggtaaatgtttaagcttttttcataccagattctattgcctgattacataaaggctacctggttaagaataataaaaatgtgtagtctgatactgctaatatagctagctacatatcatagcgggaaagtcttaagccgttctatcatacttaacgaagtgactgtaaataattattttattatcaagggcttattttattataatacatccatgatgtccaatctgatagcaaataagaaataaatacctgtagtatatgtgcaagagccatttggaatttctctaaaggaagagcaacaagccgagggaatataggtaaaacctgttatttcaaagtaaattagggccaaaccacagttggggaatgtaaaatgataaaaatctgcagtcaatcttcattatggaaaagaaagtacacacaaatcaaaagtatcaataaaacacaacaccaacatggaatcatctgaaaatattgttttttttcctatgtaagttggcattagtaaaacaatccaccaacttgctagtcaagtcctgagacagcacgtagtttgtaatgttgcagattgatatttgcagcactattttaaatgaaacagaagtgcaaaaaaaatatgaaatctagagaataattttcattgacatcaaagacaattacactaacccaagtttttgagacactcggagatctcacaaaaagagttctactcttccaatataaacaaataatcagatacctaaacagtgatctagctagctatttagtatttataggttcagttctactaacaaccctttgactaatctctcttagatcatcaccaatggaagatacaaattctatatttggcacactgtttgcaattgtactccaatgcaaatagatgtaaatatatatagagaaaaaaaaataacaaataaaaaatatagttttttaattagctttgacttaaaaagaaaatacaaaatatataaataaaaaaaatctctacttaatgctaaataataaattatatatcaaaataataatgaattttttttgaaaaagataaagaggccacttatcttagactaatccctttcccgtatgtattgaataaaaataatattgaatagtaatggtgtaataataaatgatcattaatagtgtgctaaatttagtaaaatactatatcttcagagcagactactccaggtgtactcatcccatttgttaaattcccatcatcgtctaagatcacccaactatgaaatcgtatcagctgttgtggtgcaacaatctcttggagtaactaagcctctacttcctttttgaatgttgcctcccataaagacaattgtcatcgtagctagagttccaatagcctttatcacccgagacgccaagaccgacatcccagcatccaccatgcctttcccccatcgatgaaccaaaagatattggtaaagattgcaaatacctagctcaatgaacatccccgtaccactgatgccccatttctttctatcctgtctccatgaacatcaataatggttcaccatcgagtcgcactatccacctatgacctttgcaagcccgatgaaattctttttcctcgcaatctaatggtttttt

SEQ ID NO: 189281 - DNA, 2131 bp, Cannabis indica
ctttttcatttttctattattttatcatcttcttgataaagtaaggaaattgtgtaatgtcttacccatttgagttttgaatgagcattgatcctaaatcttttctggtttggtgctatgttgaaattatgaaatgggggaaaagtggtctctttgtttacttgatcaattaggaaaatttggattcagacatttctaaattttgtcatagatagcaatatagtttagagtctattagtttgttagagtttgtaatagaaaacccttttggcaaataccaatatatgaacttttgtattggtctttttactcatccattacaacagatacattttcttcattctttctttttctctttcctattttccttctctccctctgaattaaggatgtttatagcaaataattccttaagtagatattgcaattgactgaaaaaattaagcaagaagccaatgaaagtaagagcattgttagtagtttctgttaaaatagtatacatggcttcctatatagaatgtactcttttgctttagcttttcactccttttgataacagttccacactatttaaagaagtttttctgtttaaatgatttatgaactgacatagatatgattttctctaaggcactgaagttttttgtggggttgatgaatgccatatttgaaggaatcaaaatgtgttttctgattcagttcaactgattttatatcttcttttagtacaatacaatgttcttgcattgaaaaccaatcgatacgatcgagtaagataatctgccgtgttaagcaatcacctcagatttgtgtgcctttgtgttagtttagcaaatctagttaggactgcatatgaatatgttacatgattttacattctgccttatagtaaatgtgattgagttgataatatgatacactttcttcttgattgtcttagtgttttttcttcataacacttgtcatattttttaaccaaatgctctttttctgattttttgtccctttgtttctttagggtcataaacaatggcttgcagaagttcaattcctcggtgttctcagtcatccacaccttgtaaaactcataggatattgctctgcagacggggaaagagggattcaacggctattggtttatgaatacatgcctaatagaagtttggaagatcatcttttcaaccgagcatttcctgttcttccatggattaaaagattggagattatccttggtgctgctgaaggcttggcttatttgcacgacggagtggaagttaaggtacaaaatcttgttattcagctcggagaattggtgacgatatcccatcataagctctctttagttttgagtagttattataattcggattgttcatgatgcaatatgcctatttaactacctagctattctagcattgtcaagatggatgatttgaatagccataaaagtgtactcttcttcttctcaattatagtagtaattttcttcactctatttgacttgcaagctttcaaactgttctgtaattaaccaatttttcattttccttttctgaaggtaatatacagagattttaaatcctcaaatgtactattggacgagaactttcagccaaagctctctgatttcgggcttgccagagaagggccaaccggtgaccggactcatgtatccacagcagtaagtacacaacaaattataattatgttatcattaataggaaagcaaagatagcattaccaactctgaggtaaggcgagcaaggcctgtggcttgggcccttaccactcggggtcccgaaattgtgaagaaaaaaaaattattagtatatacataaaatattaaataataagataatgcatcgaaatctttgtagtagtattaaataataagataatgcatcgaaatctttgtagtagtagggagagtcatttcaagctacgagtttacgagatcaatttcaaatttacaatttctaaactttttaaaaatacttatggaggattcaacttcgaaactttctagagttttcaatgattttatcatatatcttatatgtttagaatttggtataaggtgaataaggttccacctcaaaaattaattaataataagaggagtaactcattt

SEQ ID NO: 189282 - DNA, 2874 bp, Cannabis indica
tgttaaacgaatgtaaaagagagaaaggaaaagtaattctcattagattgaaaagagaggagtacagtttatataggcaaagggttcagctgaaggataggaataaactaactaactgacacactttacctaacataactgaaaacagaaaataactaactaacagttaaactaatactctgtacattacataacattcagaattacatatccttaacatcccccctcaaactcagggtggaagagacaaaaccctgagtttgtctctgaggaaaagaaatctgctgttggagagggctttagtcagaacatcggctgtttgatcatatgctggtgtgtgtttgaccaggagagttttggcaagaaccttttctcgaacaaaatataggtcaagctcgatgtgtttagttcgagcatggagaatgggattggcagacatgagtaccgtgctgagattatcgcaccagacagttggtggtcgaggaatctgaaccttgagctcaccaagaagagccaatccaagtaatttctgcagtgacactggctaagcttctgtattctgcctcggtgcttgagcgtgagactgtatgttgtttcttggaggaccagcagataggattggagccaagatacacacaaaatcctgtagtcgaccgtctgtcatctatgtctgatgcccagtcggcatcacagaagccaacaaggtcgagagaggtggatcgagtcatgtctaggccatagtcaagagtaccctttagatatcttaggatacgtttgactgttttctagtgagattccagcggtgtatgcataaattggcacactttattcacggcgtatgcaatttcaggcctagttaaggttgcatattgaagagctccaactaggctgcgatagagctgaggatctttgacagggtcactcccaatgctggataatttttcaccaccagtcatgggagtgggcaaactgtttgcaaattgcaacttggccttgcagatgacatctgtgatgtatttagtttgtgagagatgcagcccgtgatcagtttttgtaacctgtattccaaggaagtagtttatgtgaccaaggtcttttagtgcaaactgtttgttcagttgagaggttagatgagagatctctgaattgtcactaccagtgatgagtatgtcgtccacatagacaaggatgtaggtagtgtgaccatttaaaaatctgatgaatagggaagcatcagcttttgaactgtgaaaaccaagatgaaggaggcattgccttaacttgtcaaaccatgcacggggggcttgcttgagcccataaattgctttgtgaagtttgcaaaccatgttggaatcttgttcttcaaatccaggtggttgttgcatgtaaacctcctcaaccaaatcaccatttaggaaggcgttgttcacatcgagttgcttgatgtcccagttgttatgaagagctatggtaatgatgattcggatggttggggatttgacaactgggctgaaagtttcagagtagtcaaagccatattcttggtgaaatcctttggctaccagtcgagcttttagtctcgatacacttccatctgcattttctttgattttgtatacccatttacacccaattgcctttcttccaggtgggagaggtacaacagtgtaggtaccatttttcttaagtgccactatttccactgccattgctccattccatttaggatcttttaatgcggcttccaatgttaaaggtgttttggaactgatgtataccttaggtttataaacacctgcctttgccctggttgtcataggatgaatgttggtggtgactgcaggaggtgttgctgctgcaggaatcgaggtagaaggaactggtgttatatgtgtagttggagagtcagaacagggagttggtgattgaggtggtctatgttggtctgaggggaaggtggtttgttttggtggctgtgaggtagagatgacattgaggataacagccaagaatacaacaattgatcttgttgatcccaatctatgtaagcaggatttaaagttccagcaacacgatcttcttctgagagatattgaacaggagggacaaaagtgtctgaaatatactgctgaagcttgtgtcctctaatggcggaaatgacctgaggtttccatagcagatagttatcatgatcgagtttggttgaaagtttgtgggagaaaacaacgggtatgaacgaagaaccaccagaactagctgttctgttctggctagttgcagaggaaagaactggggaagaatccatggtgaatcacgacgagaacgacaatggttatacaagaacagaaattaaacaacgaatgagagtcatcacggctctgataccatgttaaacgaatgtaaaagagagaaaggaaaagtaattctcattagattgaaaagagaggagtacagtttatataggcaaagggttcagctgaaggataggaataaactaactaactgacacactttacctaacataactgaaaacagaaaataactaactaacagttaaactaatactctgtacattacataacattcagaattacatatccttaacagttttcgctattttttaatgaaataaataaataaactaagtaccaactaacaactcttctcagcagaatcaagatttcaaaagtttgatcgttttaatcatcatttgtggaatacaatataacgtaaaacaataacaaagcgaacactaaattcacatcaagatcaagacagagcttgcagttcttgagataaaaaaataaaaccagaaaaaactgctaaaaattgtaatgtgttgttatgatgatgaattatgattataactctctt

SEQ ID NO: 189283 - DNA, 1019 bp, Cannabis indica
ggatgatgtgtgtattttgtcaactataggatgctcttataaacacttttttttagtaaaaatagtttcaaattgaaaattaattgctagtttttttttgagttttttgcggttaaatcctgtctactatcattttaattgcacttaactctttaaactcaaattttagtggtaaaatctttcaagctgtcacgtgtataagactgtacacataacaatctatggtggtaattaaccggatgacatcttaaatttgctaacagttcattagtattaagtacaagtcaaacgataattgaaaaaatttagccactaaaacttcttttttctttacattacaaataatcaataagtcccagttacgagcaattacaatatgttagaatcaaaaacattccaaactacctctaatcctaatgcaatcctagttaaattatgagcaaaaacattcataatcttagcctacaaaggataaagacacaccaggaaataatgacaaagatacatctattttttgagcagcccaatcaatcttaccccttctttattattgatggcaataataatttcattcacaataaaaatgttatcaaagataagcctatcagacaaaaaaaaatactttaattataagaaataatatcataaatagttgaggaaagactaatagaacgaaactccctaatcctagtcgcatgcattttcttaaggactaaaacaataatagtttcattaatgacagaaatatcaaaattattatttaaaatagccaacacaacattacaaaaatcattaccaaaaacaaccaattcttatgatagaagtgagcatttgatccatcaaaaccaggagccttatcactcgagagttggaataacaaatcagaaaagtatttgattaagactaatcttgtttattttgtaagaaattaaatcaacaacagtcgatacttagatcttcaggccacccaaactcttccaacaagccaatactactccatttgaccaaccaaaccagtc

SEQ ID NO: 189284 - DNA, 2493 bp, Cannabis indica
  modified_base (2430)..(2430): a, c, t, g, unknown or other
aaacaaaaacaaaacagaatatcaaaacagagaagttccaaataataatataagataaatgtacgtctctaattcacctttcaaaacaaagtgtatgtctctagttctcatacataacactatcacaattgtgtggatatctttttttcaagtctatcaagcatacatcacaagattcacatatgtattcacatgacatctataacaaaaacaagatggactaccttttcagcatcaaatgtcaaatcaatattaatatactttacttgcacacacaacagcataaaataggaagatcaaatcctttaatggttcatagttcataccttgcgcaacttcatatgatgacgaactgttgcgtagagtagttacaacaccagtttttaagagtccagacacttgttttatataatgtgtgccggcttgcacgtatgccaagctttggcgtgaaaaagaaccatttgcaggcatgcgaggagcaacacgaatgtttcgaagagcatgacatcctgaagttagcgttgactgcaagttggagaagcgatatttgatggaatccagttttattgatggcctgtaagtaattatactacagccagtaggtgggtccagggccattttcactttacgcactgcgcaatgaaaactcactcagtaatcttcaataacaaaacacttgaggtgtttgaagttgaaggtggcatttaataacaaaacacttgaggtttttgaagttaaaggtgacacttaataaccaaatgcttgaagtgttagaaagtaaaggtgacatttaatactaccttggaccttcatcttgccaacaactttcttaggtttgggtgcagctgtctcactggctagttctgaggtttgctttcccatcagttcttcctctgattgtaaaagcacttgccgtaaactagagttcaaagaagacgattttaaatctcttaagtagaagcgaaaaagaaaacactacaaacaaatagacattccaagagaaaacgaggtgggggtgggggagacaaataatgacttcacatttaaattttcttaaccacacctattcctaattttatctcaatgcttatttcatcccctgaacttatgatgtataaataccactcaaattacattatctatgtctgattccatcttacaaaaaccagtaagaattattacataaaagtttcattgacaagttatcaaggacaaatagtcagcaaaaatattacaaaccaaactacatgtatttatattaaaaaataatacatatttaaaaaaaatgatattatatgtataaatgtgtgtgcgaattcgaaagaattaagaaaaagacttgattttatttttcaattgtttttctaagtactaaactacaatatattaagctaaatccaagaggcataggtgtttttaatatattaccctgttagaagtacaatttatttttgttcctagagtgcacaggatgtccccttccataacacgttcgtgcaatttatcaaaaacataaaacaaaatcttgaaattaggcatgattgagaacaagagaaagacaatgaactcaccaaaatgcctcccttagtagtgcacattcattctccaaaaacattggtgcttccatgcattccattgcccaagcatgaaggcaaaggcgcacacatgcatcataagcaacaaaagcatgccatggccctagtgcactggtttataatttacacaaacacagtaaatcaataaattgaagaactgaaacaaagatcttttacatcatctacatcatatacaaccatgggtttggtttgaataccttgcatgaaacgttgggagtcgagccaggctagatgatgtagtagtttctaaaccagtagtagttctacaaacagaaagattagaaaatgtgaaatacattgacatcatgggcaaaatatataaatagatataaacatatatattgtgcctctcaggttactgtgttcagtaaagtaaaaccaagtgtaaaataatataaaaatttgagcagaaaacttcagcatattattattttgtaaagggagcaataagcacacaccttacaaaattgtcagatttttcatttccacttttgctttctggcttaagattgggtgtggttttattttcaggtgaagctgctgcatttggagtactgtgcaccccaggagttggatttctgtcggcagcttgtttgatttcttgaatagcagagctgccaccaattggcggtgcactgggaacatcatcatcatcagagaacttaccattttccatctttcttgaatgcaatccctgaaaaagtccgggtagacttgtaaacagctccataattctggttgatagtaagaacagctatttataagacatgaacagcactaatagaaatcactgcattgcctatactgtaaaacnccaaccatcttatgtggcacatgaaaattaaagaaaccctacacaatcagaatcaatcgagct

SEQ ID NO: 189285 - DNA, 2072 bp, Cannabis indica
taaatttgatctcctatgatatctcatgtgaattcactcttatcacttgttttttacttttagatttgatctcctatgcttattaaattcatgtccattctcatcaggtcaggtatgggatcgagtttcgggtcgggttctatcttggatcagtctggggtttgggtctagtcttgggtcgaatctgggtccaggtctcgagtactgtcctgtcccgttcaggacttgggtcccatctgggtttggggtctgggtccgagtgcgagtgtgggtctgagtttggtcttggtttgggtgtgagtgtagggtccgagtcttgggtcaggtctgggtccgggttcgtgttcggtccaggtcccgggtccgagtttgggatctaggtccaagtctcgggtggggtcctagatcccagatctaagttcgggtcttgagattgggttcgtgtctcaagttgggtcttggtctcgagttaaggccggagtccgagttgggtttgagtttggatccgggtctcgagtccaattcgagtcttgggtctgggtttgggttcgggtttgggtcgagtcccagatttgggtttagatcgagtttgggtctcaagtcgggtcccaagtccgagtcgggttcaagtttggatccggatctcgggtcttggttcaggtttgaatctgggtccaggtctgtgtttgggttgagtcccagatctgggttagggtcgggttccagatccgtgttcgggacagggttccagtttgggtccaagtctcaggatccgagttgaagattgaagttgaacctggactttttgtaaatattataatacaagttaatacagactatttgttatgttaaataatacaacttacattgtattaaaaattttgattgtaaaaattaatacattattttattttatcccaatataatattatttattatttaatataatacattttaggataattcattccttatactcaaagtcggacatgtctctaattatgctatgttctctacttccttaagtacagttggactattgggaaaataggggaagaaaaatgatcgcttcgaggtcaatacatgtcatatatatacatagagagataggttcctttatctttttgaatatgtaaaaaaaaaaaaagtttatgcaattcttcaaatatatcatcattccaggcataacttcttagatggtatttgccaagatagtactgttttaagtactttgattacataatcattcgcataacttaataaacaagaaatatatacctttattaacactactactacgtacccttacgaataatcactctatataacaatttacttcatcaacgtaaattaaaacaacacttatttctaatcaatatggagccaacaagaatttttgaagcctccctcaccggtgacataacaaaactccattcattactctttgaagacccgttcctactcgaccgagttaccctaaactcggtcgaaactcctcttcacatctcatgcatggcaggacaaacagagataaccaaaaagtttctctccctaaggccgaaatgggctcaagagcttaaccaacaagggttaagccctctccacatggcctcggccaatggacatgtggagatagtgaaagagattgttagtgttgttggagccaatatttgtcgtttgaagggacaagatgggaaagtttcacttcactttgctgccatgaaaggtcaagtaagtgttcttagggagcttgtttcggcttgtcccgagtctctctcggaagtgaccgtgggagaggagagtgttcttcatttggctgtgaagaataaccagtttgaggctgtagggttttgattgaagagcttcgaaagcttgggaaaatggagatagttaattggaaagatatagaaggaaatacggttttgcatttggctacttttcataaacagcaccaggcaagttcactctacttttattttgatcgatatatatatggttatatgaaaacgtaagcttttaggtaactatatatatatatatatattatatatatatatattagtagcaatata

SEQ ID NO: 189286 - DNA, 2611 bp, Cannabis indica
agccgatatgtttatgggttcaaaaatgcaaattacaaaagtgaatctatgctaagcctataattctgtttattatttgcattgctgaaaaaacatattttaacattcttacacaggcacttgtatctgttaaaattcactttctttcttttaaatgactcctcgttgtgcttcctctatgttattcaaatttcattcaatcatgatattatcactcgcctcacatttctgtccatgtaataatcattttcccattgttctatccactcatgtagtaatttgtagttccaaagcattcctcttagcactctaatggtgcaactccactggaatattgctttaacttatttttctcttagggacttgggaaatcaaattttctatgtgattattttggtcatattgtactttcgtgacatgtttgacaatgctttaaacaagtcatctagtattgcttgatagcttaagttatttgttgtaaaatttgtagtgatttataacatttgatttatttattataaatttttgcaatgttacctagattagagtggagatttcttatccacaaatctcgcatacattgatttaatgcaaaactgtcattttcttaaataggtgtgtggaagctctcaaagagtgagggacatgatgatcatgggcttttggttagcgagaaagctaggaagtatgccattgtgaaagagctagatgatgttttgaatctcaaggacaaaacaattgtcttgcaatttgaggttcgacttcaaaatggtctcgagtgtggtggtgcatacttgaagtatctccgacctcaagatgctgggtggaaagcaaaggaatttgacaatgattctccatatgcaataatgtttgggcccgacaaatgtggctccactaataaggttcacttcattctcaagcacaagaacccaaagaatggggagtacgttgagcaccatctaaagagccctccatctgttccgtctgacaaactcactcatgtatacactgcaatattgactcctgacaatgaagttaggattctagtagatggtgaggagaagaagaaagcaaacttcctttcgtctgatgattttgagcccgctttgattcctgcaaagacaattcctgacccaaatgataagaagccagaggactgggatgagcgagcaaagattccagacgcagatgctgtgaagccagatgattgggatgaggatgcaccaatggaaattgaagatgaggaggctgtgaaacctgaagggtggttggatgatgagccagaggaagtcgatgatcctgaagcaacaaagccagaagattgggatgatgaagaggatggtgaatttgaggcaccaaagatagataaccccaagtgtgagacagctccaggttgtggtgaatggaagaagccaatgaagaagaaccctgcttataaaggaaagtggcatgcacctctgattgataacccaaattacaagggcatttggaagcctcaagatattccaaatcctgattattttgagattgagaaacctgattttgagcctattgctgcaattggtattgagatctggacaatgcaggatggtattttgtttgacaatatcctaattgctgctgatgagaaggtagcagaatcatacaggcaaactgcttggaagccaaagtttgacgtcgagaaagaaaaggagatggccgaggaagcagctgctggttcttcagatggtctctctgacttcaaggtaatacatttatagatgctctttcctttgtttttatatttatatgtgtgcatgtagtttatgcttccggaccatagtattatctaatgtgaataaactattgcagaagaaaatatttgaccttctgtacaagatagctgatctgcctttcttgagtgcttacaatcccaagatcattgtgagtggcagtattatggaacttgtgatgattctcttcttaagcgagttttcatggtgttttaaaatgctgacatattgtatttgtgatgtaggaactcattgaaaagggagaaaaacagcccaacattacaattggcatccttgtttcagtcgtgattgtaatcctgactgtgttgttcagaattgttttcggtggcaagaagcggccggtatgatagtttaatatgttttgtaatgactgtttgtttgttgggtgctgtggtatgttaggtgacaattacaaatgtttgttggttttgttaggtgatcaataatgctgaagcaaccacggtggccccagagtcctcaaacaatcaaggaagtggtgaagagaaggaagacgagaaggagaaggacgatgcagcagctccaccccgaagaagggtttccagaagggataactgaataaaaatagcatttactggttcttgaaaattttgatttagactgactacttgtgaggttggattctttgcttagtttccatttgattatagaacgtttcaactcttttggaattgattggtggttataactatttatgtttatcagacgtacgacgatcctcattttgaaggttttgatcccatgtgcttcattccaaaatattctctaatagaaataatcttggatacttgagtgttttt

SEQ ID NO: 189287 - DNA, 1078 bp, Cannabis indica
gcagctctttccttttaaagatgtcctcattttcttaacgtgatgcataggctggccagttgaaagttcaaaacaaaatcagcccttgacacaatttcttgaaaatacaaatttatgttttgtcatgtacaaatttaaagttatattcttctggtccgtagtctgagatgcatggagacttgtgtgcatttactcaatgtgccccattcagtactaaagagttaaaaagcatcaataaaaacatagaaactaatcagaatgtgagaaacggttctctctacaattgagcatgaacaacatgtgccaacctcaggaaaatatgcgacgtggcataagttatacttcttgaccaaatcgtgaggaagtaacaccacacaaaatgacaatattaattgcatttgcgaattatgatcataattagaagtgaaattaattgtgagtgcgtaaaatgatctattaagcaagtaatagtagtaataaactagtattaatgataaattacagcgtatgacccaccaaatttctccataggaaatagggaaagaatggtgaaaataatcagtcaacaaatataaatgaaagaatagattgagaccaaagatgcataggaaatagagaaagagaataacgtgttcctttggtggcctaagattcttcctacaattacactttttgactctcttttctttgtttattaattaacattattcccctcttttgatcagtactcaaatataaattaaatattcttttcaaaatttatacaatgaacactttcaagaaaaaaaaaatgtaaaatgaatttccgttttattgaaggtattaatttcattatataaatatatataaaaaagaagtcttgaattatggaagttttgacatttgagtccaactccacacatattaataattcatattaacaaaattatggaacatgggacagtggccactggacagaggtgaagaaaaaaaaaaagctaaaaaggaaaagagaaagcttgagatgggatgagacagtaatgaaaatctacgattgtgtaaagtgaaaaagagagtcaagagtatggtgttagtggtg

SEQ ID NO: 189288 - DNA, 2733 bp, Cannabis indica
agaaactaaaatatgcttacctgttgtttagaggtagatgaatttatagtcattgatctcttgacaacagatccagatcgtttgactggaaaatggtatgatgatagctctttcatatctgattacataaaaatcatcaaataataataataacacaacagaactaaattttcacatgttttatattctatgagatataaaatttttacaaacctggtatggatgcagttctcttcaattgaaaagtcttaggtgaagaagaacgtggggtctgtgcagatatagatctttgttccctgaattaaaatttacatagacatgtatgagattcataaggttattataggcatgatatatttaagtttgggctaattagaattttctatcccgacatgtaccaaattgtgtctttcaaaccttttaggttataaatttttttgaactattaagattgttagatttaaggactatcctttaattagtaaaattaaacaaaagtcattaaatttaacaatttcaatagtttaggagagcacaattttgtacatgtaaaagtctgaaatttcttaattagccttaattatagtgttgaatgaaaggtgtttaatattttacctgtttaattttgctgtggtatccctgtgttttactttaaaaaagtatgaacatagataaatagatcagtcagaagttgtgaaatggaacttgaaaaatatatataactatttatacactacaaaattctcagagtaagctaaccatgaggtttaaggttttgtgataaattaagtgagtgagagtttatttttagtataaagaaagagaataattaaaataccattatgaaacttaacagagtcatcttcagcactgtgagaaatcatattattagactggttaattgtattggtggttgcctcaactgaaataaaagtgttgagtcatttagttaaatcaaaactcgtatttttttttcaatcatgttctaaaaacaatttatacatgtatataaatacctggaatgatgtatcgtttatggtgctttgaacaacctaaggttaatgattgttggaaaattccacctcgatcagtgtagccttggcatgttcttactttctaagattaaaaaagaatgatagagatgagtaaaaaacatcaaaatcccacctaagaatctcctcataataatcttattgttatgactataaacaaggctaagcctaagcccaccaatgaagaaccaaagaaaaaagaaattatttaaaattatacatgtgattctgaataattacaacattcatgattataaaaaaaaataaacaaaatatcacatattttttaaaataaagaactcaattaattttttttctcgtaagactcacccaatctcaaagtcggtcttgagtaaagtatattatcgtatgttgcaaacttcaaccacaaatggtgatcaaattagtcaaaaagtaatttatttgaagcattattggtataggaaagaaatgagaaatgcaaaaaaacactattattgtctagcatccttcttatgtcatactattattggtgtcataccgttattgtgtaattaagtatcgaatttcatataacttaaagacaataatttttaggaaatattgataatcaattataaggtgtcacttataaaagatgcccgataacaatgctaagaaatccttgaaataatagcctaagaggtttgtaaactgagagggtacctgttcaatggaacatagtttgagatcaacacttgaaacatcaatattcttttcatccatgaatttattgatcttatctcccattgaacccaaatgatctacagtattgataaatgctttaatggtataatctttcaagttctccaccactctaaaacagtagattcagacttgttaatacattagaaaattatataaacatatatataatagaatatacaaacttacttacatttgtttctgatcaccttttctatatgatacttcaaaatactctgctgctgagtacaattgttttctcatattcttcaattccttaatccaaaaaaaataaacaacaacattcagtttcttcatatattatttcctctatatgtgataattaaccaaacttaaatttttactttcaaactgtctgaaaagatcatcttctgttgcatatatagttcatcatggtgtaaaggctgtggtgatgaagagcttaatatctccatgtatggctaaagaaaaaaaaaaagtgtcaaatagacccaataataacatataaaatgaattaagtaagagattaaactaatgattagataaagaagatacctggggttttcttgttactaatcttcaactgcaaattgagttatttttcccacaaactcaaaactatagtcaacaactaacaactgcattacttaataataagatttctaacaatttataaagagatagttactgagaagtgacaactatccaataatagtttgttttgagtaaatagtttgaaacaaaaataattaaccaactttttatactaattattttaagtgaagtgtttagtgatggtgtctttcacttttttgttgtaatggagaaaattatgaacctataaatataaagccaagtgtaaaccacattttggtgggggtaggggggcctctctaggagtagatgggaaagaagggtatcttaaaatttaatcacatttatcatataaagtcattgt

SEQ ID NO: 189289 - DNA, 2778 bp, Cannabis indica
ataaaaggatcgccattattgtagtttgtagggcaataataaaagtaattttatagtgaaaaagaagatgataatgcaagacgattttgagtacttgattccaatacatatttcacatttaaatgaataaatataacaattgatttatttttggaaagaagataatgaacgaacatgtccgatgataagtatgaataatagcaacaaaaaataaaaaattccaattgcgttactcattaaacactatttatttatttttattttatatagagcaaattttgacttgctaaccatttttttttacatatatatataaaaaaaagttaattagtaattttttctcttaaattttgatatgtaccaaatcgtgttttttgaacattttttaccgttaaaaattccttcgaactattaaaattgttaaatttaagtacttttgtttaatttcattcaattttactgtttcaataattgtttatgtactaaactatgctccttaggctgtactaaatcatgccctttgaattttcatccatattagaatttttttactaaaattagacaaaagtttttaaatctaacaatgcagggagaatttttaaaaagttcaaagaacataatttggtacatgtcaattgtcaaagttcgtaaaaaaaattactaattagtctaaaaaaaaatggaagttgtgaccgagccagtctaatcataactcaataaagaatacccactatccaatataatttttcatttctccgtagaaagtgtgactgaaaattaattaaatgaaaaaaaaaaaaaactttaagcacaaaataaagattggcccattaaagaaaaatgaagtcaaaacccatcactctttatgtgaaaaggtagctcagaaagtggtgcaatgatcccaggaagtcttcaacgtcatagtgaaaggaacgttgaatttgaatatcgcacaataattttatctatttttttttaaaagaattatttattaacttttgttttaaattattaagatgaggttgttttaataaagttaatcaaaaaaaattaatgagagagagaggcttccatgttaagcatatgaatccacagttattggaaaaatataaatgaagattccaaacgcaagcttatagagatcttcaaatcccacccagatgctcactttttcttctctccctttcaaatttactattttttttttttttgtaatatataatatttatgtcactattttggtgggacaaagaatgtatgtctctttggcggttgggagagcaacaataacaatgtgtattgtgaaaatgacacatctttgtcacgcatcatagcaagaaattaataagatttttttttaatatatgtgtataaaaagttatttataaaaaatgctactttacggtattactaattttctcaaactaattttttttttattatgtatcttttcaatttatagtgtctaaaatagctcatactttagctaagcatgccattgttgtatttgtatatacaaactctgtttgctaacccaaattttctttgtgttatcgggaccttgattgagaatctcttgatcctctcatcaaggcacatttctttcaaaaacaaaaataaaataattatcaaattattattttaaaatataaataatattgtaatgattaagtttcaaattttacgaacttaattacgttagcaaatatgaatatagtcgtaagtttatcttgatgatattatattttttctcgcagaaaaaaaaaagagctagatctaaaattttatgtgaacaaattatggcatatttgttaacatataaacatatagaaatctgaaaattatacatttgaaatttaaagagaaaatcttagaaatattaacaaaattctcacaaacataattaaatggaaaaaagaagaagaagctaggtgtaatttctacaaattaaaacctacatttcccaagctcttttttttttttttaatttatttattcacactaaaaattagggtaaatatgactttttattttgcaaaaattacctattagactatttgttttggttaaatgaaaaaatagactatgtattttcaaaatggtacaaataggatcttgaactgatttttagtccaaagaaaatttaataataattcgatctaaaaatgttatgataaaactgtttatattttctatatctgttcgtgttaggaattgtcttcaagttggttatattaaaaaaaaaacttttaaaaattaagctaaagatattatttttaccattttagaaaatataaggtctattttattatttaacaaaataaataatctaattggtaacttttacaaaacacaatctaaaatattatttaccctttttattatagtcaattttgaattttacttaaatagtgtgtttggttaatgagatattaaaattgaaggatgctttcaagatttgtttctactttttgaggactagtgtatcgtttatatgtatatatatatttattgatgagaataatgttattctttaaaatgatgattttgacttggccacacaagtatagttgggtgtgacctctttgtaatgtcacatagtagaaatgggaataaagaaagctgcaaatactattcccaaggtgcctcaatgaatggttactaaaatctaaaacagagtatattcctccttaattaatcttcaaaataaattcggctgacgaataaactatataattacaatttaaactaacatattatattctttccaaaaaaaaa

SEQ ID NO: 189290 - DNA, 1024 bp, Cannabis indica
gtaataatacgtaagttatatttgttgaacttctgtaggtcccgggtcattaagtgttagttaatgaccacgtgacagttcttaattggtctaagtcattaagttcttatttttttatttaaaaattaatttaaataaaaaaatgacacgtgaataatgacttcacacttaattgtcagacacttacgaaagttttaaaaatataatttaagtatttatctacaatgttattttattctttatatgcaatttattgtttttatttaatttattataaatgagtaaaatttcattgagtaattaagaaagattagatagacatactggatgtttaatgaaaataggatgatcttgagtgaggtcaaagtcaacttcaggttcccaaacaacaatatctgcaaagtttccaactttaatggctccctgcaacaagagagtgaaaactcatttgaatatttataatttttataattattatgagagaaagataattaatggaaaagaattcccaggctctcaatctaattaatcctacattatatcagagatcaaaaaactataaatcgatagagtcagagatcaagacctaggctagttcaagtggctttaaaagggtacatgtgtttgaggtcctggattcgagtcataagttatatattataatatataaatgcttaattcaaaaaaaaaatacctaaggtggccaaaataaagaaataaaagaaatcggaatagccgaaacattagtttaaaaaatataataataattaaaaaaaattgcagatagccaagactatattcctttgtcgaccctattgtatatgtttatctaggaaggttcaaacatcaaatatggtaagaagaaggtttatgctaccattttttggtgtaaaccatgctataataagtttaagctatgatacaaatcaaaaattaaaattgtcttactatgattatattgagtgtgctatatttaaagtggaatttgagtattattggatctattttataaaattttacaaaa

SEQ ID NO: 189291 - DNA, 1190 bp, Cannabis indica
attacaattccaatgtttggtttgcttttaaactcttgtaatgacattatattgtaatcactattacatcacttgtatgaaaagtgattacactcctatatctcatgaatcctcattacaattactcaaaataactatcttactcttattttatactttttcttactaagataggaataattttgtcaattcactacctattctaatatttattccaataacaaaccaaacataacaatcaattcctattacaattcttattccattacattactattaccattccattccatcaaatcaaacaccaccttaacaactaaaaaatgatacaactgcaacaaaatagtaagataatgtatttttactgccattttttttatttaagggcatatgtatagcaattaaaaataattaaaaaaatttgctgcaaatatccctgtaaaatttaaaattttattaaaaaaatacacacagattagtttagtttaaaatcataaacggtctgaatttaccaaactattttcacataatctatttagtccagattggttaaagttcaaaactaggcattacagattggtatgaacagcaagcccaaagtccaaatgtaagtgtgtttaattaggttaataatttttattagtgatggataatatcaatatatcatagctatgtgacaacatcactattcttattgtctttcttatatgagaagaatcgacttctaaacaaaaaatcttcacaattcaaaaacaagactttaaagacttttactataaatctaaactataatatggtgccatgaatatgacaatctgagtttatgacccaccaagaaaatgacaaaaatacttagtagttaagtaccaaaagaataaactatacaaatattagtattaagaaacccacttggagttggagttggaatacacaaaacaaaacaaaacaaagataaacatatgtataaaaaggaagaggacaaaagcttgaacttgaagatttcataagcaagcaactcaaaagtccaactaacgttggtacttggtagacacatgttttgggccatgactcctagtttagggcctcctctactttccttgtttgcacattaattaatttatagctcactttcccaactggaatagaatcaaagcccttacaacaatatcctcaatctgttcactagtgaa

SEQ ID NO: 189292 - DNA, 1789 bp, Cannabis indica
aacaccaaattttatattggcttaatttagtgtactactttgtttacccaaatgtagttaaatgatttttcttgcttaatgaaattccaagttattgaattaatcaatggcgaactttgatttttatgtatattttttctcttattatacttacacgtcgatatatatgtcccatatattactcgatcaccaatcatatatatgtatatgattaattagtttcaacatgctagttcaaattctaatgtaaacttgattgaattaatgtaatcgaagaaagtaaatgagaaccgcacgtaataatatttgttatggaaaatcaattagtattgtttatatcatgacctatatgcagctatatatatgctataatttaaacaagcataaaagagagagagaaatggttttgaaattctatttttataaatcttcattaataatcaattgactgaatcatcttcatcatatatatatatatatacacgcattcgtaaaatctaatcaacaaatatctcatgcaaagttaggcaaccataattgattggtaattcgaataagatattttgattgagtacgtagtcttattattaatttatatacattaagtgtatatataacatatgctcaaaattaacgatcgtaatcacatatcaaatatcatacactatggtcaccacatattcaagcaaactctaaaccttacttaccacgtgtccaaacctcatgactggccgatcaaactatcccacgtcacaaagggcattggtcaattatcaagaagaccatatccataccatccacattttgtttattcaataataataatttataagatatacataatattttacaatatacgtaagcttccaggattttgcctcctcctttataatcttgtataataaagaactgaacaaccaaacccatatatattttattttatatatgtatataaaataaaaacacgaggtgggcagctatgaaattttgaaaaatccctagttcgcaccgttcgaacgtgtcccctttcactcctaattcttctagggcccacaaacgcactcatatttgatataattatatataaaaaaaatcatattatttattacacaattacaaaagaatcccaaacactactatcagcttattgctttgaacccacacacatttattatataaacacctagctcatcacaacacacccacagtacagtctcatgagattgagagctcaactcatccttatataattattaactagtttaattacctcatcactcttctcaacccattacatatatatatatataacgtatatattaatagtaggaaataatagtatagagtatatatatatagtttgatagtataataatgggaaacaacgactgtgtatacccaaagcataaggtggaatcggcggcctaccacagggtggcgattccaccacctcagccatttgttaaaacgtttaagtattcactgatggaaacgttcttcccggacgatccattccgacagttcaagaatcaatccccgttgagaggagtgtggctaggactccagtacttcttgccaattttggaatgggctccacgctacactctcaatttcttcaaagctgacctcatttccggaatcaccatagctagtttggctatacctcagggcatcagttacgccaagctagccaatttgccacccattctcggcttatgtaagtctagtattagtaccatatatattaattctttacaatatatagctatttttttttaataatattata

SEQ ID NO: 189293 - DNA, 6135 bp, Cannabis indica
ctcagaacataacaacagtaatggttgctttggcactgcatcctcagcagcattcccatctaatttaacattttcaatggtcatttcactataagccagttcaatgattatatatattacaatgctttcaaatacacttaccgaaaatatgcatgaatagagctttataaggcttctttggacgaacagttgttgcgcttaatctgttaccggtatcactatctagagctaaaacagatgaatcctttgtcccaactgctagcacattcttctcgaaaccatgtaagctgcagatttgaaactgcagtgagatgattccagtgcagatttcactttcaatatgttgctgatataacaagattggaccctctatatcaatgactgaaacctgtttagaacatgaactggattacgtaacaacttcatggaaactgattacaagttaagagaaggaaatggtcgaaagtggctcacgtttccttgatcagacccaacagccaaatgtttcgagttgtggcttatattcatagaaagtacagcaccattggtctttaagagtttaatgctttgaattacatgactgtttcctttctttgtacttcctgtcaagacagtatttttataagtacatcacagtgctgtaataatcaatgcatggcctcaaaatcttgtaattaaagcgtgtaccttgaagagacaaaaagttgttctctgtggcatatggctcgggtttaagtttgtaaattcgaacctgtggattcagcttacttgtaaaaacactataacatagagtttgattccttaatcaagaaggagaatagagcttaccattccactttggtctccagaaacaagaagccgggagtcgccatcgaaaaacaaagctgtgattggtataccactcaaagaagaatcatcttcactctgcattcaaaagacaccattatagaacactttgaagtgatcaaacaataagatgaaggtgttaaagtgttaacctgttgttttattgaaaagattggaacaaaaactggggaagacacatcccaaaaagttatggctccattactgtgtccagttatgtacaagttcttaacccttaaaaatccactaaactgatatgatgatgatccatctcttggcttggcatccaaagaaaacatatgtggcatatcttttgccaccataacatattcctacaatttcaaagaatcattatcatatagtttagttcagtgttgatgttatgatgagtacataatattgcatacctcatcagccaaacctaagtaaggattgtctgtaataaacttggctgcagtaatgttcgaatcagaaaatggcagcttcaccataaccgcctttgggagagtctgctgggacctggattggaattgtagaagatacttttcaatggaagaatcatcataggcataaacatggcctgatttccccagcaagatgaagtaatcctgtctatgtttgttatgctcattggtgtttgagattatctccatatcaatacatggctcgggcaaatgaaggccaagtttgattgtgcgagattcggtgtgatcattcaacagaatcacctgcatcattcattaagcattatcatcaaagttgttaaagtctttgttgaagcatttgattaagtgtgatgatcaatgtagtacctgagacaagttttcacaatcgaagtttgagtcaccggtcacataaagtctacttgccttcccatctgcataagcccattttaatgaagctataggaaccttgttgagcttatatccaacattgagtttacatattggagcatttggaatagcggtcgagtctgataagtttgagatggaaggaacactccaaacgaagatctccccattgttgtaaccaacaacaactctggttccaaatgggcaagcccaacatgcacaagtggctttgttgcttcatggtgtagagcctggaacaagtttcactgtgtgacaagactttgcttctcggatatcccatagtgttatcaaaccatctctgaaaactatgagaaccctgcagtgaaaacaagtacattggtagctagaaacaacatacagtagtaaaaaccaaccgaaaaggtttgctgagaaagtacttacctcttactttcagccattggttgaggcagatactgaccacagcagcattttcaccagaaactttagtggaattccctacaccagattattgatgtacttggtaattataatcatcatcatcatagataaacaacaaaatattaagttgctgaagaatgtctcaccatgagaagctgaaaagggtatgttgtaactagtttgtactagacgcgacacttctttatcaagcttcaaaaccgagacattaccagcaatgtctccaacatagctgcaaacatatattttaagtaaaacacattaatgtattcatcttcagaaggcctacgtagttatagtaaaaaagcttacatgaattgactttgctgcagcacagcgaaagaagtaatctcttgttgcagagggggaagtacatgagttaatgttttattttcgatgtcccaaacctatatcattgctcagaactttgttacaagaacatgactaaatcttatgaatgaaactaaaaaagacttgcctcaatgctgttcttggatgttacattgacaagaatgcctttattatggaaaaactgattaatatgcaaaaacaaaattctcatcagtacaacgaagttccaagtttatgaaaagaagaagaaaacattaacatgatgaatatgaaaacctggagaaacttggttggttgagcttcctgagattgaacaagtaaagcttgagtattgtgtgttccgaataacttaatgcggccatcattgctgagagtgagaggttgttaacaagttaagaatgaatgatgtgttaatgaaagaaggagatgatatgagtttgaaggattgaaaactgacttggtagaaatggctagtgtgttttgaataggatcataagcaaagagtgaagatgttgaaggtattccatggtggaatacaagccttggctctacatcacacccttttacactggcttctcctccatcatttgtctacaatttcaatttcaatttcaaaacaaaaccccatcaacatcaacatctttttttacttaatatacattctcattcatctgagtctgtagggtgtttgctgtggggttctatgcagaggaacacaagacaagacatgacaagacaatctcatttgttgtactaaaatgttttatgttttaagggaaaaaacatatagcaccggccaccacgtggacatttgactttgaatgaatctaggtggtgaaagaatattgctatttggcataagtggtaattatataaaactaaacacttaattgtattaatagtgatatcacactatttctcttactaaaaacgacaactttaatcatttaaagataaataatagattggttggttgaaaataaaattaaagattgaggagaacatcatcaaattcaaaacaagagtatgagaaagacaaaagagaaagggaaatagtaaaataatataaggattggtatttggtatggtgtggtggggtctccttatacattagattatattattaaagcttttcttcttggatccttcacccttaatttcatcaaatctcatctcaaaacaaatctaatttgaatttcatttaaagaaaaagaaagaacagatcaaccaaacaagaccagaccagaccataacatgatcattttgatgtatgtaaaattaatcatgaaatgaagaagaaagaaagaaacataccttcttgatagaagctttctccactagtttcttcatgaacatctttgctttcctttgatttcagacacagtcagagagagagaaaatcagaccaagttggtttttgttgaatttgatttgaatgtgttatatattgagtcaagtactaagttttatatatatagaatagaaaagaagcggtttgtttttatagttgggaagagtgaaaacagacaaagaatcaaatatatatcaatctgatttttgcagttacattatttattaatttaggaccaaaaaaactgaaagtgtgttatatatgatcttcatcctaggactaactcctgacacgtggactataatcattagtctattctatttatgtttttgtctctgacacttttttctttatttatatttatccaatggaggagtgacaactgtcaccaaatcacaatactcaactttttttggacgactacacaaacaacacgtgtcaaagtcaattatgtaactgtaatagtaggaccctttgctttttttctttttaattatgtatatatcatatatgagtaattttcaattaatgccatttatttatgtctaaaaataaaaaagatttcaatagacagctgtgctgtgcatgtgttttatggaaataattttattgtagaaagcaaattaaggcactaaaaagttgaaaagaaacggataaaatctcatttttaaagtgacataattaattaattatataccaaaatgggttagttagtggttgttgtttctttcttgaatcttcaaccaagcaaagtgagcccattagacatggatccatatagagagtaggcccaaaagcccaaaagagaaagtggatcaaaagcccaagttgaaagagaaatggatagaaataggcccacgtaatcatataggataagtggaggcgtaaaggaatagcaaaaaggtctatggaggcgccgacatatgacccacctactgcaactgcaagagaaggagagagagagaacatgtaataaaaaggatggagaaaaggagccataaaatgtaatgatggaatcacacaattcatgtataaatacaataacgataatatatatatatagttgttattgttgttgttggtcatgatgatgatgatgatgatgatgatattataatactagagagagcacatgatgagaaagctcattaatgtatatttatatataatgtaagggtaagtctataattttgttagatccatatctatttcagtatttaaaataatattttaatctaattttcagtgtatgttataattatttaaaattatttgtaagtttttaaaaaattttaaataatttacaataccgaaaataaaatttatatatttaattacacgcgcaactttttttcaatcatacaaaattttaaactaaaaaagtattttatatgtgaaaacatatatgtggtctaatccctattatgagggtctactacaaaaattttcaataatataattaagcatatatatacatatggggtctagaagtacatgtacatttcttctttacaacctaataagccatcattcattttctttctttctttctttctttctatcttaattttcatgcatgggatgagtatgtatgagttgtatatatcctacttttcatacatatatataaagaatgccctactacttttccttttcatggggaaagcaaaccccaaactaaaccaaaccaaacaaatctcatctcatctcatctcatctcattattcaaattaaacaccttttcttttctctttttcatttttaccaatgatcaattttcatacatacatattaattactaattgtgaaacaaacaataaactatcaaatcacatatcatataaaaattggccacgtgagaggggtatgagtagacaaatcacatgggcattggaatattttttaataaattgaaaaataaaaaaccaaaacttttttctattgtataaatatatgacaccaaatggaggcatcgtgttgtaccaatggacttacttatattcttagctgttcttcttagttataagtctctattcttttttataattcttttaccttaatttctcattttcattttaacataaacacaaaatacacttcatttcaaaataaaaattgaaactttacaactaaaaaagggaaaaaaaaaaaagaagactttattacttttgcatgaaatgaaatgaagggcattcaattcttaaaaagacattctttatttattattagtaactaatatttatagctattaaataaatt

SEQ ID NO: 189294 - DNA, 4124 bp, Cannabis indica
ctctctctctctcttcatattttaagattatttggataggcatgggatagtgggttgtgaaacttaaaaccaccatggactatctggggtaggcaagaaagatatctagaatccacatgagttatctatcaaacaactatgaaatcttcacaaagtggattttgaatactttttgcccaccaaaaccaatgaaccaacaccaaaatgatgccatatatgtagcattgaactattaataacttcatacttcatctgatcaaagatgttttacctcttatgttattcttatcttaatataattggttatcgttggtttagccaccattgaggttctttgctatgtttaagctataatcaataactgaaatgcttgaacacaattttggcaattatagatctatgtatcaaaattgatcaaatgatggaaaaagctaattcaactgtttgtgtttcaatgagttttgataatcctagaagatgggatttgaaacttcatgaaactgctcagagtagttttaagagagcctatcacctcttaaattgtatctcagataaaaagagagaaacaagtgttcaagaaatgactctcctagctcaagatgccattgatgaattcaaaaggctgcttactctcctagacaatggatcggtgctatcatcatcatcatcatcatcatcatcagataaaaagaggattagaaagggtcctctgcctaaaaccaatgatgtaaatcatgttgaactgatggatagtccgaattcttcttcgtacaaaactttggcatacagctcaaccaaacccttcataggtaggcagtttcatcctcctcagagtactagtcaggcctctagttccattcatagaagcagtctcagcctgagtactttgattcttcctagtaattcaatcatggggatgagccaattctctcaacaacagcctagctgcagctctttgatcagtatgaatggaagtagcattattaaaacaaatgtggttcaacagcattcatcctcaaattttttggcttctgaggtcagcacttcttctatactttcttccaagtggatgtgtggggagaaaagtgaagatactacaagtatgaagtgtgtagcctcaactggtggatgtcactgctcaaagaggaggtgatttgatctattatctatatcgatcggtgaactgtgttttctgttctgtaattttcaaaccaaaataatgtgtcaaatcttactgaattgattctgatagtattgtaattttcaaattagtgatgtccataggttgtttctcttcatttttacctttacaggaaactcaagaaaaggaggagaattcgagttccctctgttagcaataaattagcagacatacctcctgatgactactcttggaggaaatatggtcaaaagcccattaaaggatctccatatccaaggtacaaaaaaccttctttctttcttcatctttgctatttaaataacaaaagaagaccctttttgtccacttatttgtaagtctaatattggaacaaattataagtacaaagaatctaatgtttagatctcttagaactgttatagtttcactgattgtcttttaagtattagttttcttgccttaaaagttactttggcatttacttactctccaattttatgcattatttttccaaaggagctattacaagtgcagcagcttgaaggggtgccctgcaagaaagcatgtggagaggtgtttggaggatcctaccatgttagttgtgacatatgaaggtgatcacaaccactcaagaatcacatttcaagcacccaatttgatgattcaagctcaacaataaactgaaattttaaacaacaaatgggggaccaacatttccttatggttgcctcctcctctgcctaactaacaacagatgaagaatcgccattcggtatatttgcctttttctttttgcttctatgtatacaaaattaaataagttatcttctggatcacttgtatacactcttgttacacattccaatcaaagctctttacttagttttagaattgaactatttggttagctacaaatttgcgcgactaacagcgccaacaaggctttgattttgtgataagtccagtgctttcctcttaaaacaaaacaactttagcccttattcttataagtgaagcagaagattgttttgttcagtgttatgctaatgaaatttgtagttgagaagtagaaagaaccaaccttagctgcatggtattcatgggaaattcgactcaaaatgaaacaaaattgcatgaaagaagaatatgccaagacaagatcactctctttatcacacttaaaatgaaacaaaagttacattaataaggttgacaaataattcataaacaaagcatacattacattcttcattactcttatctttattgcttactacaactaatttacttttctaaatataagtttcttacaagcgaaaagttgcagctatactatagctatagtgacattttttttttcccttttcttttcaaatattgataaagagctgtgtggctcaaagtgggctccaacatttatccaagactgaaaaagggctctaaataatataatgaattatgtgatgaccaacatggccgaccattaccaactcgaaagaagacaacttgtagtttgctcacactccactctgctagctagctaagactattacttctaacactcactcactcactcacacttacacttacactcacacaaagaacaaaaagaaaataaaatatgataaaaaatgaaaactctacttactgcattacattatgtgccaggctaatcttaattactcatttaggcccaacttgagacagctcccatatcttttgcaaacaaaactcaatagacccaccactttgtcccaagtgagctctttttggctgagggtgttaccaaccatgtcaacttgatagaaaaaatacatatacatatttataagcatagatgaactagaattaagaaagaaaaagggtgttttcagaaactatttagtgaaaacagagcagctaatatatttatgctttcaaagtttttatcttttctctcttttgatcatctcacttaatttttattttttattttttataattgggttattgtggggtttgtggttacaaacaaagtggtccttgattagactttgcagacattggatactcttaattcttaaaaataatatttggataaatattgtagaccttaaaaaagaaaagaaatgaaaaaaaaatcttgaaatgagaattttgtgaagatcctctttatcattatatcctacacagaattatgaaggtcctttaagtaatattatgatttgttgttgagtagtaatggctttattgccttatatcaaattcaaatgatgatgggtactctactctagattgattgcatgagtgggtgattgagtactagcaatagtagtaggaggggtatcatataaagttaggcaccatcatgtgtgtttacttccttctcaaccactagtgatgcctctcattttataaggtggtaggcccaaatttattttataatctttttctttcttcatacatgtcttctttaatcttcttcttcttgttgttgttttctttctctcttttaataagctaaaaaagaatgaaattatgatatgggggtcctcatatgggaaactcccttcaattatggtaaatgggaaaagaaaatctccccattctctacaaaacaccaacataattgtatcttttgaaacttattttctttctatatctttctctatcttgttttctccttcaagaagattgctatgagattcacttttctaaccagaagagaacatgattgtgatcactactttctcatctctttactgctcatcctctcaactagtgtctgatatatatatatatatatataatgtgtatataaataacccctactaccatatgatatgtcttctgctaaattctgctatttattatataatgcatggcacataacacgtgcatatctctatcatgattgaaaaagggagaaagtatctcagataaaagagtcaatttctttgttcatcacatatatatatatata

SEQ ID NO: 189295 - DNA, 1804 bp, Cannabis indica
tttattaaaaataatataataatttttaaaatcagttaaaaaatatatattttttaaaaaaaataatatttgagccctaagcaaaagtctaatttgtctatatccgaaactaggcttcaatgttaattaatttactaatcatattccctaataatgtatcatgcaatacaacataatcactttagaataaaataatttcattaaaatatagtggttgaaatgttgcattttactatatgcaaaagtataaatatacatctaaaaaaaatatataaatatataagacttttttatttaactttcatgatgtacatttatatatatggatgttaataaagtggccgatgaagtaggtgaagttctaactttgtagctatgcaatatttaaggcacattttccatattagtgtgggtggtgatgtgtatagtttattatcatatatacactttctttttgttagcaatcaacatataatataagtcaaccttacctagtcttccgcaacttctttattatcaaagtaatgtactaattatgttccctaataatgatgatttagtggacttgtagtggaccctatatataaatatatttatatagtattattattagattttagtgatgtttcgtattgttatgccaaaaaataattagtgatattttataataattattaaattaaattattcgttataattcgatatttaattttattaataataatataacacattagattgtgttaagtattattggtattttttaatattaatattagtatgagtagtgtctaatattagtgatttttataataagtattaaattaaaatgtgtaagacctttattaatagtagataatgactatgttgttgaataagggaagaatttgtttaaatagattattgttgacattagtttgaaaaaagtatattgtaacgtctttgctttaagtttctattgaactttctcttatcaatttatgactcttatatacgagtacgagttaccagattattgatgcaacttgttgatataagtagtatcaatcaatccatttaattaagtcatttttaactttataatctcatacttacacaatcttaaaattaatcacacttaaatttttttctcatgagatgatgagattctatagtttaccaagtattttcttgagactgctaaatgtcacgtatatgtagttttttctttaatataatattactaattaaaggagtgttatcttataatatactcttttgatattaattgactcattattttcagttcactcttttttgtgtacatttaacatgcaactaacagacaccacacgtgattattaaaaatatatatgaagacagtacaatgttaaacaaaaaattaaagtacacactataatttatataaataaatttaattgaagaaaatataatataaagaagaagaaaaaatacaaactaaaatatacatatatatttaaaaattgaactaccacacacagctgtctaagataagggttggtaaaataatggacaacctaattgaactaattaaagatatgttgagtcactaatattgttatttatttagaaagcaagtttagaatttagttatagaaagtgaaagaaaatattggattacttaaattaaaattaatataaaatggtccactattaaattattatatatatttactttttttaataaattattatttaattaattaattatattacttaggaatgttaatttagagtttggtggcacttaaccataaatagaaagtaaaagaatttttttttt

SEQ ID NO: 189296 - DNA, 766 bp, Cannabis indica
atacaaaattagttatgcttattggtcatatattttgtaagttgaaagagtaataaattttgttggtgatttttttgtttaccttttaaaaaaccatttcatacaattatataatgattgtagttgattgatttgattgattcttgtaaataaatctaaaacataaaattctgaactcttcttctaaagacttagtcttgtcaaaataataaaaaaaagacatgattagattctattctgaacaatttgatgagtgactatgttatgtcttttctcttctcttgattaatgacctgaaatttaaattgttattctttgtctctttttcttgttttttgctttatataaattattttattgttgtgggactttgtaattgtatttgtaataagatgaaacattacaagcattacaactaataataattatggtttctagtcttcaaatataaagtttctatgtccattatactatgtcccccatttcattgtttttattatttatagatatttatgtttctcaaatttaaatatagggaaggaaaaaaatactgtgtataaacataaattaaatattaaattgggaatctataatggccaaatgaacaaaatgactcactatctctacttgaaaattaaatgctatactaaacatggcttattatgaaattacttcaccacattatttaaaaagttgtgtttttttaaaaaaaaaaatatttgaaagagaagctaaggaagatgaaaataggatttttttttttttt

SEQ ID NO: 189297 - DNA, 1357 bp, Cannabis indica
caaagcaacaagcactgtcatcggattttataatatttaagattttaacaatactagtttttatgtacgcacaaagagtggcacccataagaaaattacttctaattctacatgtaaaacttattattttattttaacctccgtaaatgtaatcttcttttaataatatctcatcagtattattttctattttgctttcagtctaattttacttttgcatttgtcccaattacaaataattctgtctgttcgatcattgtaatttgtatccaaaagatatttgaacctcaggccgcaaacgacatgtctagatattcatttagagcatcttttaaggcctaacttttttttttattataaaacagaagacattaactcgacgaatctaaaacccaggtcgcgtcgatagagaactattattagatcttgttagaagctgctgatgttacatgtttagggactcaaaacgttttggttgatactagacctgacttctttattaaattttatacaactctgaagtttttattgttgctatacctcttgttgtggaaagctctttaatttctctgcttggtcggccacatttcttagatgcagcatatgctttacggtacgatctaaaaggccatcaatgctacactgaactcgccataaaataccaaatacagttgtgtcagtgaagagaaaggaatggaactacattttaaagcatagcaactagcaagaacattgctattggacaccaatgttgcccaacaccttccataagtgtcaccctacgattggttaatgatattttaaaaattattttgttaagttatatatccgctacttaattaaaccaataacggtatgacagaggaagatgttaggcaccagtgataccttttagcaattctcgcatagcaactactgaagcaaaaaaaaaccccaccttagcaccatttgggacgagttcccgcagttccttgactcgatcctggatcagctgtctgtcccttggcctttgcttttggatgttgccacttctaccacgggtactttttaaattagacagctttcttcccttaccagattgaacacgaacttgatctttctgaccttcatcggtcaatgagctggtcatgccatcgagagaagttgaactatcgaccttggcaagaaacacaggtgtggtaagattctgttgcacagaaagattgctcatccgagaatctacttttgatcttacttgtggctgaagaaaaggagaggactgtcttgttgtgcatgagcgtacactgtcagatgcactagataaagcatcatctgagaaggtacataggttggttaccacagcttctgacatttgccc

SEQ ID NO: 189298 - DNA, 3119 bp, Cannabis indica
gcagccacatgaacatgatgcgtttgtggtgaaacgtcgtctctgagctcgaccgtcttgttggatcatgttgggaagtcagcttcaccttgaattcagatgggttatattggaaactccttggatcttcagattatgtaagtttttcttttctttcttagttttgttcgcggcattttcttcaattaactatgattttcactagataactctacgatgaatacacccacacatatatataactacacatatttgtatatgttcgcagctatatatacacatgtttgtattgtaacgtctatcattattgtattaactttggcttgcttcagaatcaccttatttgggattcaaggaaatctattatttgatagaattattatttattaatctgattaaattatcgttaacttggagtttgccttcgagttccgatagttgattaggcggactgatgtaattgagctgcttttctgttcaaagttcccatttttctgatgtgtcatagattttgtatagcataatttgatattttctcctttttaacttttgatgttaactataatgttttgatggaacagaatgagacaacttgtttgggcataacattgggttcaaagtttgcaactgagatcaagttcagtgatgtatatgctgctgagtttatcaattatggtattgttcatggagcaagtattttggttcagaactctgaggtttgttctattgttcgacctaaggtagtcttcttctatctatagtcattatgttttccaaggcactattttcacattgatgcagatgtaccgctttacagtgcatggttttgaaaggtcaaagactcagccttctgtatgggccttggctgtttatacgtttggtcacaaggatatgcaaatatgtcaaatgtgggctaatcaaattaatgatgctataaaactggaagtagagaggccaaagaatcttatggtatgtttagtaaatcgacatggccgagaattttatgttgtgctttctccaggatattaatctttttcagctctgtatgacaggttttcattcatccaaggagtggaaagggcaatggctacagaatctgggaaatggtggctcctatattctcacgtgctaaagtgaaaacaaaggtaaaacctagcttttttttttctctttttccgaagaaggtttgcaatcatgatcaatatttcttctaatattgtatgtgggaatctgatagactccaagtagagatcctcaaatcactagcaaaaaaattaggctaaaactgagacaaattgatggtttaaggaagtagaaaataggcaaatctgaaagaccacatgagaacaatgaggtgttcaagagacctcaactctccctagagcaaagctcttacaaaatgtcactcaacatgcccctctcgcattattcctactttcttatatatactatcttttccagcttatccactaccccaattacccatataccatctattactattttactatcaatctccgggtctttcataatccacgatagtttatgacatttaaccattcaattcaatcggagaagacgttgctttttttgcagggattttgacaatccctattgtgtaagctatgaccagttactgaatcaactgtttcttgtttcagtattcagatacttaaaatccttcaaatttacaatcttgaaatttcagaagatcacaggaaaagtgattttgagtttccttatgtttaatgcagtcgcagaatttaggcttttaagatggttcttattgaatgttaaagtcccccaagtttttctgctagctgatgggataacagaatcatatgcctctttaaatggttatcaattttccctaatagaatgctttcaaaaaaaaaaaatccctaatagagtaatcaggataaaaaggcccagtggattgtcatactaaactaactatagtttatttggttctacatcttttcctttaaaagattttacctttctccttttctataggtgattgtgacacaaagggcagggcaggcatttgatgtgatgcaatctacttcaaacaatgaactgaatctgtatgatggagttgttactgttgtaagtaataaccttccatgtgactgcttgtatctccatctcaatgtgtgatttttactagtacccttgatccaaaaaatacagtaaacaaatttctggtagtacagatattttaaaactttctggttttccagatttttatcctcaaattcctattgattatcggttccttaaccttataattagttttccaattgttttgatttcagggtggtgatggtttcttcaatgaaattcttaatgggttccttaaatctagacataaagccccattccccccagctccttcagattttcctcattctaatggagttcttgatagttctggtgttaatgatctgaacgaggtagttgctgaaccttctcagaatgaagaccagtctcctcttctcccaagttcaaaacataatggtctggggctgtgaaactgtcatttgcattaaaactatgtttccgtattaatcaagcattggattcgacttttatctaacacattaatagttatatatgatattacaggaagtcaagatgcatcctgcagcacaggttagataaaatctgaattacaaactgcacttgtttcttacagtgaaagtattcaaatatataatgcatattctaaccttgttttcttttttcttttcctacacatatacattttgaaatctttttcttaagtaatgcttaaatccaatatctttatttcttttttccttgcaccttcttaaacctggcagaccaagaccctgatttgctcctcccaaatgaacgatttagatttggaataattcctgcaggttcaactgatgccattgtgatgtggtattttcttttttttttttttcgtatgcattgcatatcaaagcatggatttgtgatttatgatttgtcctctgtccgttcaacataactatcaattataattaacatttaaggttttaggatttgttgatattgtgtattcctcctacattgtctttcttcacatctcttagctttccttagcaaaa

SEQ ID NO: 189299 - DNA, 1317 bp, Cannabis indica
aaagtttaaggagcaaaactctagaagggtggacatttgtcttttcaattcatgtttacaagtgttgtccattaatagatcaaatgcaacaaagatctttgacttttaagaagattttatgtgataaaactaaatcatttcacaatcatatgacattatcaatatacatattttcacaagagcatatactacaccaattaagttgaaataaacttaagattctcttataaagcaatcctcaccttggtgttcaaattttactttaagaaacagaatttaccaatctcacttcttttctactttctctcaacaacttttggtagataaaaacagctcttgagaatcttatatatcatattctgtaatgttcaattataatctgatacactgataccaaaaaaattgtatataattagtaaataatcatattgatgtgagatgtacaacatccaacagatatgccactagaatggttcaaagtataaatagtagaagtagtaacaactagtataagtctagaaaaaattgggttttacattgatgaactaacatgctttattattgcttctttgtttttctttcgcgtatttattgagccgaaaaccgcttcttattatcacagtgttgcttgcttcccttcactctcatctaagagcccaacaaggcacttctccattaagaattcagcatttacccaagcatggtatttatctgaaaaatattaaggatcacaaacaattcatagtagagcagtagttttcgattagttgaaaacgagaaggagcacaagtgttactaatgacaaaatcgaaagaatagttctattcggtaattagatgacagcagaaaaaaggatactgaacaaagctgtacagtctttccccacagccttctttaacatatcgacacctgaaagcaaggcagcacgataaatcgatatgtaagatgtatgctgaattgtatagatatagcttcactataaataaaaaatgtgattagtgtaaaatattatccttacctccagggtggaatctcatgtaaggagataaattatatacccggcctttaagaacagtccacattgaaccttctgtttggtgttgtttaacttctttcatggaaataagcctcttatttgattgcccctttaaatctgaaccaagtttaatgaagttaaagctaatttgaaagaatgtcacgatacaacgatacacctatcaactcaattttactatctcttcaactcaaagcaagcatgcattaagctgtaaactcaatttcacaaagttttcgaagcaatgatgaccgaaaagtatc

SEQ ID NO: 189300 - DNA, 6597 bp, Cannabis indica
cttgaagctttgattctgtgaaggccaaagaactttgtgattaatgtgttctcatatgtccttacatgatggtgataatcaggaagcatccggaggagaacctatacattgaaagcactgtcaggtgaatataatggcagttcaagaaaagtacatagattaggttctaacacagatgcacaaaccttaacttcagattttcgaagtgttttaatcatgaagcgatcgtcttgagacaggaagaacacgctaccactttttccgggagaagagagttctctgagagcatcatttccacaaatagacatcatgtagtaagcagcatcaattttgaacatctccctcaagttcctacaataattattgacaaaggaatcaatgagaagaaactaaatctgtaaagggtaagaaatgagatgacctagaacataactaaggttagatacaagttttcttccattatatagaagtttaatgctgttgtaaatgcatcaagcaaaagacaagatgcgaaagagcataaataactaacctgaacaccattgggcagtagtctttccatttaaaatcctctgattgatgaggaggtgtcagttgagagccttctctaggaaaactcatccaaaaacttgcccggggaccaaaatctgatgttcgaacttctcgcctttgaatgggtgtaattttccctacagtatatctgaccatattctaatccacgttcaattttaaacttcccaaaacagtgaaatggaaaattagatcataaccataaaaatatccacagatattcattcaataatgtctattctcttgcttttaaaaaaaaaatatgacaacatcaaccttaaaggacttcataccaagattccaattccaattctacagtttaataatttgtttgacattattttcatttacttttctttgaatttatttattttctcttcaggaaattaactaccacaacaatgttgcactagttctagaccataacaatttatctatatctgataaagaattaagcatacttgcaagtgttctaatataagaaaagtgatatacctaataccaagctgcaaactgagcattagatcataactcctgtgtcctttaatgatggcttctccaggtctctgaacctctttgaccagcttcttctgtcgtcttttcgcccttctagaactttgtgaaaaattattggcaaccactagctcactaattaagacaccttgcatgtattctctttccaatatcggtatggcattcccaacatctttttctccaccttccgacatcccagatgatgagtcaaatccaataagtttttctattgatacttcaagactccagcgccgttccagggaaacatttttgccacgagtctgttccaaatttaccaggtttcttttggaaattttatcagaagcattacgtcgagatccatgactctccccaactttaatatttcccatatctactgaagtagcatggtgaatatgaccattgttctgctttctcatatcaggtaatagtcctcttttcctcaaagcactgaggtagacgtcttgcacaggtgagagtcggctgccttgagggtaaaaggatccttttccatcctttaaacctcgcgtccatgttccaacatagaagcccccatcactccatgtatagactccaaacccatgcatcatgtcattcaaccaacttccttcaaatgaatcgccatttatccaagtaagagttcctttacctgacattttccctcctttcatatttcccaaataaacattcccattagcccatgtatacttaccaggcccttctggtgtaccctggatccaagacccttcgaaaacatctccattagaataaacctggtatcctaagccatgtttgagatttaacctccatcgccccttgtaagtcatgttatctgaaccaatataagttcctgtaccatgcatataaccaccagaaaattcaccttcataatatgcaccagaaggccattgaatttttccagtcccatgtctcatcccccttctccacccaccatcataaatgcaaccatctgcccagacatactttcccctcccctcaggcatgtttccatgcagtgatccagcataggattcaccgtttgggagtaatagctccccgactctgaagccagaagcttcagaagtgtgatcaacttcaccattactcgacacggaaatggtatccttttcatgtatgacatcaagagatcttgttctctctgtaaaagcatgtgttccttccactctatcaacaatggccacaggaccagacatgcataatgtcccaaaagaatatggctccttacacaatcaaatcaaaagtccaggcccataaacaaaactcacaaactgaacttcctcttcctttgtttggcctattaacaacagagaaaacattcactcctcatcttagcattaacaaggagtttgaagagcaaaaacatagatatatttgaaaaggctgaaaaaaaacagatacaccataacagaatttcaaagttcaacttcaagtacaaatataaatagacaaaagcataccaacaaaattgattcaggaaaaaaaatgaaaaaaatatctccttctaaaaagcagataatacccctaaaaaggagcttaaaatgcaacgactaaacctgcagactctatcatatccttccattcattttattaacaaaaatgacaaaaagaaaaaaaattgtgaactcagtaagaaaaaacacaaaatgacccaataccaaaataagattttcaattccttgaaaaatattttcagaggaagagaatttctggaaattcatttggttgcaaaaagaataagagcagggaccacttctctctccaacactatataagattcttccatagttttgccatgtatacataccctcttcatctttttaccatgtcattttcactttctcaccttgggaaaacaaataaatgtgtctaaaacaagctcagcctagaaaaagttattcctcaatccaaaaacatcttattcttcctacccaaaagaaaggaaaataaaacaaaactaatcacttagtaattacacttaaagatcatgcatgtcataaatatagaaacaacattaaaaatcaagtctttggtctcttttcctgaaaaagcttctcaactcattaagttgactttttcattccaaacccaaatgaaagaagaaaaaaatcaaatgatttccgccatggacatccacaacacctcatcccaaattacaacaacagaaaaataaaaatagtaccttaaaatcaaacaagctttgaaactggagaaaggttgtgacttgttctgttaaatcgttgttaagagttcgaaaggtttcgctttcgaatcaatcttttctaatgtgacgaaatgttgtgaatcccaactctcaatctcttcttcttcttctacttcacatacactcctctctcacccaaaacaccattttaaaataaaataaaaaataattcaatattcaaaaaaataaataaataaataaaaacaagtgtttttttctacagtaaaactgaaatgacatttatacccatgttaggtcaatcaccaagtatagatcacatatttcctgtatcgtccttctcatagtcatttggagttggtaagtgtaataatttgagttcaatcaataattaattagttacccataaagaaaatatcaataatgagttaattaagttgggccaaaaatggattaaagccaaatagaaagaaaaaagaggaaattacactctataccctttttatattgtcctcttttatttttaccttcttttttaaaatctattatttttacctctttttttaaacattgtatcaattttacccctatcacttcaaaatactctccatgtgattctcttatgtaagggtattttgggtacaatacatataaaaagaggtatgtttcaaataaacataaaattagaggtaaatttgattaattgatgaataaaagaggcatttttcaacttaccccaagaaaaaatggtgtaaaaaaaaatcttttgtcagttttgacctaagttgattggacggtgatgaagataggtggcctaaggtttatttatggctctaaagttacctatgtttttgggtgaccaaacctaagatagggcaatgttgttacacataattggggagtgggtattggaaatttttgtgggtccaatctatgaaaatgataaggaataatgctatgtaatatgtcttatttattttggtgttgggaaaaaaatatattatccataactttttaattaattctaatgggaaatgaatggaataaatttatcaagtcttaaccttgtttctagtgacctattaaaataatacacttctttttaattagtgttgagacgaggtataattatcaaatgataagaaaataaaatattaagtttaccaaagtttgtatttgcaatgttatgtgacaactttaggattacaccgcacaccgtgactattagacatataatacaaaacgacataataataataatgatgtaatactagacatagatatatagaatactttttatgggtattaattattttgaaagggttagacatatttattcattgggaaagtactaatttagttcttttattttgtaaaattatgttaggacagttagttaaaattgtctatcaatttgttggttagtagttaatttgggttagctcttgctttttttggttttggttagagattgcttaggtatttattactttttgttagcttaatgtgtatataaatatgcattgtaacattcacttaatcaataagagtttctttctctcttcctctttttcttcttcttcttctttcctctcttttctgttctttctttctatttcaatgtcaagaaggttaaatcaatccaacatggtatcagagccttttccgccattaatggcaaacatggctactgtgagaaatggtagctcaaatcatcaacctgtacaaaaaagagctcaagctgctgctccgagaactcgaaacaaggatcaagaggatggcacgttgtacttcaatcacgcagtctcgatcaagatcaatgatcacaattatttactctggaaacaacaaatcttacctgcaattcgtggaaatcgtcttcttcaatccatctaagatgttgcttcccacctcaattcctcaatgatgcagatcgagctgcacaaaaattcaatccaaagttcattcattgtgatgctcatgatcaacttcttgtatcttggcttctctctttgatgatagaaagtcttctaactcgtatggtgggatgtaactcagctcgacaaatatggaaagcccttgaacaacacttcactctcaaagtttcatccaagattctggaactcagaacaaaattgtagaaacttaagaaaggcactctgaatctcaattactatctccttaaagtgaagcaacatgttgatctcctagcctctgttggagaaatcttgtctgatcgagatcacattgttgccatctttaaaggcttgccaagcgagtatgacaccttcatcatctccaccaacactcgaattgaaggatacacagttggtgagattaaccacaatatttcaaatttttctttacccagaaagacttgaacataaggcaaagacggtggttaaaactagttaaggattacaactatgagatcctttatcaccccacaaatgctaatgtgatggcggatgccttgagcaggaagggatcaaagcaggctttcagcactaagatgatttcttcttagctagcaacagacatggttaaattaggtatttagtttgtggttggcagaattagcaaggatcggggatcgaggtctaggcaatatggttgaggttggtggcgattgaggagatcagaatccccctcatccctatggccaaggtagagtgtgtggaagggtttacagaggtggtcatgaaaattcaccacatatttttttttaataatgtttatttggtaccctatattttaaaatcatacatatttagtaccctaaacataaaattatttgataaaattttatcaatccaatcaaactgtcttcaattttataaaatttgaatttaaatttaattatttaattacatataactaaaaactgtttggtcaaattgattaaattttattttagggtactaaatgtgtacaatttcaaaatacaaagtaccaaataagtattattgaaaacacatagtaccaaatattttttttttttagaaaatacagtactaaataagcatattccctacgaaaattgataaatcgatgaaggccaaaaagattggacttctacattcttgaagtaaaaatatctctttggttaaatgattataaaaattaattagttaattagataaaattctatctattttttcattattaattaatggatttttatttaatatatttcattttataaagaaaaaagtttgcaaacttagagtgagtagtttaattcattgtttgatttattttatgtactaaacaaatctattaggaatgatatt

SEQ ID NO: 189301 - DNA, 6504 bp, Cannabis indica
ttttttttttttgaaataattccaattatatacaatagattcttgaacaaatagtaaatgagagcatttagatatgtgacctaaaattgtccaataaaaaattttattattatcattattattagtagtagtaatagtatcctttatccttaaggatattataaatatgaaaagctttagttttggtttggaattttggcagctttacaagcaacaaacagagttttttcaagaggtggattacacatttgaaggtgatgcatcattgtggatgaacaagatgaacaactactctaataataatattaccaatctaattgaaatggtaacctcaccaaacaatcctgatggacaactcaaatgtgctcgttttcaacacccaaatgctaaagccatatatgatcgagtctattattggccacattacactacaatttcaactactccagctgatgatgatatcatgcttttttcactttcgaaactaactggccatggaggcagtagatttgggtaaaccaatcttcatttagcatttgatgagttgtattgtagcatttcatactaatacaacattcatgtgcattgtgtagatgggcagtggtgaaggacaagactgtgtttgaaaaaatggataaatacttatctataaacaccatgggagtttcacatgagtctcaactaagagctttgaagcttatgaaggtagttatagaaggaaaagaaggggagacattgtttgattttggatataaaacgttgagctatcgctgggaaaagttgagtgaagtcatatcagtctcgaaacgcttttccttgcaagaaattgagccagaatactgtaatttctttcacaaaattagaggaccttcaccaggtaagatgcaacactttcactatgcaatgaaatctcttttggtcattttaggacttttatttaaaatggttcaatcctacacatcatatataaatatgagaaatcttattatgtgcgttttttcatgtcaaaactttgaaaagttgcgaggatattcctcatcaaaatgttattaaagtactctttaagatcaaaaaaatgttattcaagtactcattttccataccattctttctcgtacttctacatgttatataacccaacctaagaacatttttatgtgaatttgaatgcgctctacatgctaattaaagttatattgttctatttttgacctttcattctgtcctgttcatttttcgagacgtccatttggtagagcccatgtggccatagtcccactgtacaacataattaataattagtacaaaaagaatccatatatcttacttttgtaagatcgtaattagtacggagttttcttatagtcatgatgtttgtacgaaatttttttaatcgtatatttgtcagtttgtcgtattcttagaactgcctttttttttgtctgtttttaggaagtctctaggcagtttcctactttgtatctaatcccttgtaaatagctatatatagagccatccatttcattgtcaaaattagtattctataaataaaatactagtgttattttctctcaaaatgtttttctaaattttcttgaagagatttttgaagttaatatgaacgaatcacatcatagctctaaactaaatttatgatgaaacattcctaattttcaacctcataagagttcttttgcttgtgtggtgattatagacatcatgtgaattgagagagatgttaaatttcagagcataaatactaacaagtgaactccatggcagcttatgcatggttgaagtgcctgagagaagaagaaaaagactgctatgcagttctcacagcagcaaatataatcggtcgtagaggtagcaattacggtgctgaagaccggtacgtacgacttagcctcatacggacccaagatgattttgaccaattactccaccgattaaagattttaatctcagaagaaaacactgccaaatctatttgattcttctctttatcttaaaagaagacactgtggaatatcacaacactactagtataacaatcaggagaagaaaacaaagtcatgtacttaatcaaccactttagcattttcacattcaaaatctgtcattgttaggtggaccaagaatcttggtcacagttgaacttgtattcatcatccaagtcttttagaatattggaaaataaattgttaatcatgtttgctgttcatatttgtcaagatttgaaagcaaaatgctaaccagtaaatagccaatgttagattgaagagtgcaaggtccttatggaacaagttagacgaattatgaaaattacagcagtttaatatcaaacaaggcactcttgtatatttcaataatttatctcacatcatttgcattcatatgatccttgtgattgagttaagagaaatgctaaagggcaacttaaggtgccaagaactacaagaaaccgctaactactcataacgtaccacatcagtttaatgctcttgagttaaaggtaattaggatcaatgacattaactatcagactagaatctatctcaactaggttgtgaattgtagctacaatggagccaaatatctttagtcttgagacaatagacaattttttacaataaattattctcttcaaataaacataaaatatacaattaatgttagtataaattagaacactcagagtgcaacaggcctttttggccctaagtgtctctgttttgaaaggttgtatttaattctcctctgaaacaacaaacaaaggaatcctaacactagaatcaaaatggcatacgcttcaaagtgggcacctcgaaataaattctcaaactcgtacctgttcaacctaccacagttacattcacatacactacgaagtagattcctgttcggggtaacttctggatccagaacaaaatcaactgtcatggcagcttcttctaaccaaatatttgtcgtctttgatttgtacccaggcacgctggccataactgcattgtaatataaaagtaattgtatttttttcagttgtacctaaaacaaaccgcacaaaccttattgggtttactatttaactatagcagcataaagaaatattaacagcagaataatgtatgcaaaacagtttagcagtactagctatgaacgcaaatcccctgtccgagtaatctagactacaacagaccacaaggaaaccccctcaccctgattcacctcccctggaggatcttaaggggttaaaatggctctaaggacttgatattcaatatatggagccgctgttcgttcatgtatagctgttgtgggacgtagtgttagctactaacttgtattactctagattattcagccagttgataatttctgtatatcttcgaatgcttcgaatttttaagtatcaacattattcctaacaagctctccattggaattaagaaaaataaataaaagatcttttttaaaagaatcattatagatattttcagaggaaagacaatgccttcttttctttttcttgttttgcttcatcataatcttctatattgagcaccataaaatcacattgatacatcaaatagtagagcagtgctacgaggggtaggtggtccttagcaccatacgccaatacaaggtaaggttcacagaatgagctatcacatgtgaccatttattttagtgtcatgctgaacctgaacactatttgtgcctcttagcattattacaaatcatatatagactttcgcaattcaaagtcctctataggaattttatgcagctaaagaatattaattcaattaatataggtttaattagtacaagtacctttgtacttcccgccaggggtaagcaatcgatggaaatcagcaaatactctatttgttttaacctgccaaacgtgacaagtcaagtacatgtcatggaaagaagtaacaaatcaatttcatcagtcaagtacatgtaggaaggtttaatcagataaaaaaagtcaaatgatattgtaagttgtataacaattgatccctagaatcaactgtgacagtcatttagaacattgaactaggtccttaacgggaaattaaaacccaatgtaagccaacaccagagaatgtgttaaaacataaaaatcagagttggatcaactttgtatagtttaagcttaaaaaaagttggtaataaaaagcatgcataaatcaacatttatcagcaacaccacaaaagcacactgaaaaaggaaaacaatagagtagcggcaaaagtagatgatttcagatataccgtgtgatttactccctcaatggtaatagagccaggtaatggcctcccactatctgatgaaacaatccttccatgtactcctgactaaaagaatttgagacatgaaaacaacatttcacacttgattttacaaagtagaagcatataaatactatacctagtaacctgagaaagaaaatcttaagactaaattgcttaaataatgtaaattaacttggactagcttgagaaacaaagagttcaatgagacaaatttatagccaccactaatacctgtacaaggctcaaaacaagattgagcatactcagtttgttgtatttccaaagggtagcaagctgcataatggcacacaattaagaaataacaatgttaaaggtaacgataaaaattaaagagcataaagcagaaagaggaagagagaagcatacgtgccatcaatataatgattactcactaccaaggccaatctaagtactcacacaatattgcaattttaggactcgtagtaatgagaatagagggaaaaaagacatatccattacacaaacatgatttaagaatatattaacctcatgagcaggaggccatttgtgtcactaatctctagagtcaattcaaaacagtccccatgtatgtagttccagtcttgcatacctccataaatagggtacctgtagaaatgtttactgtcaaacaattgctgacaagaaattatacataaagaaaaaaaagagttaaagaggatatagcctgtaactcttttcttatccaaaagaaaaaaaaacggcaaccctaccaatatgcaccatttgtgattccacctggaaattcattgctcaaggacatgttatagtgagagcgactgtacacactcgccaagaaccgaaatgtttcatcatcaggacaggcataataaactcgtctgaaagtaattcacagaaagccaagcataagacaatatagagaagtcattaggatacgaaatagtacattttgagaagagaccaaattatacgttttaaagagaagtccgaacccatgaacattttctggtatgagaatcagaaagacattaaaaagaaaatcctttataaatggtcataaaaacattaaacataataagaccagcaggagataaacggtgcaagaaaataaattgcaataattaattaggtaaatcctacccaaaataagtatggagtactcgtacatacaagcaacgaaaaaaaaatgaaaaagtcaacatggtgttcttaccttttatcttgacttccatcccatggataatttgcaacaagtgcaccctgtgaaaaataataataaaatagacatcattctttttctatgcactgtaattttaatcataattcatgttagaaaagataaattccaaaaaatgtttctcaacattgtatttctaatgttggactgttaaatttgacttggaagaataaccatagatgaaggatagaccaatagagaaaaactatatttgaatattaaacatgttcggtttggggaatgaaatggaaagaatcaatttccattttagtcctttatttggtcataatttaagatcttaaaatatcattacaatgaaatgttttttccaccatttttggtggaatagctactactccaaaaaatgagaggaaccatttcaatgtacaataacttttgttattaaattttatcttttttttttaactcatgttaaatttttattgcgttctcattcctctggtctcattactctcaacgaaacaaaacctaagagaaactattattaaactttttcatctactaactggtaatgaaagaaaaaattatttcttttacaaagatgatgaaatgaaataacacactaccccatgcaagctggcagaagctgtaaaatgaatctggtttgaccactccattattgctcttgtttcaggttctcttgcaaatgcatcatcatcgttgaaaaactgtcatttcatgccaacgtctttcattaatagaaatatatatatatacatatatatatatatatgtattgggatgatggcttgtaaattttagactcaataacaaatcaatagcctaaaacaatgtatttaggcatgtctactaatccataatgaaaaggactgtgaaggtaaataatttggagagcaatattaacaattgacttaaccctttcccagttgttccttttagattaaaaaaaa

SEQ ID NO: 189302 - DNA, 1300 bp, Cannabis indica
agttcaaaggaacactgttaatgagaaacatacattcagctaaagtaacagagtgccgggcaacatagtgcgcagcacagttcgcagaacgcttaacatagtaccgggcaacatacagcaatcattagagtatacttatttttacaagtgtactaaaatagagcaataaaccatttttggaactccattaaatatgctcttatctatttaagtagttaacctcaaattatggacataatgctctaaaatagtgcaagagtgtaatattcgagtggttggtttaccatattttggtcatctgatttgtgatatttgtgtagctttcattcagatttcagactgatttttagatttctaagttctaaccgttcaattataaattataataattatgttctttcaaaaacaaaaaagttataaattataattaaactgaaagttgtccttttaaaaaaattaataaataaaatttaaaataataattaattatcatatctcacattaaaattttagagttattatttttaaaataaaaatcaatcatttttttttgacataaaaatcaatcatttaatcgtaaatatatttaaaaaataataaactgaagagatatgtataaaatagactctgaccaaacaaagaaaaaaccttttcttaaaagggccttgaagtttgggttgctacttgctataaatgacaaagctttaaaaccaccatcatcaccaccgagttgcactgtccctgactctctggaaattcagatttccgaacacttcttcaagcccgctcttccttccttccttccttgtatatatctctactgcgtttctctcatcaacccctgaattgggcatcttttttggatccttgtacatctgggtctcttccgaaaccgccaaatttgaagactacgagaaagacttgttattacctctgcaaattagggtttacttttttcttttgttgaagtaatggaggcttataaaagatgggttagggagaacaaggagtatgtagcaatcactcgagtctctggccaacgtgagtccctactagatttcctttttaattttattttaggggtcaatttttcggttccttttattttataaatacattaactgccattgattttgttttatttaattttatatgggttttccatatgcagtattattgaattgaattggagtgagctattattattagtttctttttatccatttaagatttgtatacaactctacattatttcaattgtatctgctccttaattattattttgttatgtgttacaacc

SEQ ID NO: 189303 - DNA, 4625 bp, Cannabis indica
taccagcatgaccattctccaccatctgatattttattgaaaatgtgaatatatttaattacacaaacaagacaccaatatggatgtatgcaaatataaaatttcatgcaagtaccataataatttatttacagtcttgcacataaaaacacttaccgggttttctctcttttctacattgtcagcatgcccattctctaccgtcgtctgttattttgtagaaaatatgaaatatattgaattaaatgaagtcaccaatatgtatgaatgcaaatagtcttttcactgtcttgcacataaagacacttaccgggttttctctcatttctacattgtaagcatgcccattctctaccatcatctgttattttgtagaaaatatgaaatatattgaattaatgcaaatataatttttttcattgtcttgcacattaagacacttaccgggttttctctcatttctactttgccagcatgcccattttgtatcgtcgtctgttattttgttgaaaaatgtgaaatatatttaaattactcaaagaagtcaccacaatatggatgaatgcaaatataaagtttcaaacgcaccagaataatttttgactttcttgcagatgaagtttgaccagtgggtgagatagatggggcctgtttccggagtacctggttctctgattctaaattagataccgtctcttgaagcctaaaaacaggtgagaaattgattagaaaatcataagagttttcttttcgtatatttaaattggtaacacatcattttggcaactagaagaactctccacgccaaacatttcaattccctatattcattagtacaaagctttcaaaggaagcataaatttgtaaattatgataaaattataacatttcattgagaagaatacttgtttgaatactgtaaattagcaaccatgttccatttcaaacctctgcaatgaatcttcaaactcatcttctttcatcttcgcaagttccagcttcgtagccaatttctcatacgcgatttgttcagcagcataaccctcaatgaccttctcatatttctgtgcttcggatgctagtaacatctataccaaaaagataataattcatcacctaacagaaaattccaattgattatgtaaacaatttgacacccacattttcaattcatatttacttctcgtccgaataactgaaacagatacaatcttttaatatgaaaatggcggttgaaatttaatcatcaatcaaatgttctaaatgatcataaataaattcacatggaacaattaagtgagacacagtaaacatcattctaccttcaacttctcaacttcagtggtcaaggattcaaccttttccatatcttgtactaaaactgggatctccttaatgacaggaggtgcttcttcaatagcttttttagctacctctcgctctttaataaccaaggcgtttgcttcttctacttgtagatcttttgcacgcaaaatatccttcaattttgcaatttcctgagcttttgactcctcgagatcagtctatttcagaaacaaaaaataactatatcaaattataaccacaaaatggctaaaaatagaaattatatggtatttaaactaaatgtgcatataaacttttgattaaagtaaacattgtaaaactaactcgttttaatcggaataatacagtttgcaacaatcaccatataaattaacatcggcattaataatttttttactaatggtggctcttattttcaaattttatactccttaacttgattctgaatctctttattaaaagaaaacatgtttcttaaatttgaatttgaaattttttattaaaattaatggaaaaattgaaaatcacatgatgtaaaatatagaaagaaaaaactaccctcaaccgtttctccaattgtaaccgccaagtaagctcctcaacacgcttttccaatttgtccttcgcttctttaagagcccctgtttctctggcagcctaaataaatttgaaaaaaaacagcatcacttactcagaaacccgcactcaacatgaaaccagatcacattgagttgaaagtatattaatgtgtatatatgtaatcgataacatgccattttgagctttctgagctcttttcttgcaactctgcatctccattcacactgagtcacaaccacagccttttgtagacttctatagtaagaatgagctcggtagcaatgccaatgagcctacaaaccatcaataataatattcaatgaatacaagaagtttagcaactttaacaaagaaatacataatacaaaaagtagttgcaaaaagaaaataaaacaatcacatgacaaacacaaatatattcttaccatacattcaatgaagtattccctccttaaaaagaaaaaaggtaaaattaattactaaatgcataagtatgccatgatacctgaatgttgacagcagcctttgtttgctttcggaatctgaactccttacgtgcaagcattgcttttatgcctgcctgcaattttattgcggaggaccgttgtattctgtaggattttgtgattctatattgcttgaaattcttctggatcttcaatgctgcagcttcttgtctcaagtgctgatacagtttgcatgcgattttacctacaaaaaattggaaataaaaaaagctttttattttcattgaaggtaaaagcaaaaataaagtgaactgatcacaaaaagtacattatgatattaaagaactgaactcttatatgtttctttaaaataaaagttcgtacagagagattgtcacagacaaacatgcatgcctaaaaccatcaacttaaggacacaactgaacaacctcggatgcatctcaaaacctgatctcagatattaacacagctccagattttcttttttatactaataagtctcatgaattttaatttgattatctaaacgtatgtctagaaaataatcttattaatttgtgatatcctgacatgtttcccaaaaggaagagatgagttagaactttagcagacaaacggagagatatttgagtaaaaaacaaacctcgccaacgggattgcaactgaattgcagctttgcgcaatgtaacaaactctctatgagcaatgaaggtacgaatttgtcgttgaattgttctagcagcatttccaagtacttctgtcctcctagcatccaactcagccatctgaccagctctgaggaagacctttgacttgcctatctgtaagaacacaccacagagacggtactgatatgcaagtgcaaaacgaaacctcaatcttttgggtataaaagaaaagtattaatcaaaaacctggtatcctttcaatccctttttatcaagaatcatttggcttgcaaccttgtcatcataactgcaataagatggaaaatgcttgtgagatattacataaaaatttgtattaaaacaataacagcatgtataaagtaaaaccataaaacaaaacttactttgcttctaaaacttcaggaaccaaaagaccaaaacgatttacaaaatcataaaatgtgcgtctagtaggatagccagcacaactaatcctgattgcctcaaggacaccctaaacaagaagagaaacgtaaaaatatttctctaaaaagaaaatacaaaatattaattaaaaagcatatgaataaataggaataagaacagttcatgtgaaaaatatatatctatttaaggaaaactaaaaataacattcaagagatgaatgattgtgaagatatgcttacaccacatcgcaattgttgaatgatattaagattctcaaatatagcaggtttcaggacactgtttggcttcacacatctaatgtaatgaggtactgttgtactcaagatttccatcaaagactgaagttgtagctgtgaattaataaaagtctatcagtccttatgctttatgatcagaatagaaacagattctaaacattcataacacaaaattggagacatttgcaataagagagataaaaaatcaaagaattggtgattttaaggaagagcattggcctaatgtacaatttattattattttttaaatggaagaggacttcaaatatacaaaaattcatttaaaaagaaattacataactacttcatgggataaatcaattccaataaaaatttaaatagcaacgtgtgaaaataaccttaaagcgcgatccaatggaagaaaatttggatgactttgacgaatcttctggaagtgggggaaacagaccacccacaaatgagcaattagaggctgttagcaaagcttggtgttcagcaatgacataatctttgttcttgtctagaaactgattggcttgataagttacctttgcaaggaagaaaatgttaagagactgagttgattaacctttcaagtcaaaaagtcttacataagtatacaaccaaatacaacgaatttacctcgcctgcatagtgtgatatagtaaaatcagtctgagaaagctttggctttataaatcgtttctcatttttgaaagtctgatacaacttctgtgcaaaagtttcatgagtggactttggaaacatgctgcaacaaataataatatgcatat

SEQ ID NO: 189304 - DNA, 3473 bp, Cannabis indica
tgtttttcttcccatcaaaatctaactttcaaaacctagccttaaaactttatttttatataataataagaaaaaaagattttgttatgtgaatagcattattctttttattactataataattattattatttggttgaagttttttaatatgcattattattgagcactaccaaagagcatcatctttaacaacagtatcaataaaaactccataataatcattatttgaaaaatatatttatataataaagttgtatataaagcattgatctctatattttttttagaagaattgagattatatagttatatatacagcattcgataatttactgtataagtggaccattttccctttcagaaacttcttctactcataattcacttttaagccgactaaaggaaagagcagtttcaataatactaagacatttcgtaaaagttaaagcttgagtactctgcatggagaagttgtataaatttatgaaggtactaatgataccatattagcaattaaaattttcatttacaccattacgacaataaatttattatcatcataaaaaaggcattcatagttttatacttgaataaattcataattacaaaccctagctatatatatagagagcttcaatctctagctcatatgtcacttgaagattctgttaacgtacaattcgattatatattaaccaagtatatataaataatgagattaaggaaagaaaataaagtatacattttatacacaattatcaactttatttattttttgaagtggaaacacataattaatcaactacatatttatataattcttcgtaacgagcctaaaatgattgtcaagtattttgaagcatgctaaactatgtatgctagttaattagtaatcaattacattaatataaatgtatttttcgatatatgtatatacatactaactcatgatgaggcgaagcttttaatcattcaatgcatatacatatataataaataatgaaagaaaaaccagcaaaacaattggcaatcaatgattatatatgaaagggctaaagtaaaagtacgatcaatggcttaactaacaacttctataagaatctctcattcggtcaagcttccactaaattacacataacaaagcttgaacaaatcctccaccatttaaagtgcacgtcatgatcaatgtaacagttattcctagtggttccagacacattttgactaaaaaaacgaatctaatcacagttgttatatataaatatatatatacatacatatatacatatcactcaaaaaacaaccaaaaacaaaagtatatatctacacgaagcatccaatgaattaacgtgatgtacagtcaaaatatatacgcatgaataattaaaaccattcggttcactaaaaacatcgtaactacctaaactgcatattcgatcctcgataacttacattatttcattagtttcacctaatgacaatgctatatacactgaaattgcatatatataaattaatatattagtgttacaagatcaaagaaaaactggtaatgtcaatacagcacctttataggctaaatattgttatatatatatatatatcgactcctgatgaagaaataaatggtaagactaaaacatgggagtcatgcacccaaatgcatccattaattcttgattttgtttttctaaaggaaaagaaaaatattgtgactatatatatacgtacatagtaactgaataacttactatatatattttatatattacactcagaaagcaaggaaaccggagaaaagagaaagcctcacttctaatatagctatagaacatgaacaatgttcacagagcatggttccaattctatgcaactctatgatttcaatagttgacaagaagttaaacttgactagtaaataaggttgagtagaataatacagtactgcaaatctcaaacatgattccaattctatgtaaaagccaagaatttcaaatgaaaatactaattaaaatgccgttggaaaataacgatgtatcataataaggaaaacaactaatatactagaagaatgcaattgaaaataacaatgactaaacaaactattacatgatggattacagcttctaaaattcatagtaatgtatgtgcaaaattaaaatatacaaatcagacattattacacactgatctgataatatttttgaaaaccgtggttccagtgtaaaataaatgtaatttattgaaaatactgtcactatttgaaatattttgggtgcatatatttcattactctattagagtaagaacaattatgaagtgctttcaaatgtgttttaacacataaacatccaattatcagtcaatatatgcaaaaactatatagcaacaaaacttttgccaaattaagccaacttatgctctaatatgtctataaatcatgcaaaagatcaataggaaagagagaattataaatatattatagaaagaggggagagagaaatattgactctagttgttatatataatatatatagagttttgccaactaacttatccatatataggaaaaaactataactagacataggggcaaggggtattgacatgatctatatgtataataaaaaggcagagggagaaacaaattaagaacaagccatttcaaatagaagtatttacatatatataattatatatataatgcaataccaatttacaaacgttgtgtgcagctagaataataagaatattattataattaaacaattaatgttaatgcaattcacatgatgatatccagctacttactaaaatatttgaaaacatattttaaggggacagcatgtgggagaaaaagaaattaataaaagcaaacattgaattaagacaaccctctataattatataatcaacattagtcaacatttgtatgcaagctaaggtaataataatatgccaaaagagtaagtcatcaatatttctcgagcatcttaacaaataaatatataatattcgaagccaaaacaagcatcctttacagcaataattatcctgctaacccaaaattaagcaccaaaattgttaaacaaagatataacactgatcaaatgtttatgcactgtatctacccaattataaaattcagtattaatcaatgcataaataagtactgtaaaagaaagagtgaattagtattcattgtagttataccatatcagcgtgtgcaaatatactaatataattcataatgatccaataaattagtatgacaatcaatactagatgccattgcattaaatttgaaaatcaagcaaaccatattcactaaaagagaaaagaataattagaaagaaaaaaaatcatgtaattggtttatgaactcacaagaacttgttgaaacatattagcaaaaatatactgttacactgattgagtgggccaaatatgactatgacatcaatgactac

SEQ ID NO: 189305 - DNA, 2531 bp, Cannabis indica
aaatatttagtttttgaaaatctttgtaaacaactagctatttttctaagcaagatattagaaattcatatataattaccaccttatatttaaaatatagtataattattaaactgtctaattactattctaataattaattacttggtaattatataattaccgagttacagttatatttagggatgctttttattcactcaaattctatatattatattttactatgtagatagtaataggtgtacctcacacccctatatggcattatgcatacaaatattgtaaaatactttctataaaataaaataacctaagaaaataggaaaaggtggaccatgagagtgcaggttacaaaaaaatcaaaatagcattgttttgactaaatatccgttatcattcataaaaaaaaatcagtcaagactcaagaatttatattttttgggaaccctttacccctattcataattgattcctcctcaacccccaaaccccattttttctctcttgctccctcttctatttatcctcctcttttacccttaggtgtcaatcctataaggtttttttgacatgtgtttattattgtttatgaagtgtcattacattaacatgtgtttattactatttatgaagtgtcatttgacaagtttccttaattaactatgagtcatcctgttagagatatgtgagtcatcccgatcaagatatgtgagtcattccatccgagatatgtgagtcatctcgtcatactgaccaagatatgagagtcatcccgaccaaccgaccaagatatgattgtcatcccaattaaccgaccgagatatgagagtcatcccatctgactgacctagatatgagagtcatctcgtccaagatatgtgactcatcccgttcgatcaatcgagttacgaaagtcatcccgactgaccgatcgagatatgtgaattatctcgtctgattgatcgagatctgtgagtcatcttgattaactcaccaagatataagagtcatctcttctaaccaaccaagacatgagagtcatcccatctgaccgaccaagatatgcgtgtcatcccgtccgattgatcagttatgagagtcatcctgactgatcgaccaagatatgagaatcatcccaaccgagatatgttaattattccgtctgaccgattgagatatgtgagtcatcttgactaactgactgagatatgaaagttaccctgtctaaccaaatgaggtatgagaatcatcccgactgactgatcgagatatgagagtcatcccaaccgaccgatcgagatatgaggccatcccgaccgaccgaccaagatatgagagtcatcccgaccgaccgaccaagatatgagagtcatcccgacctactaaccgagttatgcgagtcatcctgatcgatcgactgagatataagagtcatcccgactgatcgagtgagatatgagagtcatcccgactgaccgactaagatatgtgagtcgagctgattgaaataggctatatctcaaaatgaccgtgataggtcatatctaagactagtccgagataagatagattttagactgattcaagataagaagagtccaggactgaatcgagatagacaccttccgatccgagataatatcctccttgacatgatttgagatgagaattattttagatcgatcataattagacattattttgactcatccaatgcagttaaccacttatttatattcttgtatcttaactcttgatcttgatcttcttaaacttttttattatatttttctaatctttcatgggctttacctgtatttgtttattagacattttctatatttttaatatggacctttcattggcccattgaaatttccccatggagtgtgggttaaaaaaaaaaaagaaaaaaaaaagaaagaataatagaatatggaataaagaaagtggtgagtgtaaaccatgaacaatgattggagataagagtggtcatctgatccaatttaatatttttttttgtcattcgatccaatccaattaataattagatttgaaaaattatcacttgatctaatctgattagaccttaaaatctaatccaatctaattaattattaattgaattggatcgatttttattaagatatctaagtacacacctaattttttttatattaacttaaaaatatgaagaaagaaaatacgtaaaaaataaatatcacattttatttaagtttaatacttcataaaaatatcattgttacaaatgtaatgcaactaaaactttgaaataagaaaacaataatattatcaaataataaaatagaagggattattttacaaatacacaaaaataataaaaagttacaaaatagagtgtacggaatttaaatattttacgtattttattgattttctttactagaaataatagtcttttgatgtatttttatgttgtactcttgttaatttattgttgattttttgttattttgtattgttatttatttttttttttgttttta

SEQ ID NO: 189306 - DNA, 4227 bp, Cannabis indica
aactatcaagatctaatcagttaagatataaaataaattacagtaattttatgaagaaaaagatattaattttgtatttatttgaagcaagatactatcacataatctgatgagaaattgaacaaaaggattcccgcataatgaaaagaatctcagcataatgttgtgaaaagaaaaagggagagaccgacccctatctaatttcactgtagaaggaataattacaaactagattcgctgggagattagttctaatgggtttaatgtgtgagagccgggatgtcatttgcttagagcttattgctgtaacttaaagcatcatgctatctcttagattccacttgtgttattggtttgttagtaatggaaatatgaagagatttggctatgtgtatgtcactgactgatgaatgatcacttctttcttttttttttctaatattagactaatagctggaaatggaaattcaaggaaaatttaattaacatctactatgaagcacatgaagggaagagcagtgatccatccaaaaatatcctaatggtaccaacaatttctgatgttagtactgttgaagaatggcgatcagtagctagaaatatagttcagcaaactggtcaagtcaattggcgtgccaccattgttgattggccgggtttggggtactctgacagacctaagatagactacaatgctgatgtaatggagaaattcttggttgatttcatcaatgcacccgatggtccgatgaactcttcaggttggttaacattcattttttggttataaaagcagaactgtggactacaccatctttcagctttgctatgattgagctgttaactttgattctttttcgatttaggatccttcatatggatcttcttgcagaatttttcatccaattcttggctatcttgctatatttgtattgtgtgtgttctatgttcttgtgggtctgaattttgcagttactacttaaagtcttcttgcagtatttttacaaagttatttggtataaaatgtcattacccaagtgctctaattggttttttgtttgataccaagttgattgaatgaaacttaaagacactgcaggttcaaatctcaataatgagagatttctgagtctaggagaaatggatttacttttaaagattttagaacccaattatttggatgggcataagtaagcagaattgttagagggcaggtgagaattttgtggggatttgggatagttttgctatataatatccacagtatgcttgagggcaggggaggggaggggaggggaggggaagtaaatgtgtgactaagagcttagctgtttgggaattgctaggtctggttttgatttgttggaacattttacaaagttaatgagtatttgacaaaacgagagtgtcctagtgtgtgaaatagaatgagtcccacatgcgatttgaatctttgtttataagggtaatgtgtaattttgacacttgtgatacccagttttgtgtgattttattttttacaaaaaatatatttaataaaataattatatttttctttattatttaatttatttgagaaatgtgtttaatcgaaactgattacttagtcctatcagtttataggacacgttcaacaactactccccacaattcagaaaacatttttcttcccattataatttttcatttcatttgtctatataatgcgattgaattaacaggagaaacacatctttttcatattaaaaaaacaaactcaattttcgctatcaaaaattccatctgcgatatctattttgagggtgtatttgacagttcgctacagtatagtagtgttccgatacggtatacaataactgggttgttttatcttagggacaatcagcaattttcgactgcttttacaattctgggtagtgacacgaatgtcttaaagagagtgacctagtctgtgactcaacccaaaaattttattcgataatatagtttctgttttattttcagtaggaatttcatcaacggactccaatattgtattctatttacctcaaagcttctcattttctattaagagttttaagttacgttatcatttcatttggatagtgtacactcgacctgtattttagggtgctcatcttcgtgtttctttttgagtggcatataaaattttgtttgattacaaccacttaggtagaactcaatcccaaaaactaactaagagaggagggtgtccaaataattataaaccaccaaccagtctcaccatctcacacttagctgatgtggaatcctaacaatacaccccccttggaggggacgtccacggctgcccactctacggtggcctattatgggctttttccacaagtcgatgtgattccatttgagggtgtatgtctctgataccatttgttataaccactaaagtagaactcactaccaaaagactagcttaagaaaggagggtaccgaagtacatataaccaccaaccaatccacacttgtcaatgagatatcctaaaagtttgctttctcaatcattttcatttaatcattttgcaatttgtatatttcctcttgcctacttttactcttaattataaagtgctaacaatctctattcataatgcagaaaatgatttggtggtatttggtggagggcatgcagccacaattactgttcgtgcagcaaaaaaaggacttgtaaagccaaaagcaattgctgctgtagcacctacctgggctggtcctctacctattgtgtttggtcgagattctggcatggagacaaggtacttttaatgaaataccaccttcgtaacctgtaaaaatagagatttttaatcggctttgactggtagggatacgtaatctatgcctttatattagctagataaaattacaccagagaaatataacacttaacgtacgtctagtttaggagtaatgaaaaaagaggaataagaatatggtggaaaatttaataaatgtactatttccaatgatttcatgtaatttagtactaaatttgctcacctgattggtcttttaaatttcatgacaaacgtaccaggtatggactgcttaggggcaccttaagagctcctgctgttggctggatgatgtacaatatgctagtcagcaatgagaaggccattgaatcccaatacaaatctcatgtctatgcaaatcccgaaaatgtgactccaggaattattgaaagcagatacgcattgacgaaaaaggaaggtgctcgttatgcgcctgctgcattcctgaccggtctcctcgatcctgttcaatcccgtgaagagtttcttgaactctttgcagctatggagggaaagacaccagttctggttgtatcaagtaagggatctccaaagaggtcaaaagcagaaatggaagctctcagaggaaccaagggggtgaacaagtttgtggaggtaccgggtgctcttcttccacaagaagagtatcccaatttagttgccgaggagctttaccgattcttgcaagaaaattttgaatccaaagcttaaatatggtcttcagatatactaatacgcttctagctcctacgtataaaatttaacaagagtaatttgatattagaccttagtgttatcttcatacatgttactggttgtatagcaaggaatctccactgtttatcacaataaataatccatttttattttcatattttatgtgctataaaattacagataattaccttcggttaatcgttaaaaaggactcggatcccctgtcaaattttctgtcggaccaatttgaaaatgccatctcatttaatgattaaccacattaactatttaacaagtcttgttctccatggctctattattttcgcattgcaattaagtatcagtgttgtctagtatcttctcggcatgttgtgttgtgattggctagcgatactccctaaaaacttttatattaaattatatgggattgggtacttagttagaccaatagaaatattgacaaaaaagtgttaggatgtcttttagcatttctctttcttattagttgcttattaataataaatgcttagttgcttttttttttgaaaaaataaatgatgttgctttttcttttaaaaaaataaaataaattgaggagtccataaataattattaaaataaatgttgagattttttttatatctttctatttaaagtgatatttaaattcattttt

SEQ ID NO: 189307 - DNA, 4047 bp, Cannabis indica
atgagagtttaggtaattttgcccctaaaaattgatttttgtagctaagtgttaaaaaatttaaagttcaggtaatttaactaccaatatcactaaaatattttataatatttattaaaatattttataaaatatataatattttatttgaattttacattattatataaaaaaatatataatattatagtgaaaaaggatatgtagattatatttacaaaacataaaattaataattatacttacattattacaaaaatggaacaaatggtggatatattttgtatatttatggcaaaacaacataaagaaataaaatgcaatatacttgaaaaaaaataatagagaaaaacttcaaaaaaaaaaataatcaaaatgcaccataattcatgattcttttttagcattacaatatagatggaaaaatcatagtaattacaaaatagtcacatttttaggtgttatgtagaagaatattaatattcccacataattacaaccgatataaaataaaatatttaattttttcaccaaagtactttctccccacataaaagatttatatgtattattggcagaggcgaaggcagaacggcatgaaccgggcgaaattgattccattcttctgcagcaacattggccaaaataaaagatttgaaaatcatcaacttcaccttgagcaacttcaatttcttaattttcttcaatgtcttcaccttcactaccttgaatttcttggacaatgttatttttaccttcactatcttgaatttcttggataatgttattttcaccttcaccaccttaaatttcttagacaatattattttcaccttcagcaccttatatttcttggataatgttatcttcaatgttaaattgaagtgtatctcctactttcatacgaccacgtacagactgccaaattcttcttggaatgtgtgcatgcagatctctttttcttccttaaatagaaaatgtgactaggactatcgcattgcgtactcttataaacccattgaaactcatattaattaagtttgtgtatgaattctacaactttttagggatgtgcgctgcagcagtcgcatgatttgaatcagtagcaacttcactttcttgattgagttcttcgtgaatatcctcatttcctctttcttgattgggttcttcgtgaatatcctcaattccttgtagatcttgaggcggaggctgaacggcgacctcaactggcagaggcggaggcggaggcagatgaagtttttcccattcttgagctgcagcagttgccatcatcaaaagaggatttgaatagtagcaatttcaacctattcttccctttcttgattgggttcttcatcaatatcctcaattctttggcaatctgtatgtggtcgtatagaagtgggaaatacacttcagtttaacattaaagataacattattcaagaaattcaaggtggtgaaggtgaaaagaacattgtccaagaaatttaaggtgatgaaggtaaaaataacattgtccaaaaaatttaaagttgtgaatgtgaaaattaaattgtctaagaaattcaaggtagtgatggtgaaagtattgaagaaaattaagaaagtcaagctgctcaaggtgaagttgatgattagtattcaaatctttttatgtttatataaaaatttagtaaacatctcacatttttcacattagtcacaatatattcgtactactaagacattgattagtgattaaaatatatttttatttattttaaatgataaaataagttgaattttaactgataaaaatgtgtggaattcatacacaaacttaattaataggagtttcaatgaatttaaggtaagaaaattaggtagtttttatgtgttgaattgcataatttaaattatttgtgtattgaaatattatttgtgatttattattatgaatgtgtatatgttacaatggtagctagggttgtatatgccagattatatatgtaatgactatgatatgtcaatgttatggtaatgatattattactttatagtatcgatataattatattgtgagtgtgatattggagttatgatcgatctctgtatgtgtatggtgtgaacaattagtaataagtcatttaaacggcaacaaattacaaaaacgaccaaaaattaagaaagagcatgaaatccccaaaacgacaacaaatcaaaacaacataaatattaagaaacgacaaatatatttttgggtttataaaaatatgaaagaatcaacttaattctccaaaagtcacttgcttgctttgtgtctcatacaaatacaattaaagcaaattcaacaaagatttgaacacttgctcaaaataattttgaccatatttggtgttttactttctcattgttatatatagatcaaataattaataatttaatacttaattaattgttataccctcaaaaaattaacaatacatctctatttaaaaaaaatgaaaaaatttgtttactataattggttggtaattgttgaaatgataattttgtattgttatagtgtaatttaataaattattataaaaaacttatattggtaattaaacactattaaatatgattagttaatgtataaattattaaattaaaatatataaaattctatatgaaatcataataataacaatataacaagaacagtatactttaaaaaatttcttaataacgatcaaatcaatactcatattttgggcaagactttgaaaatttgcctcccattcaaactacattacaaacttttaatagctgcaaccaaattatatatatataagcaaatattgtttgaaaattaattaattatactaatatatataactataagacaaaaaaaatctataaaaaaatgtaaaaaatatttgtatgttttcctttgaaaacgaaatctttcctcttatgataattactcaatcatcacgcaaagcccctattttttttttctttctttctattattattattattagtaggtgttcttacatgagatgggtcattttcagcactaacataattttattagatgattaattaattaattaattaaatgtttctatatggaacatataatagctaagcaataaaaaaattatgtatttatcccttatataaaaaattgcattaacataatgttaaaaaatatcatatatatacaaacattttcatagtgaattataaatttatatatattggccccatatgatgatacttgggtttcttgaaccttgactggtcatatggacatatgtgttgaatttattcttcttaattttgatagatatctatataatattttcattaatattgtttcaatattaattatatatttaagataattaaaaatattaatttcttttgatgaacaaataaaatattaatatgaataagaaggttgaaaatgatagacatgtgtggttaattgtatatgtcatgaggttttataataaaatagactaattaattaagctagtaagcttccatatcgatatgtgttgttttcatgactaattaattaatatttaaatatatattaatttttacataaatagaaaacatttttttggcttacaatgaactgatcatcaattattcaattatggtcaattattagtaagtgtaaaccctaattcacctatagaaaattcatctttgcttccatttattacgctttggaacatatatagctagggactatagatatatatatagctaggtatttaatagtctatatatttatataatatatatagttttggtttgataattttttgtaaaatgacattccaaatttcgtcataattaattcacatatatactacccaaaaaaattttttttgctctacgaagcagatgtacatatagaaaaataatttttaatttgtaactagtaatcttttgtgttagttcttaacaaatatatatatatatatatatataaatatcacttacaaaattagtgcaaaatatactttgttgtaatgtcacaaacatataatataaaat

SEQ ID NO: 189308 - DNA, 2711 bp, Cannabis indica
tttttttttttttttctttcaaggttataccatttgtagaaaggcaaagcatatcccggatacaaattagttagaaatattaaaatttataaatattaatttcttatatttttttacagagtgaaaaaattcaatttttctttccaaataattaatgagctgatctgcgacactgttcttacgaaaattggaaacgcaatgttagttttataaatgctgagggtttggaattgttgcaaataatttaaaaacccttgcattattgtacgtttcatatatctaaatatgtgaatattacattttttttattaataacttgcgaaaattaattggcatttcttctgtataaatatacatttttcgaaaaggaatgtagctagtaagtgattcaaacatttacctgtgatgatgatacatatttatatatatatatatatgttgtagagtaaatttttctatttttctatcttcttattactaccaattccagtgtccatttatgcttttttaagatcagcatttatattgtgaatgtctttatcttgttctaccataattttctgtgtttttctttcttcttcgttttttacagcactaaactattccaactaaaagctgtaaaaaaagattaaacattaaagtcctcctttcccaataaaatacaggtgtcaatcaaggacaagaattaggatctttgtgtgtttttttttttttttttttttttcagaatatatacctacaaacaataatttatatacatatattatatttgtatatagtattttttacaagcaatattatcacaacaaaaaatccacttatacttgtactgtgttaaatcatgcatggtagttgaaacactggacttgtaaataaattgcctaatatttggcacggtcgaatttgaacaagacataatgaaaaattatattatttatatatgttcttatacaaaattcagtgctacaaatatcttttaatatttgttcttggatagcaaaatagcaatactttaattccaaactcttgcgcactctattattaggtacttgaaaatatacaaattatattatattttatgactcaaagtggtgttaagttattattttttaattaattaattaaaaacaaagttgtatagtttagttagaggttggtgtggttgtttggccaggtggcaattagtcatatgccaaaagtatacatatatcatttttcttagtaattggttgcttaccctcttaattatatactaataatattcataatttgataacaaaaggaattaattttatctccttttagcatgattttgatttgataaaatatactcattggcggccactatttttactcgaataatttttctcgatcattaaaaaacaaactttagttttatccttattccactgaaaaactaaaagccactttgtggagaccagagatgaagagatacttttctttttcttttctagttttgcatgatgggtttacaacttttataatcatcgcaaataaggctaattagtttaaattaatcccatatatttataactatatatataagcttataaattaaagctatagattccgaattcgttgtatagcacttgcatgtgggcctttccgagccaatgtgtatatatttatatatatgcatatttattattatccacattaatttgttctatttatataaactaatattttgaagctaattatactatacttgttgctgtatatttatatatatatgtttcgtactagtgtgtgttcattttggtggatatttttcaaaatttaaattatgtgtattacttacaatcatatgaagggaggtccacccttatgaaaggtctgtccacaaacaagtgacagaaaccttttaagctagcatatatatatatatatatgtattatcaatttcagccattcatatattataatttaactaaggtcttcactatatatttccataaaataaaataaaatgaaaagaggtcactatgtataagctattattactagtacaatcgttacaatatctgtaaaatctaatagggtcccggccatgtcaagtagttttctttaaaggacagtagctagggttttaaacatttagaacactaaataaatttatttctcatttcaatttttatttttcaaaaacaacaaatacaatttctctaaaattgttgatatgtcactaccaaatagttacaaaatctttatcttctccttaacgaaaaatctgtaatgaccaattatatatgcacgatcaatatatattgtcatattgttaaaaaaaattgttctctctaaaaaaaaaaaaaaaaaaacaaaaaaaaaacaaaaattgttaatttttttatcatttctatattcttgtagttttaaaatacatacgtacataaaactaaagagtaccgaaatataaaaaaactaaagattaatgaatatagtattctctatatataatgtagtgcatgaataataaattttaagaatatatattttatgatgtttaatttatttgtaatttgaattttaccacagaaaatttttatgagggccagaaaatagtaagaaaaaaatgaagaattttttccataaatttgatatgggattatttatttataaattattttatattttataggaccaatttgaatcaacatatgttgtgagaaaaaaaacaattaataactgtg

SEQ ID NO: 189309 - DNA, 1177 bp, Cannabis indica
agaaagagatgtatcgatatatcgcttttaagagggtgattatttgaattttaatttttcaattataagttattcaaaattttatagataataaaatttttactttgtaaggacttatttattattaaaaaatatttatacctacgttatagttactcttattaaatttatttaattttgctgaaacttttttattattttaatttataattatttaattctaacaaataatatttttaattttattactaggaattataatactaatggatccgttcatgattacaacatatatatatataatcattaaaaaaaattaaaaaattttaatgctgaaagagataaattatctactaaaatatatgtacaacaaaaatttctaaaattatttattattttttactattcatagtggaaataaataaataaaatagaatgagaggaatttgtgtttggtccacgaaacgaatagtcttaccctttttcgctttcggtaaagagtgtgtgtgtgtgtgctgtatccagttctacttcccaaattctttttcatttattattttaatatgatctccaaaaatatatactatgtatttctttattattattattggaagaacatatactatgtattattgatactaagacatttggttattcaataatactgatttataagtgtttattctagtaaatacatataatgaaataaaggaagactgttgttgtcgtaattgaacacctaatgaggtcacgcatatagctttacaccattccatgttatatggttgggtcatgtgagtggcactatctcgtttattcaatttcttttatttttatgtcattataagttaatggataacttcctattttattttattaatattaagaagaagagttttcgtattggttgaatatgtcatagtatattggttggttatagctatattttggaaaacgctttcttccataaaatgtattttttttcctttctttgatcataatttgagatattttcctcatttgtactctcatgaaagttcttgccaaaaataaattggaatgcataaacttttttctattatttatttggtaaagcttcactacacccactacgagataagtaacacttgttgtggcgtgctgctccatggcacattcacgagagactattttgtaa

SEQ ID NO: 189310 - DNA, 647 bp, Cannabis indica
tcatcttcaaaaatcacttccttagagttaggaatattggtgactgattgggaattaacttccattctctttcttttcaagtcaactaattctaattgcatatctgacataaaagtggccttattgtcttgcaaaattatagtggggtcatttaagggagattctattcgagtaaaaactctcctagaatcatgggatatagtcggctgtataacaacccccatttgttgctgatttctcggcctatacgatccccccaagcctgccgtaactgatgtagcagtagtgaatgcagacggaggtgattgaggatcggattggggtgcagcaggagctgggttgtcgtcggtttttcgcgtcctcagccatggagaagcaaacagaaaactctacctccttataggtgctttcatctccaaactatacgatttttcaattttctcaatcggggtgtcatatagtctagcacaaaaacgttccgaatgtcccatgataccgcagataaagcaaaatgtagggagtttttcatatttaaaattggcatagaaagcatcaccacccttctcacgaaacttcattcgtcttttgagaggaacatcgacattaagtcgaactctaacacgcaaatactcacgccaaacgccttg

SEQ ID NO: 189311 - DNA, 8457 bp, Cannabis indica
aaataactaattatgtggaataggctagtaatttattactctctctctaatacccctcacgatgatgactattttttgttcaccaatcttgcactgctcgatcacaagtggctcttttgactcactatttccaaattacaagtaattcttttggttcgtctttttggatcgattattgaatttagatcggatactcgttagagtttagtttgactctgatactatattagaatgcgatgaggtgcatgaaatttcatctcaaaattaattgacaataaaaaagtaatttatacatcttatatatggtatttaatttctacctattatacccatttaatgctagggtaatactaattttaccaacctttacccaaaaccttccgaccatgcagtcctggattgtacatttccaattcttactgaattgactcgacgacttcgacgtacaaaccctcacagcggttgagtgagtaaattttcttttctatcttttaaaaaaaaaggaaaaaaaaattaaacaaaattaatcgtgaagaaaggcgactcaccttcatcgctcgtttgcagctcttctactggctagatctgcagctcatttctatctttctctctctagaaccaatattttggttctactctcttcttcaatcgcattttctccgctgaaacctccgatctaggcaccatggcggctgcaaatgcccccatcacaatgaaggagaccctaacggtgcgtgcttcttctactgtcgtttcaatttcatatttttccttttcttgttcagtttcatgttaatttcgtctcagtttatggtaattacttgattttgaatcgcattatgccatcggatatatacgctgctccttttggttgattatcgtttttgcgatgttttgaacctaactcattttgtgaactttgctacttttgtgtgatttttaacctcattttgagtgtgagtgttggagtttgtggttatggattttctttctttctttctttacagttacccagtattgggataaattcccaattcatcacatttacgaatgtgaccatggaatccgacaagtttatttgtgtacgagagactgcacctcagaatagtgtggttattgtcgacatgaatatgcctatgcagcctttaagacgtcccattacggcagattcggcattgatgaaccccaactctagaattctcgctcttaaaggtatcaccacacttttctacttaaataaattcgattcttttatgtgatgttgtgatggtgtgttactgcattgtattgtcttggctaccggatgtttctaccttacaatttgggggtgatgagtgctggtatatgcgtagctgtatttcattttatatattaacattgcctgtgttaaaccgacttacacattttttgctcctcttttgatcagttgcctgtactaggcattgttggtattattatcttcaagatatcaatttctctacttcatgcactgttatttcgttgacattattattgtaaatatatatatatatatagatatagatatgtggacatacacatattatgggcatgtgtgtattccttgtttaggttatcggtaagtttatggtttgttttagtgctattgagaaattgtaatttcatcattattcttctatcaagcataactcgaagtattactgtatttgttctctggattattatcattgccttgttcattttgttcttatggttgtcatctgattaatcaacgaccatggtttgtttgtagctttaacaccaggaactactcaggatcatttacaaatattcaatattgaagcaaaagcaaagataaaatcacatcagatgcctgaaacaggtgatttctttctttcgagggcattcaaattatttattacaatactatttatgaactcagtatgactgtaggtaacatgaggtcttgtttcatttactaagtcctcgtcattgtattttgttattataggttgtcttttggaagtggatcactccaaagatgttgggcctggttacacagacctcagtttatcactggtcaattgaaggtaagataccccatcatattttcttgacattagaattattatggtgctttgttgttcttttcaaccagctgattctgcataagtgattaccctgctaatattctgagtaatttatattaggcgagtctgaacctgtaaagatgtttgagcggacagctaatttggcaagtaatcaaataattaactaccgatgtgaccctactgaaaagtggttggttttgatcggtattgctcaaggttcacctgaggttagtggtcattatttattgtaataatctttttagttatgctttattagtatccttatattttccttctaccctaccggtctagggtttgtaggttagaaaatgtgaacaccagggtttgtaggttagaaaatgtgaactgtgtaagtttttcaagttgggttactgaattttgagatcctgggatcgctttaatgttgatatatgcaagagaccagggtttgcaggttagaaaatgtgaaccctgtaagtttttcaagttgggttattgaattttgacatcctgggattgctttaatgttgatatatgcaagagaaatgtttatgcagaaccagctttttttatgtacttttgtatatcctgaattttgacatcctgtgttttgtttcctgatttattctctattgcgaaaaaacccctgaactgtgcaaattgttgcaaatattcccctctagttacattatgcttattttttaaaacaatttgcttatatgactattagttacaggtataattgtagtccaatgacctatttagtaactttaagctacctgaaattcagtgtattgaccttaaacatacaaacagtacctccaagaatctacatacatgttctcataattcatcattagactgctatttatgcatttattttttgtgtggatcttgaactctgctagactaacgttatgttagtgctatatcaacaaattgtttaaagaattgagcagaatgtaattacagggggttattatcaataatttttatagtttagggggaatttttgctactaagaaaagtttaggatgcaaaactctacaatggtcatagatcgggggaataaatcctattcattcctttagttatgctttgttagtatcgttatttttccttctaccctactggtagaccgggctttgtaggttagaaaatgtgaacttgtaagtttttcaagttgggttactacattttgacatcttgggattgctttaatgttgatatatgcaagagaaatgtttacgcggaaccagcattttcttttatgtacttttgtgtagaacagaagatgttgtggtgctaatttatttgttttacacaaatacttagatttgtgggtgtttacattctttgactccataggtggtgttttgtagcgagtaaaacctgcctttaggctcaggactcatctcttgtggcatgctcatgcacctagtaataatggaacaaaagtcttcatatgagaagatatgtccttgctctaattttctcttggtgtgtggtgtgcaaggaagggggtaaaacactggatcatttatttcttcattgttgagtggcgagaaatttatggtgtaatttattgaattgaaagatgcatggtgttaatgatttagaagaagattagttttggcaagtctaaaatggcatctattgtgctgatagcaacttttggctcatttatttagaaataaacaatcatatcttttaattaaaagagttgatgtgatttgtatgagaaaatttagggattctacacttttttattttactcctggctggagcaagacttcattatgattaagcaaagcttagtctcttagtaacttctattggtttagtttgtatttttacttatctcaagaatatcttagctttatctttacccaaattattgctgcagaggccacagctagtgaaaggaaatatgcaacttttctccgtggatcagcaacgtagtcaagcccttgaagcacatgctgcatcatttgccacatttaaagtgtgaatctgtctccccctttttcagcactattatttttttttgttatgtattttatttaataataatgaaaaactttgttacatgaaggttgcaggaaatgaaaatccttcaattcttatttgtttcgcttcaaaaagcttcaatgctggacaagttacatcaaagttgcatattattgaacttggtgcccagccaggttagctgaacatttaatatcaacctttaaaatttatccacaattgcagacccgtgcaaaaatgaatcttgttcctatcaatagttgtttgttgtgtggttttaagaatcgtgctgatttttcttcatttaatttcaagctatcagttgattgttctatggtacttattttctggatattgttctcaggaaaaccatcatttactaagaagcaagcagatctattttttcctcccgacttcgctgatgactttcctgtgtcaatgcaggtattctaatactgttgtatatttattttatttaaacccaaactttctgcccagattaatccttttctctttttctggtggtggtagatatcacaaaagtacggtttgatatacgtgattacaaagctagggcttctatttgtgtatgacctagagacagcaacagcagtttatagaaacagaatcagtccagaccccatctttctgactgcagaagcttcatcagttgggggtttttatgctgtcaataggcgaggccaggtgctgcttgccactgtaaatgagcaaacaattgtatcttttgtcagtggtcaggtatgttttttaatttttctgtacgtgtgtgtgtttactggagcaaaaattgttgtatttgaatttgagatgttacttttttatttttgcagttaaacaatttggaacttgctgttaatcttgctaaaagaggaaaccttcctggcgcagaagaactggtatgtatagagtgtagttattttagattgaaacaatccaagtctctaagacttgttagagacttgtgagtaagtaaatctactaagttaaatttatttgatggcatcaagcaatgtgatttctaaccaatacgtcgttgaaataacttacaaagtttacatgtgcatgtttctaacttactttgatgtttcgtaggtgaaacgttattgttgccccattcccctatgtcctctaaagtgctccaggacattcattatcacaatctttaatcttgcacatcattgtgtgatcagcatcactgcattttgatgctttttcttcacttggtaattcttaatcacatgctaaaaatatgataatctggctgtcacactcaggttgtccagcgctttcaagaactgtttgctcagacaaagtacaaagaggctgcagaacttgcagcagaatctccaatgggcatacttcgtactcaagagacagttgctaaatttcaggtttaacttttggatttcctgttggtttcttttctttttttttcttctttttactcaataatgtccatgcttattattgcttttctcatatacatgactgcctaacatggtgtttatggtgtaacttttggatttggccatgcttattcttgcgattattgtatagatatacgcaaccacctttcatggtgcatttatttaggtcatgctaagttttttttggagattttaatctgcttatgttgttcaccattgcagagtgtccctgtgcaaactgggcaaacaccaccattactacaatactttggaaccttgttgactaaaggaaaactaaatgcttttgaatccttggagctatctcgcctagttgtaaatcaaaacaagaaaaatcttttggagaactggttggctgaggacaagcttgaatgtagtgaagagcttggagatcttgtcaaggtctgaaataaatgatattgctattatataaaagatctttcaatacattgtacaccattttatacttttgaggctattataagtactcatttcagaggttgctgatagagaaaaatcagttatatagagaataatttgtgtgatttgaaattgcccttggccatgggtgatttgatttattatacgtctaattggataagatctttgaggttctcaattcttataagcatgttaggtccctaatgatgcatacaagccccaatctgataactagcatagccgattttattatgttttgattattacatttttctctttctttctaacagtatgaagtattcttaatatgcagacagtggacaatgaccttgctctaaagatatacatcaaagccagagcaactccaaaagttgttgcagcatttgcagagagaagggagtttgacaagattttagtatactcaaagcaggttactaatgtcttctttttctctctttgcccatttttttagtgaacagagctacttgtgtgtctttggtcataattatttgaacattcttggttcttactaattatattcaaacttgttttcgtttcaggttggctacacacctgattatttgtttcttctgcaaacaattttgcggacagatccacaggtatttgtatttgtatgaagctctattgttttttttcaagtgttatcaaattttgactcctttggcattttaatatgtcatgatctatctcaatttcagggagcggttaattttgcattgatgatgtctcaaatggagggtggctgcccagttgattacaacacaattacagatctgtttctgcaggtttgttttaagtatatatttgtgcatttcaagtgttagattcaatttattttacattacgtggtaatactgagttatccaattctatagacattcatgctttaatgcaatcttctttaacttgctttcccattttgtaaatacataataaatttgtgaatgcatttgtagtttcaaactaaagaatttatctattgggatttcatgttattgtgcttgtttcactatttttcagcggaatttgattcgtgaggcaactgcctttttgttggatgtgctgaagcccaatttacctgaacatgcacaccttcagacaaaggtccattgagtttcttttcagtgtttttatctacaattcacatttgcttctatatgttaacatatcagcttctaatttactttttgtaggttttggaaataaatcttgtgacattcccaaatgttgctgatgcaattttggcaaatggaatgttcactcattatgaccgtccacgtattgcacaactctgtgaaaaagctggtttgtatttgcgtgccctacaggtatgagagcttgttacatataagtgcaaaaattcctctgagggatgtttaattatcttctgacttaaatgcttgtcaatgcctgcagcattatacagagttatcagatgtcaaacgtattattgtgaatacacatgcaattgatccacaggttggtattgaaatctttatttaactttgatcaatgtgtatataccatatgttatctaactttcaagtgtatttaggctttagttgagttctttggtaccctttccaaagaatgggctcttgagtgcatgaaggatcttctagtagtaaatcttagaggcaatcttcagattattgtccaggtgaaagccatacttcttttgacctatttttgattttgcatagtttattgaagtgaggcttactataatagtttgatgcagactgcaaaagaatatgcagagcaattgggtgtggatgcatgcataaaattattcgagcagttcaaatcctatgaaggactgtactttttcttgggctcgtatttgagttccaggtacaaaaaaattttgtttgactatctgcatctttcttgttttttaattttttttctttctggtagtgaggatcccgagatccacttcaagtacattgaggcagctgcaaaaaccggacaaattaaggaggtcgagcgtgttacacgggaatcaaacttttatgacccagaaaaaacaaagaattttctaatggaagccaagcttccagatgcacgcccgctgattaatgtctgcgatcgttttggttttgttcctgatctcacccattatttatacaccagcaacatgcttaggtatattgaaggttatgtccaaaaggtaaatgtttttttgtgtgaggttgtttcagatttctggttgatgattttttttatatgagaatagaaaattgcaaattgaagcccctaaatttcttcccagcccttctttctctgttaacatagagacaaaattgctttcatttaggattttcatacttcttctagatgatggttaacttttcatatatatatatacatgtgtataaaattgatatattggttaacttttttttttt

SEQ ID NO: 189312 - DNA, 3659 bp, Cannabis indica
atcaaaacaaataaaaatacatctgtagatttattcaaagggggtgtaatatttttctttttgtggtatattgtggcattttatcataaaatagtaataacgtataatgtagtgtatctcaatacgtatgtatatgtcaccaattatcatcaacaaactatattaatgcattgtcaaatgaaacatagatttaataaacacataaaatatattccttttttgaaaggaataaaatacacaatactaaagaaaaacaacttaataaattaattccattttaaattttatgctggcttttaaaaatttcaagggtggctgctaacatcttcttctacattatatatattaattcatcaattagtaatatcagtcacaaatcacaactcctaaaataaattatgaatatcttcttctttgttttcataatctcttgtccactttcatcatcaatctctgatactttacatgcaggttcatcattatctgcagaacaacaaaacgtcgacgttttagtttcaccaaatgggatcttctcagctggatttcactccattgggaacaacgcatactcatttgccatatggttcacccaaaacaaaaatcccacagtggtttggatggcaaatcgtgaccaaccagttaacgccaaaggctcaaagctaactctcctcaaatctggtaacctcatattaatcgacgcttatcgaataatcatttgggccacaggaacgacgtcgttttcagtacctcaattgcgtttacgcgacaatggaaactttgttcttataaccgaagacgacgtcgttttgtggcagagttttaactcaccaatgaatacccttcttccagaacaacctttaacaagatacaaaggagggcttgtttcgtcaagaagtcaaagtaacttctcttctggtttctataaacttttctatgacactgacaatgtcatgcgcttagcgtttgataacaatgacgtgtcaagtgtttattggcccaatccttggttgttaacttgggaagctgacaggtctacatacaataatagtagagtgggagtgtttgattacttgggaaattttacctcgtctgataaatttactttcttgtcaggagattttggttcgagggttcagagaatattgaaacttgatattgatggcaatgttagattgtatagtagagaaaagtcatgggagaattgggttgttacatggcaagcttttaccaatccttgtaggattcatggtatttgtggtgctaatagtcgatgcatgtacgattttaatggcagaaaatgttcttgtcttccaggacataagatgaagaatcgtactgattggtcttatgggtgtgaaccaaaattcaattccttctgtaccaaaaaccaaacttcaagatttatcaaacttttcaattctgagttctacggctatgattatggtatctacaacaactacagttatcgagattgtgaaaatttgtgtttacagttttgtaactgcaaaggtttccaatactcatattttatcaaccttggtatttttaaatgttatcccaagatgttattagttaatggataccatagaccaggcttttcaggaaatgtatacttaaggctacctaaaacagatgatcatatctcatcatatgaaaactcaactgaagaatttaagttagacttaaattgttctaacaaagccactacaatacagatagctaaaacttatactaaaggccaagtgaatatggcattggaattcatgttttggtttgcatgtggggttggaggaattgagattatttctattttactcatttgttgcttgctgattagaacccaaaaatactctgatacacataaatttcaggttcaacttatggcgcaactagattgagaagatttagctattctgaactcaaaaaggccacaaaaggctatgctgaagagattggaagaggagcaacaggcattgtttataaaggtgtactatccgattctcgagttgcagcaatcaaattactccctgaagcttaccaaggtgaagctgagtttttagcagaagttaataccattgggacactaaatcatatgaacttgagagagatgtggggatagtgtttagaagaaaaacatagatttttagtgtatgagtacttggagcataaatctttaaaagagaacttatctagaaatgtgcttgattggaacaaaagatttgaaattgcagtaggaactgcaaaaggtcttgcttatttacatgaagagtgtttagagtgggttttacattgtgatgttaagcctcagaacatactcttaagctctaattatcaaccaaaggtagcagattttggcttgtctaaaccactaaagagaggagagcttagtagtcaaagcttctcaaggattagaggaacaagaggttatatggctccagagtgggttacaaaccaacccatcacatcaaaagtagatgtttatagttatgggattgttgttttggagttattgactggaaagagccctacaagttgtgttggtaatagtaatggtattgaggaaccagagcaaataggacttgtaaagtgggtgaaagatatggttaatggagctggagaattggaaaagatcatggaatcttccatggaaggtgaatgtgatatgaaaaagtttgaaactcttttgaatgtagccttaaattgtgtggaggaagacaaagatgctagaccttcaatgagccaagttgttaagtccctcctacattttgaggatgataagtagtgacaatcaatacttctatcttttcataagattatgaattttgtgtattgtatttgtggttgtatttgtacaaacttaataaaatttgtaatatatatacatataaatttgtaatatataaatacctatcgttttaacaagtaatacttacaaagagtgaagtcgatcccacgaggattgtagttaaatatgttaaaattaaattcttaattctatttggcttaataaaatttatacattcaagtatttgaaacctgaaattaaagaaaacaaacataattctattccaaaaaatgataataaaaaagaaaattaactctaaaaataacataaataataggctaaaaatatcctaacaataaagagtcatttgttattaagttggaactcatttttgatactaagttttccatatgtagaccaagcacaaatacagagagatacaaaagggcaatctcaaccttacacgtatataacaaattattacagagatggaatcttagaattcagtgctaatagaattgacgtgaccgatgtaatgattgctttgagattgtttcattctccaacaaactaggggaaacctcataagactaaaatacccctgcataattttatactatgtttcgaattggtgtagcttttctgtctactttgtaaagtaaacatacgagattgaatcctttcaatggcttcactagtcctctagaacaattcaggtccaaggtaacatctctcaccggtcttatcccaatagataggtgttgacatttcctatcgtacaacatctcgtaaggttccataccggtggtactctgataactgctattatataaaaactaaatgcctaataaaggcttgaagtggagatgttaca

SEQ ID NO: 189313 - DNA, 611 bp, Cannabis indica
atatttaaaaataatattgttgttggatttggattggaagagataaggaaaatggtggttagtgaggcatatgattgtctcttgacaagaacacttgcattattcgaccctgccttgggaggcaacctacctctccattccgctggcgcccttgagaaaaccacgtaccatcatatctctacattaaattaatataactataactatatgtgcatatatatatatacagtgctctaattattggaaagaattccagatgaggttttttctttcttaccgagagagagagatttgaatttgtaaacaaacgtatattactattatgttgtaattataccatgattaagtactactatatatagtatcattaatgtttgtctatgattacaaatgagattttcttgttgttgatgattgatcgtcttattatatttgccattaatttctatatattaattgtactaatcctcgttctttaattacattttatattaattaagtttaacttatgtttattattatatatattttaatatttatagatgagtagacaattatgcacgcttaactaatagtttattggcatattttgctaaattatagagtattat

SEQ ID NO: 189314 - DNA, 4247 bp, Cannabis indica
caactgatctactaagacatgcctcatttcttaccaacataacaaacataaacataatagtagacaaagatatttgaaagaaaaaactacagatatctaaacacgatacaaggccacagataagtgaagtaaaaaatatagaaccggctattccatacatgaaacccgaaaaaaaaaaaaaaaaaaaaaaaaaaaaaaaagaaactaaaacagatttgtaacatctaaatattaccaaattaccaagggtggaggtaggccaaacttaacatctaacaaaataaataatcttgtacaagaaggatggatcatgtatggaacgaactacaaaataatgatgtttatatcaacgtacctaacgacggctcaaaaggggatatcttcctacgtagtgacatatctactattttgaacaaagactggcacttcacgaaattcctcaacgctagctgcatatttctctttaagaatccttagttgcagatgagttggcgtctgatgaattatctttctggctcggtgaagccatgcttcctcggagtttcatgtccccgctttgctgctgctgctgctgctgttgctgttgttgctgttgctgctgttgctcttgctgcatatgttgctgctgaagttgatgcagttgatgttgctgaaactgatgctgtggcttctgagaatgaatttggagctgttgaaactgttgtgcagttaaaagagtatgcatagcatgattgttcggataaaactgttgactgcccccaaaagacgagaaattcatcataggtccactgtttggcatcggttggccagtcattactttcaaatgctgaatttcctctttgagtgcatcatttaatgctgtgaaaattaaacagaaaacaatgccaagaatctgtaagagctccattttggataataaaaatgcaagttataacatgttcatgggatgaagaggacgtttgaaaacaccaacacttggcaatagcttcatcttataaagttcaagaatcatccatttgtcaaaacatcacaatatttttctttttccaaaaattaggcatgcagagaataattctacttattttggacaagtaattatcaattttgttggagaaaaaagtatttgattaaaaaactcaacagtatttacccacacaagtatcactgtatacgactagaagtatccttatagttttaaacatcacacagatcaacaaacccagcaaccaaccaagttttatatatcacctctttttttattagaataggggagttggggtgggtgatgcaggagcaagtttcaagggtagaaatttaatcctacaaattgactgacaatttcaacccaccactcatctagtttaagattatggtaacctaatccctctaaatgtcacacaaatcaaccaactaccaactaaccagcatagaaagaacaatatctcaatttacacaaaactgaacatgctatggggatttttttttcccccaaaagtaaataaagaccaaaacacacgatacaagagtacagtattgtaattttttaatagaatttttaaagcttagaaagatttgagcatctactacaacactgagcacaaatcatcaaagtagaaaagcatatattattaactccaaacctattggtttccacttggccaaatagtcgagtttggttagtacacgacgaaggagctcctaacatattttaagaatgattttggtttaacatccatttcatgaagaagataggattgaaaggctatgaatgtaggaaggtcacagttttcttcagatttttctggacccagcataagaggtaactgaaactcaaagaatataaattgtcactattctttcccaagtataggttggcaataattgcccagtccacatcacactttcagtattcatcaggtcagctgctaaaactgaactcgaaacctattttgaacttatgtcctaagaaagtatcataaaatagaaatcatatcctttcctcacctcataagacaaataattataaggaaaggaagcaatcagaaacaggtataactatttagctgagagaaagggagacaaagagccctcaccatcttgcaagtgaacctgctgctccatagtttgcaaccgcaatttcaattcactgttttctgctgtcagaccatttgtatctctctgctcatatggaatccacagaaggaacaccagtcaatcagattcgttatccataaaatttaaaatacgtataagccttttgatagatcaaatcaaggataccaaagtcgctgaaccttagtatttaccagaaaaaagaacaattgtttgctaaacaaaagcaaatttacctgcaagagagtcaattgggcagacaaggaagttgcttctgtttgcagggtctggacttttctttcaagctcagcaatgtaccgcatcttcctttctttagacctagcagctgattgtctatttgcccaaatcctattgcatgacataaaaaggaatgtcaatatgatgtttaaatggaatacaaacaatgtaatgttagttcaacacccttttcaaattcagaaaagaaatggcccaaattgaaattttaacgcagcgcttaaggttaattaaatatcaattggttcatttcccgccataaaaagtacttgaaaaaaagtgtactacaacaaaatattaattttatggtcaaaatcatctgagttacaacctagaagaaagtataacactataacttactgcaaactaaaccgccaaataaacaaaagcaacatgtacagaacaaagccatgcctttttagagccaaagctgccgaccacactaaaaatttaaatttgcagctcaagacagtccctaaaaactttcgtcataaaataaaaaatgaataaaaacaacaatgaaaattgtatatctacctctttgcgcgcttgggatcaataagagctagctctgcaagcttagcagcagatattgctttcttggaatcaactgaagagatatcttctgaacctgaaacaagcatttcaggcttgatagttgtcgatccatccattgactgactatgttggtgtctaactcttggtctctcattagcaccagtggccacctctgcagatgatgttgctacacctgacatcgcagtttgcattggagtggctcccgcagaagagggctcgcccaattgaaaggccgatgtagcagatgaagaattaaacttatccatatcaaggtacatagacagcaagtcttcttcagtctcatcagaaaacgaaggaccatccgcaccaccaactacaccaagatcactatcaaagctgatatcatcgggaagggtcagaatttcagaatgcgctcgtctgtgacccaaattcctcggtgggttatccggcattctactaatatcatggctaaatctacctgaatcagtagccaatccatgcccaaaatgacccgcttctgaactactaccaggggccaaaggagggaacgaagaggtggatggttcgggtttcacattgaaattacttccaccagatgaaaaacctgaataccgacctgacgggggaggcaagccacccccatgaccaggagacttttccttatccatcccagacattaatcctaaaggtttacaaaatcctattgttagaggcttcaaattctggtttccaatccaagaagcgcaaaaacagctacctccaaacaataaggggcaagtctattattctagcaataacaatcaatgctaacgttgaagcttataaaattcttaagcaaaacaaatttagaaccctagaatctcacccaaatgattcagaacctataaaaatgaaaacgaaaatacaatacaatataatatcttacacgacataaaagggcttcagaattcaaatcttcgatagatcgcggaaacgaataaaggagatctaacacagtgcgagaaagaaagaaaaacaacaattacatacagagaatataagtgttaaggagaataactcagctccagataatcaccgaatagctaagcgaagctggaggttggaatagaagggaagtttcggggaaaatatagggattttctaggaaaatgaaacattcttgagcatgggaatgaaatgcaggatggagagaatccaacgggttttctcgcatgaaaagggaattgtttttaatgagagcagcacatggagagagagagagagagagagagagagagagagagagagagagagagaga

SEQ ID NO: 189315 - DNA, 3388 bp, Cannabis indica
aatgaacaagtagatttttctatattattgtcaatttttttaagcatctttctatatcgaaaataatagataaaattactaaaaatgttatgttagatgtggagaagaaaatattaatttttgtacctagttattaaacatttaggttttaagcacctgatggagtaagatttatcttttttctttcttttctttttgcaaaacacaatttaccctaacataattttttttttttgttgattatgttatttgagtgatatatcatcatgtatagactattgtctcattaaaatttctatttttctcacaaaaaaaaaaaaagatttgaaatagtttaataagtcaaatatactctcatactctctcactatatataaaaataaataaataaataaataaacaaaatgtatcaggaaagaatttgtatagttctgagatttttgcataataataataataaatcatgggataaaattctataagaataatagtttgaatggaaaaattctactcattcttagttcaattttgatttttaatttgatatatatgactacttacgatccatgttgttttaatttgcaatttcttttttttttttttttaacaaatataactttatttacacatcattattgagttgtgaaattattctaaacaacaatgggagacacatgtgtagatagtagatattgtttcttaagctcatgtattaattttgaacattaggtgagagtgagaccaacatttctatcatgaatcatgatcacaaatattatatttatttctatgctatacaacctggaatccaaattgaatattgttattcatatatactaagaataaatttaaaaagcaaacaaacaaaattaacataatatttgaaccttaaacctttaatctagttcttccaaataaattttgcctttttattctttttgagtcctaacacaactaaaaaaaaagtttagctacactaatattactcgagactagattaaatgtttaagttgcaaacattatcttaattttattgaggaaagaaaaatatataataaaaaaaaattggtaaggaaaaaaataattcaacaaaaaatttaataccaaatacgaaaaattattttggtgattggagaaatactatgtgtgtgtgagttttatttgcatcccaaaactatagggcaatatttaaaaaaaccttaaattaattttaaaaatcattactaatatttttctaaaaattttatttttcacattatttttcattaaaatcaataattattttagttttatctttaaattttctttcaaaattatgcataatttttaataattctttttatattttttatcttgatatttaaaatatatatttttttattctacatttatatatattaaaatatttttttaagaatatgagaaagaaaacaaatgtaaaaaaaaaaatagcataaattataactatatattttatataaaataaaacctattaaaatagcctccacataaaaatcctctaattgaaatctaataaaagaaaaataatttgttttcatacatatctttagttacttttcttttttcaacaaaatctaacttccaaaatttaaattattcaaaagaacctcccacaacaaaaaaaaaaaaataataatatgaaccgtaatttttttttttttaatcaacagctacataaaaatcaatcctatacaaataatttaaaaaaacaattttttagatattatttgtagctcaaccctttcttctaattctcccaaacaaatgctgcatttttatacatttgagtcccaatagtaggactaatgaaaaacttcctactatcttaaggccttgacttgactccaaagagagcttgtttgaatccaatcccttgaattgggatgcaaaatgaatgaagggaagtgagaagtgggaaacaaggttgccaaaatttctgcaagtaaccacttttcattgaaagcttgggatgtctttcttcattttcttctgttctcttctgtgttttgttggtcttcggtactcgaggctgacgggtgcagaccagattccgtgctaggcaaactgtactcgctagtaacttgttcttggctctgtagtgccaattttttgaatttttccatgtcttctttgtattgatgagacttgtaatcttgacttccataggaactgtagatcgtgctatcaccgggcttaactccttcatccagttcatccagagatatatgtccttccaaagctcgaagtatctataatgacagtgaataagttgggaaaagaaaccaacatttagaaggagaactttgacatcatcactaaatatttttataaacattaagagcaaaaaagttgaaaagattcccaaacaagtaaatgcagttgaaaatttgaaagataccagactcattcgtggccgaagtcgggcagaatgacgaacacaagcagatgcacaagcaaccattcgagtcatttcatccgggttgtaatcattctgcaacttagggtcaacaagaccatcaaagttgccattttcaagtgcttgcactagcaaaggccttgcctatattcaaaaacagttccgctattaattcagcttattttaataagctttggaatgaaaaaattctacagttaaaggaaaagaaaaaactggttccttatctaagttcaggggctaaccaataatagggtcaaaatttgcacaagttgaaatttttaaggtaaggtgatttttcctaaacaacttgtagattacgaattatcaaaactactttcagacaaacaaattatagttctatcccacaaaaaagttgaacctttcatgctataacatctgcgaattgcagtactcacccactcaaccatgctatcatttgtaaagttatgaaatttatcgataggatggtgtccagtaatcaactccaaaagcacaaccccaaaagagaagacatccgacttatctgtaagctttccactagatgcatattctggagccaagtatctgcaattgataatccaagattctaaggtcattacaataaactattatacttccttgcagtactaaactcacgtataaaattatatgcatgtacatatataagagattcctacccaaaagttcccatgaccctggtagagacgtgagtatcagtatctagagaagacttagctagaccaaaatctgcaacctgaacaaaataatcaagagcatatatatatttatcatcatagaagtcaaatttacaagtccttgtaaaaaagctaaagaatacttggtggttcgaatttagaaattagaaacttctgtctaataaattattatgactgcgctcaatcagtttagttaaatattatcatgctacct

SEQ ID NO: 189316 - DNA, 1325 bp, Cannabis indica
ctttttttatatggtttgttgcaggttctcgccgatacatcttcatcgtcgtcgtatttcgcttgatttttacattgtatttgtttgtagtgagagaatagaaagtttattataaaacattgattgagattgatagaaagaaataatgtattggaattattcttatgatcagagtttataaaaatgagctttatttacactttccatcattattatttgctaccattagaaatttattttcctaggaaaaggatttctctccctttttctttatttgtttgttaaaaactaaactattggatgcattaagtcatcagaaggtaaatcccataagacactgtctgtgttaaataaaatggcatcatttcttatttctttccctgtcctcgagtcgtctccattttcttcgagtttgtcaggtaagcggctttgcctatctccaaccatgcacgtgcttcccgtacagatactctggttccatggcgatccatctctttcattgctaaaagaagatggttcgtactgaaacccagagtaagggaacgcactactacaattgcctgaaaaactcgagaaagttggtccagttgttgctgagtcccaaagcttgttcgggggcaacatatcgggttcttggatggatcttgagagaccaaatttgatcttttcaatggcttcgtcgtcttgatgctcttcttgcttactattcatgtaggtggttgttgcattccctatcgaagcatttgattgttgcagttgaaaatcgattctcctctttgtaaggaggtgaagcatttcatctttgaagcaaccgagcgctgcttctgcaagatgagccacttgtgggggttccaatgttgtggctatctctgccatgagatgggaaaatggtttgtgagtgactggatctattcccataccagaaagcttctttttcagctttgtgttccaatgatttttcacatcattgtctgttcgcccgggcagttgggctgcaattattgaccatctgtaatatggtcaatttgggatgagttaagctatgaggtgaaatggtatgatatgatatgatatggtcatccaattgcaagttgattgtacctgttgccaacaatggagtgaagcttgacaatggtttgctcttctgcatcggagaactgaccgtgctttagatccggtcggaggtagttggtccaccgcagcctgcaactcttcccacatctttgtagaccttcattaaaagaacacaaagattagtatgtataagaaattaagaagcaaaaacaagaactaaggaggaaaaaaacgagcacaaaccggcattc

SEQ ID NO: 189317 - DNA, 1540 bp, Cannabis indica
agagaatttgaacttctgtgattggtttttttggccctattgatgttatcttttatacttttgtagtttatgagaatctgtatgcatcacgcttattaagaatttttttgaaaaaaaaaaaaagcacacatgatgaaaatgattggatatttctaatctcttaaaaggagtccaccaatacatttgatttggtattcgagagaattttttagtttaattttttatatgattgtttatagttatttaagatatctagcaaaattttgagagatttgaaaaaatttaacatgttgaaaacagtgttcgaataaagagtggtcatagaattgttttgtgtccaccaagtaaaaaattaaatttaaaaagaaaggcaggttctttgtgtagtacatagggatcttaaacgtgaattgattatatggtccatatgaaatgaataacaatgtaaatatatattggaaagtgaattgttcttgtaggtctacaaaagaatataacttctctttttgttgagaaaaagaatatatgtctataaataaacttaggaataatcctagatgggtcacccttttcaatggaaattctcttcattaagccttgttgttacttattattagcctttcaatatgaaaaacttgcttctatcatttgagtgaggagattatagctttcactatgtgtattgtgtcccctgcaaaattccaaataagaaaggaattgcttcttaatgaggccaactctatcaaaacataaaagaaatactaaacccaaaaagaaaaaattacctaactgcagggatttgtatatgcataattgtatatatagggactttggttgttcttattacttccctccttttctacttcaatttagaaagctaaaaaaaaggacttgaagaaaacatgtatatagcaaaagttgaagctttcctttgtgtctttttcacttttatttcatcctactatagcacttttactattataaacaattgtccttttacaatatggcctggtacattagctggttcaggtacaccccaattgctaacaaccggttttcgacttgactctggccaaaccattagaattccttcaattcccggatggtcagggagaatatggggaagaactggctgcacatttgatgcaacaggagctggaaaatgccaaaccggtgattgtggtggcacgcttgaatgtgaaggcagaggtgcaaatccacctacatctctctttgagataacacttggtcatggcgatgataaagatttctatgatgttagcattgtcgacggctacaatcttcccattgttgcctctccagtgggagctttcggtgtctgtaatgccactggatgcgcttctgatatcaatactggtaaagggttttcataacttgactaactaactcttcttattcatcaaggtcgttctagctaaagaaaattgagcctgcacttaggtcccatctagtctaagggttcagaaataagtattttcattttaaaactataagtagtaaagtttttagtagtttttat

SEQ ID NO: 189318 - DNA, 1310 bp, Cannabis indica
tttttcttaaaaaaaaaaaattagataatgatcattctaaaaaaaataaacataattatgaatccaagaaaatttaggctacaataagattaagagagaaaatgatccatcttctgttaatattctcagcgttgggggttacacccaaaaagttaatcaattttgcctattttttcttaaacccctacccacataaataataataacaaatttactcgtggaaaaagtattattctttcttgaagtgaaaggagaaagcaataaagaaaatcatgtacttacaatttacaagtttccttaacaaatgaataatcagattgtaataaatcaaagcaacatcaaaagcgaatattacattgctttagattattatggattcttgaagctaaatatatgtgtagtaaaaataatcattacagctaaacactgtaataattcttacataagatatcacaacaattagtacaatttttactgcagttagttatataggatttctttaacttttattgtgtgggtgtgaccctatatcaagccccacaaaataacactcttatttaaattaaagcattgttattaggtatcagtagtccttaatacattctgcgctttacaattggttagtaatatttcataaaaattattttctcaaattatatgagattcgatacttaattatatcaccgaaaattatactagacaccaataatatttttttaataattatctttaaattaagaagaattaagctataatcgcaatttgagaaatagattgcatataaaataaaagaattgctaaaatgtactattggtgttagcaccttgtctattgtcatgccgtttattggtgtaattgaatattaggtcctatataacttaaaaaaaaaaaaacttttaagaaatatcgttaacaaatcatgaggcaccacctataaaagatactgaaattagtacccaataacaatgctcataaaataatttgataagaatgttcttaaatcttaatgacattaatttagaatgtaaggtataattgactttattaattatattactctagtacgatattagtactataataagttggcacaaattaaaatacaatttaacaaaaacttttgttgatttctattacaatattattgtgtggcagtcgtttcacaaaacaaagtcaatatatatcataaaagtacacaagcatgctgtttcgaatacattaatttttttaaaaaactgtacattaattaatttgaagtgagctcttacataaatttgaagtggctttaaactgccctggctgcaaggtcc

SEQ ID NO: 189319 - DNA, 1211 bp, Cannabis indica
acgaatagtcacctcttattgcaacatgcatatcctatcctacattaagcaaaaattctaacaagtaccattgctgaaagggtttgaagcccagccgaacgtaaacattgctccctctcatccttccccacttcttgagctaaaagacaaagcttaggaatcatgccatctaagttgaacatataagtaccatccctctacacaacacaaaaacaacatttactcaaaaagaacattcagaatgaacaatacaagctcaaaaagaaagaacataatgacaactaatcccacctggttattcacaaattcaaaaagtgtgttgcatcctaaaatacgtaggtcgtcatgtagtgtttgatcaagtaaaatatgtacaataccaagcaagctacttgcgaacaatgatctgccacaatgtaataactaatattttataagaaatgaataattaatacatagacaaactaacaccactcctcaactcattcctcttttttcaattctaagttattcaaatggtgaaagagaaaaacactattcgtatgtactcacattatactataaaataaaagaactcacatttgctccttacaaaaatacaacaacttcctgtagatacacatgaccacttttactgaatgaaattgttcatttctcaaatccctgtaacacctttgctcaagagaagttgtgatctgaaagttcaaatatttaatcaaattaactaaatccatcaataacccatataataacttacaaccttttcttaaattgctcttttaagtacctttggaatacgaagaggattttttgaggcatattcacatagtttcccaatcttacggtcattgggttcttcatcctgcaaatatttttggcaattatataagtaaaaatatacaggagaatttggcaaaataaacattttcccaatattattttgtaaaaaataagcattctttaaataattatttacaatgacaagaactataactatgggttctatctcaaaaccaagtgactttgcactatgaagattctgtgcaagcattactatctagataagtgtagatcgaggatatggctcttcataccacaatgagaatcgtagagtagtccgtgttcttatatgggataatgttttccaatatacaacataacattcctaaaacactacacacactacaaaagtataccctaaaccttatcaa

SEQ ID NO: 189320 - DNA, 3619 bp, Cannabis indica
agatgcatgctattcaaaataaactcattttcaagggcttctgctcccagatcagatgatgcaagaggcaatgaaagattcagtagggtgagcactggtttaggcataacctgaaaaaggagcaaagttatgactgctaaaatcttgaaggaaaacaaaagcaaaaaggttaatattatccttacctgtggaaatagttcgggactcttggaagctatacagaatagtttgcttgcattcaacccaaccacccaatagttttcatcagacttcttttctttactagcactgcatcatacatattaatcattacaaacttctgaaaggaatcattccaattattttaataagaataacagttcattacataataacgaacctgaagagtggcaaccaactgcctccaaattggcttgagaaaactcttagcacaccctagaaatttcagatatctcagttccaaattgctaggcgaaattacaagaactaaaattatgtcagccagaagcattacaatacctttgagtcgtaggagctcaactgcccttcatcactaaacccaaaccatgctagatgcgaaccaggagttagtggcaagtgccctttaagtggctgagtcccgttagatatgttaaatactttaaactgaagcacctgcaggaataagagtaataaagttaaatttctaatagcataaagtaaaacataaacatggagaggcatgcttgttaggcaacaaagtacaatgacttttctctattggataagggtggatgagttgtttagtgaaacagtgggtagttaaaggatttattttgagttagttgactgagtaaatatatcccagcaactactctcgtaagggcatcaaattattttgtgtattgtgagaaaacactcttgtggagataccaaactatctcaaaaagattggaaggtttgtgtgttgacattccagattgaattctttctagaatgtatcaataatgtcaagtcaaattgtgcctcgtgctaggggctcacagtaacagcttataaagtaccctttaataggttgaccgttccagccaatatgatgttgaatatgtcttacactagagcttgtaaatgaactattttcaagtactacttattaatagttcaaaaaagacctgctcatttgtaggtagacactcagcagcatgagtaacaactgcaatttcatcctcaaagcctgatgcagtgacaacaggtccatctaggcacaggatatgcttctgcaaaaaaatccccattacaatttacaagataaacaaagcttaaatagaaatatgaaaaaattcacatgttctgcaggtctctctctgcctacgaaaaaataaaaaaagactagggataccttcaaaccaccctctgtctctcaagtaaataatagtcatgtcaaatcagcaaatatatataatatatatattagcaagtcagcaataacacatgttagagaagaaagactgtatgataaacctgcaaaccaccctctgtgaagatgcgaagaaaattcagacttgtaactgcagctacccatgatgaaccgagagccacaaccttcacttcttccccttccaaacgcatagaccactgaggatacattattcagcaaaaatcagaatataaagattccacattcatcatacacagaaaaattgcacaagtatgcagtgattttacattcacgtctcattttttattttagtgacaagaaaaacatgaataaacaggcaagtgctctaacctcactgttattcgcccagctgctaaatgggcgatacattagagtactcatgtttttctcacccttgcaaggatttgcaaacacacttcccttctcatttaatgaagccattgtaaaaccaaaatgatcattcatcgagggaacccgtggacctctgctagtatcatggaaatctatctgcattaaagatacattacatcaatagtagtgacatagagaccattatacacttacaaaatccagaattataatgttctacatagatctgcaaatagtttcagaaggttataaatgtatattacctctatatgggagtatccatcatgttccattgttgttatacttcctagcatgttgtaacacaaaaatcgcctttttccaggctgcataggagtagaacctggctgaaaggcctcctgcattttgaacctagaagatattactttgcttttaagtccctcgtttgcatcttctttgctagctttatgcatatggtgtgtttttttatgagatttaactttaagaggcaaactcaactcctcaaagccatcctcctctagatcattctcaaatgtagactgcttccttagtcttttcctgctagtgggctcagattcaccaaggcaatcttcaccaagatcacttagactacccgaggcactaggctcttgatcctcttcctcaaagaaaagaagcccattactattcttcaaatgtaaattcggaatatcttcagtgggagatttcatagatgacggaacaacagattcccacacaccatactttcccataacatcaataacaaccagtgcattgcccgttggcttccaagccaaacaacaaattctctcttcaaatttctgcctatcaatatcctgctttctatcgacatcccaaatcagaacctgcttatctaaaccagcagtagccatgtatttaccatttggtgaccaagccaagaagcaaataggttgtgtatgatcgcctcttagacaaaatagcttctcagctgtgtctctatcatacagtaccacatcatttctcaaccctggaacagctaatgtttccccatcaggactccagccaattacattcatgacagaagggtctagaccaaggtcaggagcaatgcctttaagagtgtgaatggtacttccagactgaagttcccagtatatgagggtgccagtagagtcaatagaagctaagtattcgctattggggtcaaaacctaagccagttataggtcctttatgccctttgagaactctagcaatagaaccatcgactgtgttgataagcttaattccttcgtcatcaccagcagcagccaacatggttcctgatttattaaatgccagaacccttattggcagggtgaatcgggttatgttagtctcaaactccccacctgttcatgatcaaatttgaaaaaaataagactaaaaattttaagtaaattataaataacagtagctcaaccatagtctaatcagaaaagtcggagactcagaacgcgcgatagtaaagagggtaatattaaacaacaatccgatacaacaacagcaacatacattatatatatacatatatatttggcaagaccttttttcttctttttctttttctttttttgtaatttttatgtgtaagtagctaattctaaaaatataattggaagagtgcgaagccacaaatcgaacaaagtaacttcaacaatccggactcaaaactccattattatcaaaaaaaaaaaaccataaaaagattatatcagaggaacagtaataaccaggaaacttgtagagcttgacggaatgatcaaccgagccggaagcgaggcaggtggag

SEQ ID NO: 189321 - DNA, 2101 bp, Cannabis indica
agagagagagagagattgctgaaagtgaagagtggaattgtggaggaaaatggaaaagagacatcggaagaaggaaatgactggttttcatttttttgaaagcttaagacgttatgtctacgtggcaaggatattatccaaaaatttaatttaatttaaagtaaattaattttttttttggcataaattaataaatattttggtacatttgacttgaagagaagaatttttatgaaaaaataaattagatattaaaagcatattcttttcttatattaaaattaaagagaaagcactaaaattaaattaaaatttaaatatggcgaaaaatagagctggaatcagaagattgtttggtagtcgtccaagctattcgaaatttattatctatgttttcttcgtttaaaattattatagaaaattattgtaaacttcttgtatctttaaataatatttttttattttttattaaacgatctgctaatatggttgttcatagagttataattttgctggaacatcttattcttttctagattgagcgttcaagaatcatattcatgttaaggtacagccttatcttttgattgatttggtaaattaataaaaaaattatatttataatttgcttaaaaaaaagttaaaaatatatatgcttcaaattgatggaaattttggaattttattttggaaaatgactttcacgtcaccaaatattaaaaatgattgagtttcaaaattcctaatttcctcaaaatttatgaataattttatgaaaatgaataaaaaatagtacttgcataagaaattcatcaatctctctcattgaaagtcaaaaaataaaaattaatataaacaaaaaaaaaggtttgtgtcttgtgacaaaccaaccatttatatagcatttttttaacaacaaaaaaattggaaaacaattaaataatagttatatggaaataatatgacaccaacctattcttattttctaacttgtattttcctatatgtatgaaatttctataaagaattccatgttaaaatctaatgtagtctaatattgacaattgagaaatgttcaccattttattctttggcttaacatccattaaaatgaaagaaaattttctctaccacaaatctttgacaatttgaaacacatttttcttctgttgacttggacatgtgtggacaagattcattccaatctcacacacacagatatatacatatttcaactttaaaacccctatatgtaattatatatataagtaaatagaacataaaaatacagtaaaatttattccatgattaatctttattatgaacaagagcaaacttaaacttcaaatgacatataaagaactcagagagaagaatctgagtttgcaggaacaaaacttagagaaacactattcacgcaatggcgttcattcgttggagttgggaaaccttctcctttaaaaacatgaccgagatgaccaccacaagctgcacaagtaatttcgatcctcattccatctgcatccatctgataacatgaaaaactatattagaaacgctatgttatataggtcgaaaggaaagaagagcgattggagaacttacagttcggtttatggctccaggaagaccctcatagaaagctggccagccacagccagaattgaacttggttttggatttgtaaagtggagtaccgcagcctgcacatttatagactccctcctcgtagaacttgtcatattcacctgttccggggtatctagaatatgatgatttagaacaaacactcattagtttacacttcaaaggactacataagtgtcatttgattgcaaatataatcccaatgacaatgtcataagtgtcatagaatgtaaagttgaataaattttaagaagcttaatcgaaaactgaggtgttttgcaatagctcggcttatgcctcgaggcaaaccaattagagcaaaaacttcataacatcataagattcataaaatttatagggatacacataattgcataactacaaatcaataaaatttaatgagattactagttctaagtcataaaaccataaactaaaagtttgtaataaaaat

SEQ ID NO: 189322 - DNA, 2449 bp, Cannabis indica
aatagcaaaagttagtatataatataaatttcccaattataaactttagactcgaatacaaggttctttgcccaaatgaatgacgggcttcaaataatatcttcggcccattttataatataccgattttttgaaagccaacaattcaattttggtattaataaaagaggcaataaaattttcttgattttgtaaaaagatgcgaaattaacatatgattgtatgcattttttatttattctagatgaaaaagaaattcaagaaaatttatacattgccaatttatatgtgtttatcaataattattttaaaaatacaacatgatttctaactaccaaagatatacatatttataatttagtttgcatttcattattagaaaacacaccaatagaccatcgttctttaatactgtatattaacattaatatataacagaacttatatatgtatattttaactgaaaatattgaaacctaactacgtacaagttacaagttttcatcatatatattacgacacacggaaagtacctcaaattttgatatatattatttgtcagtgaacaagtaaaactgtacataaattaaatctatataacatgcatatatactttacttaatatgtatagatatcttgagacgtactggctttagttcaacgaaccaacaattttatttaagacaaacaatttcagaatatattaatctaattgcatgcataaaattaagggctgtatatataccatagtttgatgaattttttcttcataggtttgcatgcgaaacaaaggagtatgtctctgtactttataaatgaatagtggtatttctagctaatttataataattaattatatagtagtggatatttgtatattaagcaccactacttatatagcaattattaaacaaaaataatacagatcgatcacagatagttttgggcctaataataacatcctattataaatatatagatgcgcgcgcgggtagttaaagaaacatataaattcaacaaagaaataattaatatatatggtgcatgctaaatgagagtgaactttccattagattgattttgcatgtgttgactttccaaaaaagtacatcatttgattgatattaacctaaaaactatatcctactatattattatacgccaggccactactataacggcgtttacatatcgatcggtacatatatatatgtgtgtgtggcttctaattaagattcaagcagtctcttgctttttattacccaaaaaaatatagcaccatccatcatattacttggagcggcatgcagcctgaccatgtccaacttgtcttttcatctgaataattaatatttaagtaattaaataaaagtaattataagaaaattaatgaaaatataaatcaatcggtaataatgcatgcgcgcttaattattattctcacctgaaaaaatgtttcaaagcttctttttcaacagagcatactctctcttcagctgttgaaatgtcctgatgcatctgcattataatgtgatattaataacgcacactaatattaattcgcaagagttaacatcttaatttgcatatatagagaattcatattaataaatttaccaacctttttcctgttacttttttttggatatttatatatatatatagatgtagagtttgataggaaatatttaaagtgcatataaataataattgtataaaacactcaaattacacacattttttacacgtctttatatatatacacccattacaatattttacttttattattttatttttctcctttttctctctatataaaattactctgtactatatatcctttttgagagaatatatagtataactctcttgaaaacttgtactatatatagtacttgacttataatgttcaagccggcccccaaaaccccgaagtgttaatgttaactctagctaggctatttattacgtatatttaaataattataaaaatataatatattctcttccatatatatatatgctgtgaagatgaaaagaatgaagtgaagtggagtggagtactggaggattacccttctccatttgctgtcctacaatattccctaaactgagtgcactctgctttaacctttttggctccaatgctgcaatgcaataaaccaataaaaaattaaagacctggtttctgattaaagcttgtcgtttaaaatcaccaccgaatatactaattaaccatatatatatttaaataataacataaacaaattaattaattaattaattaattaccttgtgctacttcccttcagttggtgcatatagttgtctaacttattgaaatccagaggacttttctctctgtatccataattaataaatgatgacatcaaacataaatcttttaatttagattattaatgatgaatatatttatatataatag

SEQ ID NO: 189323 - DNA, 761 bp, Cannabis indica
gtatgatgtttacctatattactctaaaatgagattgaatttcacattaggaggaagaaaaaaatagcatatctcatctgccagttaattaatgtataagtatggttaaaaaaggttggtagtttttaaagagtatgtaaatactctggagagacaaatagagatgtttcaagtactttaggtttgttctttaaatattatatatgaattttaccaacgatagaaagtactgtagagatacagatgattttttttttattttaattatggtggttttatactttgtaatttagttgcaaaaccttgtccaatacatcatgaacaatgaatgcagcactaatgggaatgactactcttgttgaattagatatggaggaaagaggggaccccaaaaaaactcccttaaaaaagctactacagaaaagaccagtttggtatttaatgtgtggaggggtcagaaccacattgctgtgtcaaaagaagaaaaataagttgttgagaggtatgaattattggaccacaaatatgagctggtctactctcaagttatgagcacgcctttcagttcaaaactgacccattattatttcaatactctcaataattaagagaaaaacatagagagaaatagagaggacccatatagttattcaatataactaaggaaaaattatggtgtctaagtatgtttgagcctaatgtttaatcaccttcaagtttgacccacaagcaattacatcaatcacaatgaaagtttctat

SEQ ID NO: 189324 - DNA, 1385 bp, Cannabis indica
tcatctaatatgcaggccagtagttctcaagatccatgcaatgatctacgttcatatatgatctattgttgttagcagctccattgttgggtacgttgttcatctctgaaccataaccattattgtgatcatgatggccaaaagagccactgttactactcattatgttgtgttgattcaaattcatcatttgtgcctgatgtggtggcgcctgttgaggtggccggtcccccgacgattcaaattgaggccagaaattgtgaggcatcctcctcctcctcctcctcctcctccctcccccggggaggatgggaacggggtagttgtattgagaaggaaggatgttcaaggggttcgttgatccacttgttgtacctcgaagaaccctagagagctcggctagttcgtgagggttattagtgatgttgttgcaattgtttctcgcaaagaggaagtggccggtgggatctccaggcagctgcatcattggtgatgaatattgaagcatagtttgagtttgatcaattagggcataagggttcatcgttcttgtttgagttgatgtcgtcgggtactttttggcacccgcgctcttttggaacacacgacaaactacccattcgtcctgttaattgattaacacattaattataaaatatgcgaaaaaacatgttgtagctagagacatcacttttgttcttacctataaggacgtttttatttttaacgtttaaagaaattattcaaacacaagggcacaagacatcactttgtttatgaacatacacaatattataaactttgatttttctcttacacaataatatgttaatcatcaaacactaaaataataatttcagaccaaaaacacttacatactaattagtcacacacaaataatgcaattttctttatctttaattccttcccccaaagaaaatttacttgatttttgtttcctaaatttttactgtatttctcattttgaaattggccaaaagtgtattaattaattaagaaatactatatatataaatatatatacatagatattaccttggcgtatatgatataaacactacaaaaaactgctacttttagtgacaactttttagtcaaacataatttcttcgtgactaaatgtgacttttagtcacaaaaaaatattacttgtgactaaaacatagtatttagttacaagttatcactaatttagttttagtcacaacaaatattgtgactaaaaatacatttagtcacaacaaattgtaattttttgtgactaatactttttaaaccacaaacctttttagtcacaacataaaaaatcatgatttataattagtcacaattttttcacttttagtcacaagttttattatgac

SEQ ID NO: 189325 - DNA, 3333 bp, Cannabis indica
ttgtgaccattaaatgagaatggtaatggtttcatactttcatattattggttttactttttgagatttagaatctattatgtatgggtcaaagaggttcttgtaatcctatctataatctatccccacatcactattattttattcacttgatcaataagacaacaacaatacaagccttgctaaactgtattttctcattatgtgcaataatacaatcacatataccaatcatttttttattcaaatgaatgattaatttaggatgtaatacaattcaggttatgatagggaataaaatgaatataaaaaaaaaaaacaatttccctagagaaaagaaatagacatgtataaatggtttataaagcacttgaacccataacatcatattatagtctaattagttaattcaagtatagatgtatatataaaccaaaatcaagtttgagaaagaatcataactaaaaaaaattatgcctataatttatttaagtaattaagagtcttaagacactggattctccaagtggcctaataatagtaagcaatgagtttctgagatttttttttttcattaacatacagaatcatttcgggtttcagaaacgctacttcgtgtttttcttgccttagaatcatcaagatagttctggtaaatgtaagaggagaaaccccatatcgccataagcatagcaactatcttaacgccattcatcgagtcatgaaaaattatcacagaagcaattggggtgacagccaaagagagagtgctaataacattggagaagagagaagataccacaaatatcagtccaacgacaccaaccgagcaaacttgccaagccacagctatccaaaccaaagtattcacataagcaaatcctcctttaccaaaaccctgcatttctccatgcaaagtcttccactccccgctcgcgaaaagaccaacgagagcagcacaagtggctaccaatgatgtatagatttgcatttccagtactacagagaaggtttcccgttttagaactttttggaatgagagttgcattagagaaagtaaaagagagtatattgcagaagctgccagtgtgcaaatgaaaccgatgatgtactttgacctcgaaactcctgctggtccaccagagtcgtcattgacagcaatgagggctgcagatagtgataggacaaccacggaattaagaatcaaggcagtgaatttctgagaattgatgaagtacgagaaaacagcgttgaaagctaattgggttgcacaaatgagggagtaagtagaggctgagagatataagagtccaatggaatataacatattgtcaccagctataagaattccaagcaagaagtaaatagaggcaagtactttaatagaaggtgcagtaaaagtggatgaaggatatcgagaagaagaagaaagaagaaaaagcgggataaagaggagtgggaaggctgcagtttggactaaagtagccaaccatttactattaccaccttggtcataataaaatcgaccaagtaaaacagcagctgcctgaccaaccagaaggaatgctatgttgatcgctaccaaaaaccaccattgccagcgcttaagtttagcaaattgtaactgtggcggtgaaggttcatctttggatatgattggctcttgattatctgcattgaacacaatatttataaacatttgaatcactgtactcatctattcaataaataatttcaaagaagtttgcactcagaaatacattcatgtcagagccatgtgttaagaaaagaaaagaagttgtatttttgctttcatcttatttaggaacatcgaataggatatgctacggtaggagttagcacacctccgaaaatgggctacaatgcacaggctgttaatgcaaatgtaaaaaccattcacaaccgaaaatctcgaaagagaaagatattaagtttattatttagaattaagtaataacccgtcccttcaagctacaattcaggtttaaattgtcttctactaagttccatagccacatgaacataaacatttgacaaaggcaaagggctttactaacatagtggtgagcatttaaagttgaggtttagtaacaatatcaatacaagcccaaaaaaatacagctatgaaagaaaaacaatgcctaagacacaaaatagtacatacaacaaacttttttttttggcagttatgcaaacaaatttcctcttgttacatttaaaacacttatagaattcagtgatttgttgttacaagaaaaaggaataaatgacaaagatgcataaggcttataatcaatattgtttttcagataactacagaaacagaagatctaattgctttcacaattgcataaatttttttacttctttcaagttctaaccacaaaagctatcagacctccaaatcacaaatttgaatctaagatagatgtactgagcataaatcgcagacttgtttttcttcttttcaaaatcgatcgaggtgtacacctcgaggtgaggcggttcaaaaccgaatctgaggctacgcctctgctattgccattgacaatttgacattgaggcatacgcctcacattgatgaggcacacacctcagcttaattgtgtgttaagctgtgttttattgtcggcttacttgggctttttcttaactgtttttcaggggtgtttttaggcttttaaatgacttaatgtgctttggttaggacctatttttattagatttttgcaaataaaataggcaagacaaaatgaaactctaaaaacactttttctctctcttcttttctcaccgcgacaacacctcttcccatttccccctcactctcaaaaatcacaaaatcctcatgtgaatttggacgagaaatatgaaattaaaggaggagaaaatgacagtgatgatggatgaagatgatggtcgagctatacaatttgattactcttcagaaagtctcaaccatagtcataatgatcatgaaaatgatgacttcttggagatttactgaatttagtttatgtttctaagacttataactagtaattttatgactctatgttgtttatgattttttactattattattgttgagccataagccttggtgagcctttcaaaacattgagattgtttaaacatgaattcatctacatgcttaacgaaaaccaagaaacagaatgtatgaaaattgtcctccaaaactaataaaatcaaaatataaacgtaaaactgatttctcttaattcaatcaagatatttcaaattcatcaaaacagctaaaagttcaacatcatttacaaaaaaagaaaaaaa

SEQ ID NO: 189326 - DNA, 2463 bp, Cannabis indica
gtacttcttttatttatatatatatatatacgtgtgtagaaatagtactattgaaacaccgtctttttatattagtaaactattacttaattttcaaaatttttgtaagacgtctcaaataatattataacgtatgtgattatgggaaaaaaaaaatagactaaaaattaagttatcttaatgccaaaataagtaggagtactgcatcagtatatctgttttaagggatatattgtaaaatcactcataactattttgttgagtctattatatcttatttgtaagtgctctaagcttacctaaatgctaatactattaataaaaaataatttatctctaaattattatttttttctaaaaatcattgttggacatgaaaataaagcacgggaactttcaatgtaattttcaagatcttgataaagtatatatataatttggttctacagaccatcgtaattggattaataaaaagtggttaacgagtgccgtcatcactagatataacatatagttcgatctcaacaatataggtatatctgaaagtgtggaaaaggaagatcacatttcaccataaaatttctaagtttacacacgattaatcttttcaataaagtatatttagtcacatttctaattgagtttatatcgaatcgatcattgtcttggaaaattaatttgaagttgtaaacatcatttgaaatcaattccgaatgcaatatataaatagtactactccaaaattctaactataacttaaatactatatatactataactttaatactatatatgatatatatccattaaaatattggagtacaaaaagagatttaaattttaaaaaaaaaaagattaaaagataaataacacagtttttacatttggttcaaacattaactagtcttaatttacagtatcataagcttaatttttagtaatggaattttacagttcaaatgagtatctctttatggtaatgaattttccaaaccttttacttagaaggtctagtgcaatatttataggcagttgtacttaatgggacgcctttttactagaaggagctggcctttttattattagtagaatgccagtttttgggcagtcccctctccctctcccgatctctttggagcctttggctatgagaggtgggttcaattggggcgtttgtttaaaaaaaaaagactagtttttatattggcattatcattcatgcatgcgcacactataattaaatcccataatgaaattaaatcatgcgaattaacctccacaattaataagaaaagagatatgttaaatattatatttaatttaatagttattataaaatatagctaatcatttaaactgatgctattttaaaataatattaattactactcatgtctaataataatgatttcttaaaaaaatatatattttaaggtttactttgctctcaattgatcgtgtaatttcaactctccctctctcccaattgctgaacagtcagctagtggtttatcatgaccttttaacagtcgcagcactttcatgtgaagtggaaacaaagtgtttccatgtttttcatgcaatggtggactttactaattagttttcttttctatgattaataatattttaattagaaggtagtttaattatattattctaagataaccttttaaaaaaaaaaaaaaaaacgcccgaagggctaataataacaatataatcaatcggtaaagctaatattttgggatgacaagcaatatacgcattgtagcacattaattaaccaatattggagaatttatgaaggcatgggaatattataaatattaaaaattttaagaaaataacaaaaatataacatttctctaataattattttttgagggtaatcatcatactttagagaaaaaatgatatatgaaaggaaaaagaaaatagattccttctatcctttaaactatcctttaaaacttactgtttatcttaaggacatcttaaattaattaataaaccacaacattaatattgccagttacataaaaaaagatgtactttaaaaagctacagaataaaactttattatgagatgtgtttctgtccaccaacatatctacctgaaaaaaaaatagattaaaatcaaattaagtaaaataattaaaaaaaattataataaaacttatttttataaaatctttgtgttttagagaatgagtgagcgaaataaaacacacttatttgaaataactatataaagttagttaacctatttcttaatatagtactattaaaaatgagaaaatttatttagatgttataaaaaataatccacaatctaaatttatgaacgatgtcactgctacgccatgttacttttaagataaattaaaacaaactattatataatatatatatgataccaaataattatgttaaattaaatttaccaagtataaataatgataa

SEQ ID NO: 189327 - DNA, 3681 bp, Cannabis indica
gttttttgtggtcatttgtcaacccaagtttgggctttcgctaggattgttttgttacttttgatctgatacgtgtagggttgtttgggtgacttggttggtctactgaattgggggttttttatgctttggcaggtatgtcaattgcttttcttttttctacgttttttttgagaagggggtagtttggagttaatttgatggagttgcatttgaaacattcttggagatcggtgatttatattggaattttctttattttgctttgtgctgatgaaatttgaggctttgttcaagttgtcaaatgtgaggtagatattgatgctaaggagttggttgcaatagcttttttatggaatggacacacgattaaagtactgtttttgaaggcatgttcttcacctgttaatgcaatgtagaatgtactatcaaatgagagaggtcaagcttgatattcgcaaggtcactggaacctgtagtggccatttcttaaagaaacattattagctcgcgtcacttaactggcttagaaagaagtacaatggttgactcgattcatctccaaaaaggatcttcaaaataggaaattcataatgaatctctctaattgtctattgtccttttgttttatttagttttgtttttcttggtaggagtttccctcctatagttgtgttattctgtaacaatcccaagggaaagaacacattgttagctgcatcctttacacaaacataagaaaacttggacaactttttcattaagaatcttaacagtattcgttttgtgttttatagattgcacccacaatacatctcatttaataattttgcagacaaatcaaaatcgcgaagtggttctgatcctaagaaagaatcagtaattccaaaagatggaccaacaacaaacattgctgcacaaacattcacatttcgggaactggctgctgccacaaagaattttagaccagagagtttactgggtgaagggggttttgggcgtgtttacaaaggtcgcttggagagcacaaaccaggtaataatgcttaattaaagttgatagattccaatatcataatggagcatgatctaatttgcagtggcctttccttttcgcaatctataatatttagaaaccacttgtagaatcaaattttattatcactatccatgtcctaatctatttaatgattttatgttggacatacttttttgtttctaggtagttgctgtaaaacaacttgacaggaatggcttgcaagggaaccgagagtttttagtagaggttctaatgcttagcctcttacatcacccaaaccttgtcaaccttattggttattgtgctgacggggaccagcgccttcttgtttatgagtttatgcccttaggttccttggaggatcatttacatggtacgttttaacttaagtagtgataaatcttctatgcttttgccatttattggggcctgtagaaattggatgataatcaattatcatggttatattttttctttataatgcttgttgaacacagtaggtcaaagtcattgctacactgctggattgtaccctagtaaaaaattcagaaaacactgtttaacttgcagttaattaggcaaactaggtttaattgatatccaataataagtaattcagacttaatttttaagaaaccaacatagtgctatcatatgtataagagaatatgaaatttcaagaaacttgagaaaatgtggattgagcaaacggagtaaataaaaggatggaaatggaataataatctgatactaagctgtgaatgagattctaatattttgtccaaattctgagaagtagacaattagagcaaatcatgtttcaaaaaccaggtttttgctttgggtacttgacattaatgatgtcttttgttttctggtagtaatttaatgaactgtggtggagtaagtacaagtaactgacttgctttatgcatgttttggtgttatattgtttttcttcacataacttagtgattaacatcatggtcaacaaaagaagttgttagaagtactaatccatggtctaaggtctcaatacttatggttacttacatactattcattcgattacctttggttggtactaccgtagtacttagaaccacaaaccattttatttttcatatttgatcactaaaactttggttaacaagaaaatatgaagtcatggacctaagacaaatgcttcatttactgatgccacacctatttatctttgggtgggtttggatacaatatgcacttattatggaataaggattgcaaattgtatcattttcttctgttttggtgatactagaatgtcaatgtagttgttcaatttttttctggaactaacttactgacgtctgagtcatgcaacatgaaattagctcaacataggtcaaggtttacagaatagacatgaattgtcacatacatatcggtgttaggatgatattcttggctgacttgccaaatagcatctgctttccttcagcaccttagttgtccctcaatcccatctttagtggtcatttctttagaaatgaagaccttccacaactgaccaaccccctttccgcttgtaaatttcagatcttccaccagacaaggagcctttggactggaatacaagaatgaagattgcggcaggtgctgcaaaaggattggagtatttgcatgacaaagcaaatcctcctgttatataccgagacttgaagtcatctaatatccttcttgatgagggctttcaccctaaattatctgattttgggcttgcaaaattgggtcctgttggcgataagacacatgtctccactcgtgtgatgggaacttatggatattgtgcgccagagtatgctatgacaggccaactcactctaaaatctgatgtctatagttttggagtcgtctttcttgagcttattactggacgaaaggccattgataacactcgagctcaaggagaacataatctcgttgcatgggtaaagtttcctcatttactatatattatattttacctgttgaagatttatgcacttatcctttagattataaagaaactattattattgtcttcttttctgggatgtgaatgcaggcgcgaccacttttcaaagatcgaagaaagttccccaaaatggctgacccgctacttcaaggtcattacccaatgcgtggactctaccaagctcttgcagttgcagccatgtgtttgcaggaacaagctgctacaaggcctctgataggagatgtggtgactgctctcacatacttggcctcccaaacttatgaccctaatgcagtgagtaatagagttggttcatctactcccaggaatagggatgatcgcagaagcatgggagaagggctggatagcccagatgaacacagacgtggagggcgaaatgggtctccttccacccatagaaattcacctgatttcagaaagagagaccttgcaagggacgtaagtgctggttcagaattgggcaggattgaaactggtggtgggtctggtagaaagtgggggttggatgatttagaacgaccagaatcccagagggacagtcctgcaagtgctggaagagcacgggaaaccccaagaaatcgtgatcttgatagagaacgtgaagtggcagcagcaaaagtatgggg

SEQ ID NO: 189328 - DNA, 1704 bp, Cannabis indica
cttttcttttctttgtattttcctactgtttgatcaatacaagctgagttgttggaactaatttctagtttcagcttctttttttcctgtctgttctggttaattgctgcaattttggattaattactactggaaacctatcactttgatgcttttacacattgtcttaccaccatctttgatatttccatgacaagtggtagttgggatttatcattagtcacaataagagatttttatctgtcaaagaaactgtttctaggtagttttgtttcaaagggagaacattcaatgaatgaaaatttgttgtgacagaaggaaacagatgaaagtaacaaaaataccgatgaaaatgaacggtgaatcatcgttgatatgtacgaatttattaatctatatttcatttgagttttaaaaagaaaagggtatgattctctgctcctatttaaacttgtttaccttctatttcatttggtaaattcaggggttggaaatggcattgctgaaactcctattccattggttcatgaagctgttgaagaatttgaaagcatgtaaatgagaagatctcaattgtaaaactcagaaaatgttgtgagtattacaatgatgtaatttagtttccaattcacaacaattgaaaatggtatgaacaattttgagtacatttatcattactcaaacatgaatatgtaaaatactagtattttccaactttacttgtgtttcacacttgtattattagttaattgtttctttctgtatattgcactacaaattcagtacagaagattcaaaaataaaattgccttttttaaaaagatatattattgatattgtttcataaatatatacaactgtgattttggctcatatgtcaactaataatcttggtcctatctctatatcactatctcctccccccattacagatctcagaagaaatttatatataaaggaaaaacataaagaaagagtaaagaattggtgtaggcaaggctggtttattctattcctaaaattcataaacaataagtagaccaaacaagagaggctgtgttggcttttgcttaaatttgacctgttggaccacaaaattattcatgttgtgttgtgtgtggtgtgatctgtgtagtactaatagtgcaacatcacattcacattggctgctttatttttattattattcattcttcaccagttccattttctccaatcaaacatatgtataattatattcaatataaaattattgggaattttttgggtggcattacttgggttccaattcgtgttcgcgggtcgtatttgtgttgtgtcaaatatatgattgacttgaatacaacttgtttataattatgttgatatgatatgacccgtataattcgtttataaacatattttatgtaaacatgtcaactaataatatgtttatgacatgttaaagtactaaaataattttaaactggttattaataagtcaatttcgtattaaccgtgtcaactcaaattcgattcgtttattaaacaggttagatgagtcaattcgaacccatttaagggaaacccaaagctactaactctcgtgcggatttcaaatcgtgttatatcttgtctgatctgttttgctgaccctagaaccattaccatagggaaattttcataactataacatcataattaagttttcaaaaaaaaatattt

SEQ ID NO: 189329 - DNA, 4633 bp, Cannabis indica
ttagtttcgccaaattttgtgtctttggtcagaccagtttgttgtctttctctctccttcccctatttttctttctcttctttttttctttttttttttttttaattttctttttctttttccctacaaaagaaactgaacctccgaaaattaacattatggaaaatgagcataaggaagtctctgcagcaatcatcaaccccattcaggtccacctatccccaccatgttcctcacttttctttttccctctacttttttattttcaaaaataatttttttgtactgggtttctttcattctctcaatcaacatcataataaatgagtgtctctctggcttaatttagatagaagtacacatggtgatcttttaggatctgggtttccattgctttgcatcattgttttctttctttctttcttttttaaagtcactgagtttgatctattattggtccttttttttatgacgaaattacagaataaagaggaagccaaggaagtgggcattggatccgacgagcctgaagccccttctcccttaactgttacttcccgggtcagttacctttttcatttctattgattggtactcatatcatttctatatttagaaattaacgtgttgatgaagaaggggtctggaattggaaatgcctgtgttgttggaatagatattgagtaagaatcgaaaaatggaaagttactgaattggtttttgtgatgaaaatacaggttttgtatatgttaggtgacattgctgcaggaccagcgtataggttcacccaatggctggaactggttcgtaaacgcagccaccaaaaccgctcctcaggcttccccaaccgccctctgaggctcgatgatatgccttcttggttagttttgtgtatatttctcttctctgtcatcactaactgtttggatactttgtgttgccattatgtaaccatgaggtaagtttgcttataatcacaattcagattcagaaccaatgtaaaattgaactagcatttttcttttaactatttctataaatagttacatttcttttgtaagccgttttttgtgtcattcttaatgatgaaatgatcactattcagtgcaggagattcaattaatgattcaaagggtcctggtcattctgatcaaacgacagaaatcaatctgtgggagagacttggtacagctgcaatgatggatatcgaatcaagctctttctcttgggataggctttcttcactacatcacactgaacacagtagcagtactgaccaatctgaggatgaaatgaacaaagccctcgaggtctgcagtctattttttctacaaatcgtgaaatggatcaatttttagtaaccccaagaaatggaaatgcacattctttatatgtttgtggtaagagtaagatttttgagttgtaaagctattgtctcatattgtctttagttgtgtgcatataggttactgtgaattctggaggagttgtcttctttgctcttttcaaccaacatggagatgataattcttttgcgaatgaagcagcagctgttataaagttctcatcatcaaggatggcttcacaatctgaacgtcttggatatgagttggcaaagtggctcggagttcgaactcctcaggttttaccttgtactacttgtgtgttatatttgctattccattagagtaattaacattgatttaagaagtgattattgtatgttgtttgggccagaatgttttcttactttagtgttggaatatttcaggccagggtcatccacaattctgcccctgaatggctccagattaaagaagctgcagaaaaagcaagagacacagcaagctcagaaggagatgaagttggtgaaatgacttgctcagaactattggaagctcttgaacttagtagatgccttttcttaatgaggtgcaatttaattcttttctgtttatataaatatatataatgtaaacagtactgcaagtctgcaattatatggtgcgaataatattgcatattatgtcatttggtgtctgtaattttgtggaagagttaattaattgatttattttttgtcacttattatagggatcattagctcttgttttttgttgtcctcttttcaattttggtatttcaaatagaacaggactttctggtctctgagatagattcaactaatgcatgattgcattttctgtatgttaagagaagattgtgattgttgtgtcttcaaaatcaacaagtattacatgtagtacaaaaatattaagtttgttatgttgttacttaggaatttccttgtcttatgcagttatgtccatggatcacctttgctagaaagttgtaatgcatttgagatgaaagaaacagcagagaagacagcagccgcccttggtagggtgttcatgttggacctgatcatcaggaatgaagataggctcccatgccgccagcttagatggcgtggtaacagtgcaaatttgttattggctgataaaatgtcttcggcatacatggatactttggatgaagccttagattctgtaatcaagcgatacataccaagatcactaagagctcttcaaaaagaaagaagggcaacttcagttgatagcagattgaaatctcataattcagtattggtgtctcagaactctgatctttctgatatcactgaatcacctaaatctagtgagttgagctttaaaagtcagctatcagatggatcaacgttttctgatgtccgaattgtggctattgactctggtgttcctcgtcgacctccagtagggaaacgtgcaaatgatcaggcaacttatcctaagttggttgagttactactcaatagttctgagtactcatccaacctgttatttgacataacaatggggaagttaggatgttcttcttctgctcaaaacaatgacacaaatgatgtgaggtttgaaatgggttcagttgttcaagaatttcgaaatggatttcgtggtgctcttagagacatgcaaggattccatatattcctactcacacttcaccaaaaactagaaagcttgttacgagtattttggaatatcataagtaaaatttcatctggggaatctgacaaagaggattcagcagttcttgagccacccttgcaagttgctggaaatgctcattgcccttctccgccaagtaaggagcggtgtattcatgataatcatttagacttctatgattcagagcagagaagtgctacaagatcatcctcttcaggaaataaagaaacctcagatgcaagttctccagtttcacgtgaaggtttgcatggaagattttgtaaaggtagtgttgaacggaatctgcgtttgacagcaaagctccgagatttccagaaatatgcaaaggttggtaattttcttaaagtttattgataacaattatgctgttagagatataatatgttcattattattattattattattttatgtttaggtggaattaatgcaactattcattgttaattcattttatggacaacaataatgcgccaagtaatttaagacagatttattagttagtttggccattgtaggaattgaattataatttaaatggagctgtttaattgaaatggcaatgcacaagttttaagtgctggagaattaaatttgaacaaagatactgctactttaaatccttaacaatatatatcttacaattatgaaatgctgagattcttatgctacatttagttttatttatcccaagttgtgattcagttcaatctggttatacatttagttttttcttttctcaatttgtatataggtttctatttcttctaggattagatttgtataggatctctctctttttgttattatatttctttataagtaggcatgtaacctctaagttgaatctctaatacagaaggcaactaatgccaaaattattttcctttttgttgaatattgttcaggttgatgctgaatcaagtaaagaattagagcaatggaatgaaatgctaaagaatgatgcagtcaagctctgccaagaaaacaattttaatactggattttttgagggtagtgataataattgtgccattgatgcctacgaattgaaggtaatttatatgtttgtattgtatattcttacaactgtaatactttcgactttcattgttatttttgtggtgataggatatggaaaacataatggataactgtttcattcagagactgatgatgttattgattgattttaaattggtttagtagttttgagtgaaaatattaccaggaacaattttctcttttgcattttgcttatctcagaaacaaatttttggtatgaattacaggtgagactagagcacattcttgagaggatttcattgatatcagaagctgcaaatactgagaggccatcatcaatcacaaatagcttgttcattggtggggccctggcagcaagatctgtattcacactgcaacatttaggtatcactcatatattgtgcctttgctccaatgaaatcggacagtcagattctcaatttcctgatctattcgagtacaagaatttttcggtcagtactcttatgttggaccatatttggtggtgtgtttcc

SEQ ID NO: 189330 - DNA, 2354 bp, Cannabis indica
aaaggagatgagaacttcatttcagtaggtcagaagggggatggcaatttcatatcaatgggccataattacggaaaaagtgataatggtctcctatcgatgggtcagccctacgacaagagggagggaaatttcatatcaatgaaccaatcatatgaaaaaggagataataatatcatatcattaggtacctcttataccaagggtcatgaagatcttatttccattggtgcaacctatggtaaatcaaacaataattttatccaaatggccccctcctatatgagggataataatagtatgatatcaaactgtccaacctataagtctgattcaaatgttatagcaatgggtggtcctagctacgataaaggagactctagcaatctctcgatgggtcagaactacaacaagggagaaagcactaccatatcttttggaggttttcatgatgaatctgggactaattcctctggtggtatcattagcagctatgatttgttgatgagtaatcagaactcatctcagactttggaaatatctgggcagaagatttcggttgaggctaatgtggattcaaatgtaaatggaattccaaaagctgattctcaaattgatgccattccaaagattaaggagccaaagactgttaagaaggcacctcctaacaactttccttcaaatgtgaaaagtctgttatcaactggtatgtttgatggggttactgtgaagtatgtttcatggtcacgggaggtaagtttttcttcctacatgctcattgtctctattgatttcgattaggtatatgcagtatgctcagcggatcaattttcttactaatattttcacagaaaaatctcgagggagttataagaggaactgggtatttatgttcctgcaatgactgcaaccaaacaaaagatgcaaaagtaagcacattatgtgttgtctttactaattgacgaggtcatgtttgatttgagattcatgtgttgcggtggaattgaattgtgtgatgcaggctctcaacgcatatgagtttgagcgtcatgctggttgcaagaccaaacaccctaataatcacatttactttaacaatggaaagaccatttatgcagtagttcaagagctgaagaacactcctcaagacatgctgtttgatgcaattcaaaaggtgacagggtctcctattaatcaaaagaattttcgtgtgtggaaaggtacataattatgatcttagatggaattagacttttcatacagtgactagttaaactgtaataggaatagaaatggaatgaaataaaatttaaaatacaaataaaaaataaaaaaatgatcaaaaagttattaaattttgtatcatcttagattagaatagtctttcataccaataattcaaaatgcaatcaaacaaaaaaatgaaataaatattgtttctttacctttccatttcattacctctaaccaaatgcagggtccgttcaaaccgtattaaattgtatagtatttttgatgttaatcaaaatttcttagtcttatacaaaaacatgataataaaacacaatttaatattatactatacaatacaatatgatggtgttccaaacacacccaaatgaatgaatatcgagaccattttctattgttaatgctggttaagaaatatcttatattgtttcttcttctctgctctcagcatcatatcaagccgcgactcgggaacttcaacgtatctacggaaaggatgaggtaaccataccatgttgagatgagaatcttcctcataaaaggatttgaggtaggttagttcatatgggaacctgtgaatagcattatacagttggtaaatgatagactgatctggaattcgagtaatttgagctgttgaatgttcataggttttttttggtcttttaataatctccaaaattaggatgctacacatttgttaaaaggattttgagagtaaatcatcagttcttttttgaattagggtgaaattttctaccttgtggtccaagcaaaagtgtattttgaatcaacattgttcagacaacatcctttttgcaaagtgatataatttatttaagtatagatattgatatgaacaaaagcttgagaattagaagggttctcctcaaaaccaaacaaatattgtacaactgcataaaatcagactatgggccagtttggcacagctgtattgtgggaaaaagcagttgtagctgtgctgtgagaaaaagcagctgtagcagaattgtggaaaaaaactgagccgagtgtggtaaattataaattttaatgtactgtaagctgttaagatctatgataatgataatgataatattata

SEQ ID NO: 189331 - DNA, 2780 bp, Cannabis indica
aacccaacctctgtcttcggtgctcgttgtcctcaacccgcccagatctcctccccacccctgactgtaaatctacgaaatcttcacccaataatctattatattcattactttttgttcacattgtgtttgaggaaatgcttcattgagatttccacataagtgttttattcatttctctcttttactccgccaacgtcattcttttcctcaatcagagaattctactcactactctccaattcattaatctgtagttgaaacagcttctactcatcacttcaatttctcaatcttttctcgaatcccttttattatcaatttattgtgtgattgttctgatatatcacttttcatagagatcggagaattatgggaggagtaatacagaagttcttcattgcgtcaatgtttatgtggatggttcccgttgcgattttgtacgggtttaaccataagttgtttcctggtaagttcttttgtgaatttgtttttctgttttgtgtattcattttatacattggaaccctagaacaacttacaagtaatgttgcttcatatgtaattttcctttactcaacaaaccctttaattcttcacgtactacggtctacatactacaatgcttattttgatagaaactttataaactttcttatccatataattaaaccatatttttaactttataatctcaaatcaattaatagctagggtcagagatgggtttagtttagttacagtggattctagggtcagagatggattccgtattcagtttaatcttttaaaaaactttatcataaccatatttataactcctaaagcaaatgcataagccttacaagtcttcaagagaaactcaataatgttaagtttatcgttttaccctcctctgaacaaaatatctgtcttcatccttgtttaaattgttaaccttacttgtagtctgggctgtttactacatgaatttacatgaccaaaattattagagtagtattttcttgccttgaggtgctgatgaatgcagatgttgatgattacatattttattcttttattcgagcatcctaatgtcctatataaagtgtacttatcaattaagatgagatatcaactgtctattattagcttaagaaaacagaacatgtgttctgcattagaattttcttaatgtgataaattcaatagttgaagaaagtttataaagttgaaatactaattgcagttcataatgtattagtgtctagtaaagcacagatgtagctgagttgatgacagctggaaattcttgcttgctaaatgtttatagtttttggggttagtgcgtggccgatgtagagattaataaggagagttcgtttgttctgacaatttgaataagtcaaggggcatttgttttgagagaaaaattacaagaatgtggagcaaaatggactgtaaccatcataggtagaatcccatgggcacacacccaccagttgggttgatttcatcagtcaaactctttgtgaattttttgttgggtattattctctgaagttaataattttctattgtggaatgagaggattttatttcacatctaagctttctctactttttatcattgtcattcatcaaatccataggaagtttgtaaagaggttaactaatagctgtagaaattacaagtacgatttccttacaagagtatcaagtagaaaagattgaaaaagtaacgctaatcttttagaaaattctagcacaattgagaaataagtaactagccatgtgaggataaatatgggtattcaagtgaaatacatagtgtatttactgctataaggtttgctgggtaaatgctcactgcatgtgtatcttaaaaattgctttgttttgcctctcattatatcagtcagtagactgttttgcgttggcaagcattggcgattttttttttcccattagtctttatttatagaaatttaattttttgacaatttcatgacgtgtgccgcatgaatctagctcaagtagttagatgagtgtggtttgctcccacaaggttggaggagtttttcctggtacctacatagaaattgctatagtttcatggtctccaaatattgtaggcttaggcgggatcctagtttcgaataaaaaaaaagtagttagatgagtgtgtaaggagtctggggtttgtagtccacttgggactaagggctaactatttcttaaaataataatgataataataagttggaaattagaagctgattatggtgggatttgtagatgacccttgatagaatgaaaaggcaaggaataacgatggtgatggaataggagtgtagcttgaataaaggattgactaaattatctggttgaaaacttaagattaactatgatagagataattttatttggattttcacaaaatacctgccttggaattaaatatggaggtgggtgtgaaggcctagagggtggggtttataattgtatattttaagataatttttacgtgaggtgaaaagatttatattctctcagtcttcattgacaagtgatgcatatatgcacaattaagaatctattttaggaaactatacaattgggtaactagatatgtaggtaagaatagtgaatgtaaacaatgttaccgaaagggatgagagagaacgtaaaaatgagaaatggaggagagagaaaggcaagtggatagttttagttgcagcagtagtaattgcattgggattgttatcaccatacatgcatctaaaactaccaaatagaaa

SEQ ID NO: 189332 - DNA, 2133 bp, Cannabis indica
aaaaaaaaaaaaaaagacttttatttctctgtagtttgaccgcatgtagtgacatggtacttcctaattaaaaaaacacctctttgcgtgcatatatttgataaatatcagcttggtggaatctgataggaccccatttcaggctatctatgctaggagtgtcagttggattgctgttagtttgttaatatggacagatgtcattctgtggaaaggggagaattttttagtatgggaagttgggcgatctagaaggttatatatagtcaggttggttaaatgaggaaaggaggaaatgggtgagtagaattggagcttagttcttaggaggttcaaggccactcgaagttcctgtggctaaaatctgtgttttcttccattttagcatcacgctctttcttttgcccgtttctttgctttttctactttttggtgctctctctagttgggttcctatcttttctttttgttatttgtttctgttgatatagtacttccttttatttgtcatggatcccctcattcctctctatgttgcggcattaatttctttcgatagacattgtaaagagatgtagccaaaatttataaatttctatccctataatagaaattagtactaaagagacctgttttggcccttttgaaattattatggttcaggtcctgtcaaactatatagtttcaaaattttaaatgacctttttattttattttatttgttttggtaaaacttgctcacaagtttacatttatgctagcacaagtattatataacatgtacatgcagtatggtaaggctacttagtgcattttttgcttatgcatttcaatagctgcttattttctttactatagtatcatgtatgatcttagaagctgcagtgtttttcttcatctggttttaagggaagtccaggatggtgcttgagctttcacattgctacaaaaatctctaatttattgcatcaatctttttgcataaaagctttatttcttttatcttggaacaacttagcatcaacttatcaaaaagctctaattaattgtctttaactgttagtaaaatatctatgcttctgaaatacaagaaacttcagctgaaatgaccaaagtttatggaactgtaaagtttagttccttactctttgacttattagtgtgcttttctgtgggtggactgatcagttattttatccattatttttctgatttattttatttatttatgttgctgtaagccttgctgaacaacttgaaaccattaaggaatctctggatgagcgtggcctttcagcccttaccttgtttttggactgcaaaaaggtaaacacatgctactttgaggttttgatgtcagttgtgcaattatttattgaatgaccatccagatgctcttactatataagtttaattatgtcaatgcttctctaattgtttattaggcttgttgaaccgttggtcttggttattcagttgtcttatactgcccattgacttctactgttacaatatgattttaaggagcgtcttttagattgtttggcaacaatttgcctaaggctttagctagttcttgagaacattagatatttgttgttttcccaacttactgcaacattccattatggtatgagacccttccatgtgcatgccctactagactgctgaaagatttattacaatagagaaggggatgtcttcttttttattataaatatttgaaaatcatcaagtgttagtttattttcacattatataggggatttttgatttgcaaagcaattcatttgacttgttggctgtttcttactcaaattccttctgaacttcaaccaagaggtgtggcccatattgccgacatgtgatttgctcccacaaaattggagatgcaatctatcctgagcacctaatttttttttttgataaatcaggaagttgtattgcacaaatcaatctttacacactaatagcactccaaattcggagcctaaagactatctatacatttccttttcctcttcttttcttttttgactgagtatgtatatccttataatcctgagcacctaattgctcctcaaatgttgttaaattcagcaaggagctctgtttctttctttcttttctttt

SEQ ID NO: 189333 - DNA, 1774 bp, Cannabis indica
agaaatgttcaaattattattagtgcatgatattctatcactacttatgtaattgagaattagattctttataatttaagaaaataatttttaactaattaaagtcgccacttataaaaattggatcaaaagtcctattagtgccttagtattctattactattgatataaattctatataatttaagaaaataatttttagcaaatatatatattgctaattaattattagaattcacctatataagagttactcaataataatactcttactataaaaacattattattgaacaatttaaggtactatgcgcattctaaatagtcaacagtaatataaaaaaaacatagtcaacagtaaaatgtatagactgagtattaatttatacgcaatatatcactcccttagcatttttttacactagccacctacctactcaaagtatatatagatgtacatatttaaaattcaaccattttcatcatacttacgatataattaatcgaaaaagaaaaattcatataaacaaaacttagtatatatattgaattcatcaaattgatataaaataataataattcacaaaatatatagatttttatttggagtaatatttagtattaactagtaatgacaatgaaccaaagccggagttgagaagacaatattaggttgttgagctgaaacaaattggaacttattcgattcacggtggttgtggctgtcctcttccggcgccggaaggttgagatccagtaaaattgctttattattattattattaggatgaagaaacgacgatgaattaattgtcgttttagttgtcgtattgggatgtggtctgtggcgtctcatgtggccacccaaggcttgacccgaactgaattcggatccacatatggagcactcgtgcaccttattacccttgttaaccgacgtcgttttggtgttgaacaccaacatttcttgaagatgatcatcttctactattacttcttcttcatcatcttctaattcgtacaatcgatcatcatcatcggcggccaccgccgcgattttttccggtgagatcagtttaggctttttgtgactggcacggtggccgcccagagcttgaaacgacggaaaactccgattgcatgttttacactcgtaaacaaacaataatcctcctgatcctttaatattagcggtggcgctggcggtggtgatggttgaatttttgtggttatggcggcggcggcgtcggcggtggtggccttgagctaggagaatgaggcaattagccatatcttgttcttcttcatctgaggagaatgaagaattattactaatggtggttgatgaggatgaggatgaggtactggcggtggcggcgccggagatttgcctgtggcgtttggtgcgtttgcctttcatcgtgagaatattgttgttattcatttgatcatctaattccatggtttcaataatcatatataataatagagagagagaatggaaataatagggaaattgaaggatgtatatatatatatatatggtgttgtatatgagtatatgtatatgtgtttgtgtgtgtatatataataagagaaagaagcaaaaaggaagatgaagaagaaagaaagtagttggaggagagagagagagagagagctagttagggagtagggagtagagataggtaataaaaatagtagtgtgagtagtgtgtgttgagtggatagtagtttcccaaccgtgtctaagtttatatataataataataat

SEQ ID NO: 189334 - DNA, 2565 bp, Cannabis indica
gattaaggagtccatgtatttatcaaataaatgtccaattctactcaatatgttgcctccaaagtgcaaaacagtcaatggggtaagctgttccaatatatcctgcaaacaaattttgaactatggagttaaataaaaatgaacacataaagcatcaagaagaaaatcattatgaagaaatgcaagattaaaggaaactgatactgagaaaaaaaatacttcatacaaagcatgaaccaatgcactatgcgcatacacacatgtacaaacactaaagtaacaagtagagttgatggcagagcagcctgtaaccgcatggaaatctttgtacctaagagcccaaaatggctgtgttatacttcactgacaaaatgtggacctatcagatgtctaggaatgtatagtctacacatatatgagttgcagtgagcataaggaacacaaatacacaactatgagaaccacaaatccacagacgaccacttctgaaatgttaatgttattcaatagatcccaggaaacaaaagaaaaaaaaacatgtttaatatggatcagtaccttgttggatcatcttaaggtagcataacttccctcaaggaatttcctgtttcaccataattaatattttaaaactatttccttttctactaacaataggggtccgtagtcatattaaggaagttgacatcaaagaattagccaagttatcctaagtgtgcatatattaacttaatggtcatatagtctgcaaccatgtatacaaagctttaaatattctaagctatagtgtagccagatcaacaaatggatcctcaacttacttcaacaatggacatgaatctgattccactattaacgagcacactatcaggcgatggtgtaattgtagataatagagatgcgaagcgaggtgaaaaaggaatgatttcttctggttccaccgagccaaggacaaccttcctagcccttctaaagttcagttctaaaacttcttcaatgaaagggtgtaaaagaaccaaaactaattttgacagtttcaagccttgagattctagagccaaacagtagttgagactagcctgaacacatacgctggcagctcgtaatgcagaaactgtctcggaaatgggtgcattctcttttatcatccgcacaaaagcctcaatttcccactctgcccattgaacaattctgtttgtataaacaggatcatcaccaaatatcaaacccgattcctttcttgtatgcgagattattgaaaatacaatcttagataatgttgctggatatgtccttggacagaaagaacaagacggaataaaaacttcaatgttcttctgaatacgggaaccataaaatttcaaaagtaactgatgtgccaaaggacctttcccaagtttaattaaagcacataacgttttcttcagctctacaacactaatagaaggttgttcagcaatctcaactagctgatcttcaagaattacctttcttcttaaaaaagcagctttatatgaggactcatcagcagacaacaagtctgagttttttagcttccaaagagtttttctcctcggaatctaaggcatccaatgcttcttctactttatgttcagccaagagcacaaaaaaatactagttagcatcaacttcgttaggtataagatctttaagctcatcactcttggaatcttgcttagcttcatagggttcaccaccagatttgttccactcttccaattcacgagagactccagtcatcaaatcttgaacaagaattccttgcgctgaaatgtgctttcgcagttcaatcgattcatgctgcatttctctagcctcttcagatattctgcactcatcaataatcaaacctctatgtcagatgaagctgaaaaacaatacagaaagcacaatcagaaaaaaaaaatgaggaaattggtacaagaagctgtggatacccttcttgataatggactcggcggacatgttactgatatgtaatcaaaacaccatgagataaaatctttgagactgataagaaaaaatatattttacatcgaaagaaataaaatactaaataaagaagccttgccagcaactttttatttcctgtaatcaattgtattgataatcaagaaaatgctaaactaaattagggaagaaaaaaatcatataaatagaatatttcatcaattgtttgcgaagccagcgctactaagtactattctcatttgaacgaatgatatttatttcataaacataagattgacaaggacagaaatagaagcaagtaacaccaaactatgtcatcttaaaaatttctcatgatttagaactaatacctcaaaaacgccaaatactttgtttgcatattcccacataagttttccacagcatctttcaagtccaggagttcacagcaaagttttctgattccctgcacaagagttaagtgtcagtaaaactttacgcataattgcacataccttgattaaacaacttgaagaacttctccgaaaaaaaaaaaaaaaaaaaaactagtaaaataaatcactattattaaat

SEQ ID NO: 189335 - DNA, 2041 bp, Cannabis indica
tttttttattagtttcaacattaaaaattatatccatacatcataatccgtgtaccatattaatcaaatccaataaattaatacatttttagggttctttagcctataatctaagcctagctctacccaaagtcaaaaaagaaactaaaaaaaaaatagttcaaatgctttttggttgagcttagtaattaaataaaatcaaatactatatgataagattaacaataagatgatgccctgtattaaaattcatataaattattattttattaatagaaaatgcaggagatcactaatgatagaagaaaggtctaataatgataagagttcatgtataattaatttaatactaaagtgtaatatttaataagatctcttggatcagcttttgcacatactagtatatatatatatatatatattaaatttataaactaattaaaatggaaattattgtgtaaaaagctattggggataaactagaataatattttgcaactgcccccattacaagcacaaacactttctgcttcattctttcggacacaagataaggagtgagtgagcaagaaagaaaatcattatggtcatttctgataagacattagattcatatttatttattaatttcaattctaaaaatttaaagtgggatatggcatttggttcaaattatatattctatatatccaaattagaagttataaataataacattaagaaaataagcaaaattaatttcttttttttttatatatatcctcaacaaagtgatgatctcattaattaaaactctaaacaaaataagaaagaaaattaagtaaaaataataataaaaagaagaagaagaaactaattaataccaaagtagggcttgcttactctctatctaacaccttgtttattattcatgaaagatcaagaagtagaagatgaaccattagttgctacatgaactccaccatcatcatcatcgtctttataatggttgagattctgaacattgttgttgttgttgttgttgtcgttctcactgttggttttgttgctgctaccgccattgttatggttttgctcaagaagattaagattagtattattgttgttgttgttgcttcttccacctgtactggctcctccgccattaatatctttcttcccaagtgtgttcttgttattatgcatccagactttaagaacccctttatcaacaccaacatcattacaaaactccataacaatgtcttcatctctcttctgcatcttccaaccaactcgctcagcgaattcgtacatcttctctttctgttcttgactgaacttagttctgaaccttttacgggaactattagagttcggtgtgatcatcccaccgccaccgccgacgacacccgcgttctcttgggctccgcccggacccgatagcccggtcgaaagagctaacagcatgtgaggtgcagatgggtagtaagaagatgagatcggcggaggagaagccgaattggggcttcgatttccaccgccgtggtgtggctgaggtggtggaggaggatggtgacgatggtgaggctggtactcgatgacatgggttgttgttgttgttggatgatgatgatgaggtaacaataaagcttgctcatctggctcccggcgatgataatttcggtggcaaccacaggcggcgcattttagcgatgttgggtctgttgatatagctgtaggtgaaggcatgtactcgccgcagccatctagggcatgaccacccaaagtggcggcgtggtttttgagacattctctgtacgaaacaactgctgttggagatgatactgcggccggcgccggtaagtggtggtggtggtgatggtggtgatgtgggttgtggcgtttgagtacaccgttactaatggagattggcttaatgggttggatccttgtcggagtttcgctctcggcttctggtgatttcgtactaccagtgttagtagctgtggtggttgtaattgtaggggttatttccatggctcaaacatctagggtttct

SEQ ID NO: 189336 - DNA, 3353 bp, Cannabis indica
tagcttttataaaatcttttcaatcttgctctcaagcatataactaaaccaggacaaattgagtgatcaactatacaaattttaatttagcaaaagaaaaaactttacaaattttaatttattcttgccagagatacttctatttttactgcagaaaatatttcgaagtcaaagaatgattcgaactaggttgtggtaatgatttacatgttaaaaacaaaagaaacagaaagggtgattataattggaaaaaacataacacaaaacttctaaactcaaactacctgactgcagctgtacagacaacgtccttcaaaagcccaagctaaacctgtaacctagtaatacgtaaaaacttaatacacagctttgactagaattaaaataaaaaacgttcaaaaaggaacttacaatattgtcatgtgaatcatacgagccaactttatcatatttactattcgatatgtcacaaatccatacttcaaaaattccagatccttttccaactgccaagaaaattttgtttgaggactgagcaggtacagtaagtgaaattactgaaactgggacatcatcatttataacctattaaaaagaccatttatcacaaaatgctaacaattaataagacagaagtagacttctaaatatgaaaaaattcaagagctacattacctctttcaacagggaaagggaagcatgattagcttcgcttgacttcaacaattgctcattataaatcatccatatcttgacactggaaaacaaaataaaataaaatatgaatgataattgataactacaaccagctgatgagaataagtaattttattttcatctagtaagacaatctttcagacttcagacacaaagtgaatcaaggaatcagacatgcctgtgaaatcgattgagttgctgaatacataaacaaggctactcagggaaagatgaaacattgtgttacaaataatgctaggttaatggaacaaatcataacaattatacattaaatattactttccgaataaaaaagataaaagagaaattacacatataatacgtagatgaattcttgaccacacaaaatttgcacataagaaaagccacaaaaagatttaaagtgctaccaactcacctcccatcagaacttccagtaaccaataaaaatagaggatttgaagattcagaatcaagcagtgcccaactaattgctgtaacccatgaaccatgtgcctgcaagagccccacaacagttgcagttgttgggaccctactgagatcaatcgagtagcatttgggtacagaaactccccaaattgaaactttaccagatttcccaccaactgcaagtaaagacatggatgaaccattttgaggaatagcacaaattttgggtgaaacctgcaacactggggaccaagcaaccacaagagatgatagtattgcactccgggtggcatatttatcagcagttatgagaggcagtgtggacttttcgggtatcttcttaagagaattggccttagattttgatacagaaacaatctgcatacaattgctttcttttaattggccagtatcagtctccagcgcctgaaattagttaagtaaaacaagtagaacaacagctttgaaagaaaacactaaaacagaaccatattattgaaacaatataactattatctaatgtcggatacattcttaatcgatctccgtcgcttacgttgctttctcaaaatgacatttaagcagtcttcatcagaatctacctctgtatctaatttctggtaaaataaaataaataaaaaaagttactcaatcaaatttatcaaaacataaaaccatccagaaatcattgcctcccaagataagatcaaacttacatcagattcatttggaatagatgcttttaactcgccatagctagtactttccagataatcataaagcttagctgatatatccataacctgaagaagaaaaaaaacaaaatttatcaaatttcactaatttcactaatttgttcatctaaaatctttgaccttaatcacatcatacctcaatccattcagcacagaaatcacaaaaaggttgacgatatagcttaacacgtccttcaatggtgcacacagcaagcaagcatctacattgtaagcaccaaatcagtatacacaaatccaattcgatcacagtaaaaggtcagagaatgagagaatcagtctcttaccctgaatttggagataatccaagcggcgaccatgaaattgatcgaacacaaggccgaatgtcacgagatatactagtcggaagcaaagtatctgataacaaatctaaaaaaaacagagcaaagtttgaaaactgaaaaaaaaaagtagagataagattgataatcaaacgccgaaaaaaaatttaccagtacgaccaacaacaccgattggataaggctcgccagtttcgatcgtgataagacctcgaggtttagaaggcattgcaggactctgacaatgaaagaacacaaaatgtaagcatatccatacatacattcatgcatatatatatagtgagagagagagagtagtagtagtagtagtacgagtatggtgacgagatgagcagaggcgacggcgatgaggttatcgtcggaccaagcgagggcgttggggtagaaaggcgaggcagataaggcggcggcctgaaagcgcgaggccatggttggttggtggccgttgagaattgaatttggagggaaatttgatgagttgaagttgaagggatcgactcgaggagactgcggattttgttttaagatttgattaagaagaagaagaagaaccgaaccctagttcgagtacccacatcatcactatctttgtttctttttttttattggacaagtacaaccatttttttaacttttttatatataaaattaaaaaggaaatcacaatagatcttttctgaacctctttgattactttgataatgttagaaatcatgtatcagttataaaagtttcataccttagtatgttttaattaagttatcggtaactacttcaaaggccggttctaagcataagcataagcgggttaggctcgcacctaagaccaactcattttggataaatatcttaactacattttgagaaatgagtcgaaaaaaatagagtgtaaaccttctgtaaagaattactacattaagaatagtgactcgtagagtaaaactcattaatgtctcaaccacgtaaaaatccttcgtattaaatttcttctaatcattaaaacatctctaatcaaagttgtcaaaaatctcactcaacagtcatgattattcatatactaaattgtacccct

SEQ ID NO: 189337 - DNA, 5155 bp, Cannabis indica
ttgtcatggcggtgatattatatacattcatacaaattgaattttaattattagaggctgattgggcaaaaagtctagctacctaattcatttatcgtcatctaccacacaaaaactgaagttccaacttggtccctccacccaatcgaaacaacccaaatagaaactgtttcattatctttttgaatatatatatatatatgtatattattaatatatatatatatccaaatgtttatgtgagctaggtctcgctttaaagcaactacgtatcagtatgtatgtatataatataagggactttttccgggcggtgaatcctaattaaattctatctacccaaaagcaagatagaaagataaattttagcgctactagtttaaataaaaaacattatacgaatgacatatatatcgtttactagttctaatttattaataatattaataagctagctgatcattttctttcgatttttttttttaaaaaaatattagaaagtaagaaaacaaaaaagaaaaaaataaactcatgatgatgattaatgtagtcttataaattaattaagtacatgtattcacatcttccagaagaatacgagcacttatatatgttcactttttggttttcctttctgtaaagtataactattaactaacttcatcacgaagacaggtttaattatttgcgtttttagaaataataattcagatttctttttctatattgatgtcatttctagtgtgaaacacatctcttatctctacatatataataatattgttaaaaatattgtaatttagcatccatggtacccaacaattttgtataagtgatgttttactatttgttagcaatattttttaaaatttattttcttatacgagactcgatgttataagagtatgatactaattaaaatgctaagtaccaatagcatatttttttgcaattctcttctgaatcagaattaatcacgcaattatctgtagcaagcttgttaaaaactctatgagagagccaaaaatatcactgtcattaattgttgtggaaatgaataattaagtgaaaatataatcgaaatgaaagttgcaaagtagttcctttttatatatttatttatttttgttttttttcaagatactcttttatccgtaagcatgccgagaagataagatatatattggataataataaattagtaagtacatttgtttagccactcaaaaggatttaaaaatgatatacttaaattatacatattatttacacataatatatatattataaaaattaacaaatcaagtagaacatccttacaattaaaaaatattacagaaattcttacccatattattaactcatcgtttaataaagaagatatgcatatttcttaaatcacaaagaaattgcttacaatgattaatcacatgacaaaaagtggagatcatggtaatagaaagtcaccacaatcaaacaatatctgttttaatgccaattgcggtcttttgatttaactaaaggcttcacgaacttcaatatccattaataagtaattcacagtcatcacaggcaaccaaaccaacactatatgactcttaccattataaaacaaggcggtatcaacaatgaccttaatacatccaaactgataattttgtctttcttgaaagttattaactatagatataaatgtatgcgggccagaaaaaaaaacatattgatcaaagaaatttccaaaaatgtccatatatataattttttttttggaagaacagatgttcattaatcaggtaaataggtagggatcacagggggatcacctttcccttgaaacaaaatttctgattgtttagacaccctagcactttttgctaaatcatcagcaaattgatttaaactacgacttatgaaataaaactcacagactttaaacttactacaataatcaaggacactcaaagacttgttgagaattttccaatcaggtggacattttctgttagctaaggcttgtactgccactttacaatccgaaagcaaatgaacctccttcttcccttcttgaattgcccaggataaagccattaaaattgcacttaattctgcatctagacctgaacttgctttgctatacgctgtcttggttgcccattggtctgtgtctttgtttatcattactgcttctagacctgcttcgcctttgtaccaagaagcatcagtacaaatgatccaaggtacttcctgagaattgcaacgactaccttccctctgtaatggtaaaaaatgcctctgatctgcttctgcatcagcactatcgttgctgaaattcaagtaacaatcgtatgagttccgaattctactctgaacctgttggacttaatcattttttccctccctgcacaagcggtttctatagatccagagatgatcaataatgcatcccagatatgtgagaatttcctttcttcctatcccaacatcagagagactcctgactagattttgcagaaacgactgaatggtatcccctggaattttttctatacgcaaaggaatcacacccgagaaccataagattttcacaaagctccaatccctgaaaaggtgtaaacaactttccaaattgacgttgcaaaggggacactccttgtccataagaaaaggcagtctttcctttacagggattgcgttattgagaacacgccacagcaaaatcaagattcttgggtgtaaattcgaatgccaaagccatttccaaatttcctgcaccacattaaacctgtgcttctgatcaacgatgtaggaactcttaactgaaaactgtccattttgtttctgtttccatataattttatccttgttaggatatggaagcctagggattttaagaatcctgtcccccaaatcctttccaaaaaactgtaaaaccacttctttattccaagcatgccctgttgagagatctgcaagagttctcgccgtgtattgtctaggcctaaagctgtccattaagtttttaaattcttcaaattccaaccaaggaatccaaggctggttccaaatgtcgatcgtttctccccccgccggtaaagccaaggagcctttgagaattatgtttcgagtatccaggatgcacttccataaactagaatcagtactctttttctttactgtccagaacgattcgtgcttgcagtatttacttaagaggcaatctatccacggcttccttgtgccttgaactatactccacacaagttttgcaattaaagctctgtttgagtcctcgaatcttctaatcccaagacctcatgactcttgtggttggcaaattgagtcccaagattttagagctaagtatcttcctttacccacactcccttgcaaccagtagcttctaatcatcgcatccagatctctgcaagttgaaattgggattttgttggtgctcatagagtagatcggcatggccgaggctactgtcttaattagagttaatctccctgcataagacaataacctcatcttccacccctccagcctctgcaacatactctccctcaggttcatgtagttttcctttttccttctcttgaagacaaaaggattgcccaagtgtctttcctccccttgagtttggtttatattgagtacatgcagaatcccatttcgtctttcaacagagagattattggagaaaagcacacttgatttggccttactacacacttgtcctgaccatttctcgtacttactaatacaatccatcaaattctttccctcctctttatttgctcgagcaaaaagtatcgtgtcgtccgcaaacatgagatgagaaattgggattgcagctcttgcaatttgaattccatgaatcttattctccctctcgtgcttttggatgatcttggaaagaacttcttggcataggagaaaaataaagggagacaagggatctccttgtcttaagcccctctgaggttggaatttcttcaaaggagtgccatttaggattgcagaataagttactcctgttacacaagacattattaatccacaacttttttcatcaaatccattggcccttagaacctttctgataaaagtccactccatcctatcgtaagccttatgcatatccaatttgattgccatcaaacctcccattcctctcttcctccgaattgtctgaacaagctcttgggttaggattgaggactcagcaatccaacggcccggaataaaggccgattagaagggagaaatcaaatcttccatataaggcctcattctgttgactaggattttggttatgatcttatatgggaagttgcataagctgattggcctgaactgctccatacgcctaggattgttcacctttggaattagacaaatgaatgtgtaattcaacttcggatgaacttctcctgtggcgaaaacttcttgtaccgccttgtagacattactccctaccacatcccaatatttcctaaagaaacatcctgggagtccatccggtccaggagattttaggggatgtatgctgaaaacggtgtctcgaatttcctcaatcgaggggattctagtcaaactttgattttcctcctcacctattttcctatcaaatagatcttctagttccattgaaatatcaggttggtcagaagtgaaaaggtttttgaaataatcagtgattatacctgaaacttcattgatgttttctttcatcactccatctttgccttgaagagaccacacttgatttcttcttctatggattgaggcagccgcgtggaaaaatcttgtgcttctatccccaagtttcaaccagtattctcgagacttttgtctccagatggactccttcattctccatgtgtcttctagtttagcttgaaggtgatagttcttccaaactaagatcagctgaaatttgttgttgctgtatccattgtaatcgtctttccaaagagcaaatgagttggtctaagtcgcccactttttcttttttccatctttgaagagccttccttatgctgtcgaaatttctcatcaagcttcttgtgttctcttggttctctttctttcagactttgcaaatttcttcacgacacgaagcttcatttgaccatgcttcatagaaacgaaa

SEQ ID NO: 189338 - DNA, 1868 bp, Cannabis indica
tctatctaaatttatttgtcatctacccaaaagtaaaattgtaaatacgtgtgtattatagtagctggatttatatttttcatacttatacatcgtattatgtcaggtcataaaaaaatataaactgtgtcatgtcgtactataaaaaaatatgtaccatatcgtgtcgtgctataaaaaaaatataacttatatcgtacaacaattttataaggtaggtccgacatggcccgcaagtctaataatttcgtatcgtatcgttcttagatttgtgtagtgctttattcaagtcgatccatttttctaaaatagaccaatttattttttttatacgtgctcaaattcgtgctttatatttttatatttttattacaattaatgagttaaatattaaattacgtatattttataattttagttatttttatatttttttcgataatatttacacacaatcaaacaaaaaataattattattataatttaaatattactatcattttaattgataaataaatatttatcattgttattattatcaaattattaaacattttaacgtattgtgctttcgagataatctatatgtgcttacgtgtcgtactttcaagctatcgtgatatgtcgtgcctaagatcatatttttcgtgttatattgtgtctatttccatattttttttcgtgtcgtgtctaaccacatatttttttgtattgggtcgcgctcgtgccgtgttaaaaaacccgactcatatttactctatttgatttttcttttttaaattggtatagatacataagcaattataatttgtttgacctaccaaaaacaaaaatgaaaaacacctacctgtcgagtgtaactataaaattcccgtatatactttatatatggttagtgtaggtctgtactgtactctgtaggaacaaaaaagtgccaaattggaacattcaaaatgttctgacacaaaatatcgatttgcccatcatttcctccgtcgtagcaagacacattctcctttcccattgttcctcagtagcaagacaacagaaattttacaaaggttcttctactctggattgagaatcttcatgcatgaaatcgtattggtatagctatgagtgacttagtaactagattcatataaattttcattgacattggtgaagaaactattataaccattttgaaattatattaatctcttatcaacttttggagctgatacccacctttacaatcttctgcatggggttgttgaaagattcaaattagaggcaaggcaacacttgtgtgaatctaacgtatgtgacaacaaaaaggagcccaagaaatagaatagttcaacctgtcaaaacattaatcagtgatactttaaaacagaggatttagtcataaagtaatgcacaaaattaaggattgtgttgtgtgcttaccaaaatggctaattagaatttttgctcccggaactttgacatgtactaaatcatactttctgaacttttaagatcgttaaaaatctcctctcaactattgagattgttaaatttaagaattttttttaattttaataagaaaagtctaacataggtgaaagttcagaagctgtgatttggtacttctcaaagtttgaggggcatgatttgataaattttaaagttaagagagcataatttagtacataaacaattaaatcagtaaaattggataaaagtctttaaatccaacaatctcaatagttcatgaggaatttttaacgaccagaaaagttcaaaggacatgatgatttgatacgtgtcaaaatttaggagacaaaaatcctaatttgtctaccaaaagttagttactgctaaatgctaagttagccatt

SEQ ID NO: 189339 - DNA, 4717 bp, Cannabis indica
cattccattccaatgtcaaccaataacacggtaatgttgctttcttagatttatcatttccttcatcactctccaagcaatgttaaacttattcccatgaaatgaaacctgcataccaaacggcccttaggggaattgtaaagctagatttggttgaggtaaattgagctgatacaatctatccttaagcatcccttggagtagcactctccttgttactttgtccttggagcagcagttgaggtgacacggttgcttgttccactattagcataccacatgtcaatgtccacctcttttggtgtggctatgaaagatgcatgaccaccaaattgtttgttctattgagcacctggatcttgccccatgaatgtttcattgtatctactgtagcagtaaggaacactatgatcatacttgccacaaacttgacaagttgacctagagtttttggatttgcccctgcctcatttttcacctctgtggattgttgtttgaggatgagcctccacgattgttaggataggaattttagtttctcttgccacgatttctatagttttccacccatattagagctgctggatttgtagaagtgctaaagtttggattagaagtaaatgagttttcctctttattactgcttcctgcaacatgcaatagcctagtaagtttgttgtcaaaactaagcagtacatcttgaacttccctccatgtaatgatctggcctcaattaaacaacaatagctaaatatttagcattcaaactagatgtgacattagagattaagtgtgtctctagatctgagtctccagatagagcaagactgtcaaaccacattttttttttgccttaaatatctaatcataggagttggaacttttcgagtggtctgaatcaaagttttggtttcatctattttttttttcttgagtgtgctccaaacagattctccagagcatgcgaaagagcagtttaagtagcacatcctataacttcagttgcaatcgattcaattatggaactgtagatccaacctactagaagatggtcactaattatccaatgttcataatctggattcataatgactccaaaaccaggttgtccatctattgtagtggttgttgggatgtattctgacagattcgagtgccattgatgaaactatcaaatattcggtagccttgaatgattgttgacactatggtttttaataaagtgcacttgttctaatctagtttgagtgacaaaggatgatttaaggtgttgaatggctgtgaaaaattcggggtgacagtagcagagttgttggtaataccagctcttgttccattagaattttgggttgcaagattgggtcggaggtgaaggaggagtttgagaattgtcactatacatggcatatataggccaactgtagttctgataccaagtgaaaaaattaaagaaataataattgtgttttctcaactcaaaatgaaactgaacaggagactttattatataaaccaaagactataatagcctctatacattgctaagtagcattacagaaatcaaagagaatattctttataacaaaattgcacaaaaagcaaagaaagtaataataatggtaacaataaatcattcgagaaggttgacatcaagtgtgagggagtgcaccataactactatggagtactctgtatcaatgtaggttcttaattaattaacaatatgtacgtatgacatatccaataataagtcaaaaaatagataaatatacaatttttatgtaccaaattgatcgataagaataaggctatatatcgatattacaacaagaattcacacacatatataagtggaccactatactatgtacataatatataacaaaaattataaggggaccatatatatatgtgtgtttgtgtcatgaagagcttattgatcaaaataattgttagcctcattattcagttcaaaatcttgggtttcacatgtgactttgaatttttgtcctaagcaaattcaatgaatttttaagatgtagtagtctgcatggtctcaattatatataatagattccaaattaagcattaatttacgtgttaaattgtttcaccattaatttagaggaacacgcattaattataagataaaatttagggggtgcttcacactttgggggtagggtttggtggtaccccaaattatagttttgtatattttatgtgaatttagccccttttataatataaatatgagtaattcgcgatataaatatctaagttcaactctcagttacaaatatataaatacttaagtttacataccttaaatgtcaagttattattcacgtatcattttcaaattggtatatttaaattaattttttatataagaaaatcatgacctgaaccaattaggaattgctacgtggcagtttacttgactgctaaaaagtatttatttgtaaccggaagttaaatttaaatatttatatcgcaaattactctataaatatttgtatttatgcatttctatgtgtataaaaagataatttaaaaaaacacaaacacaataaaaaatttataaaaatacggtcaatacgaaattgagtactagctagctacaaagaaaatggaagttatttattcttctttttgttctttaaaattaaagatcattcatctcattttttgctctaaaataccatttaatttttaatatctctttataacaaaggtgttttcatttacaactcaaatggaaatactatatggaacacctttactagtaacaccaggctctgaaaatggctttaaaagttggtaaggcacaaccccaactccacaccgattcctcaaatttttgttggtgtttctttcatcaataattccttctaactcttttaatctcccgttgaatctctcaaaagctgcttttataacatcattttcttcccatgaaggctcaatgttctcccctagatactcctcatctggcgaatgattcgacaatatatccaagaccgccatcactgttgtggcttgaatttgtgaaggaaagcactgcatcagtgcttcctcgggtttagcccagaacttctccaaaacttcttcgctagcatcctcagtaggcatgttggttctagcaattgttggcctattaggaaaatatccagcatatgtatattgtccaaagttgacagctgcatggtggccggatgtcacccaaacaattgttgtgacaattcctattaagtcatttggtgtctttaagagtggccaccaaggctcgtcctttttatctccatgaccaacggttctaatttctgtccaccatgattggagctctaggtcagactcaattagggtttgctctgggtaataatagttgacatagtcggtgacccattgtttgattatatcccaaagagctaaaccatcgttggcaaaaggataatcttcgattgttaactttagaccgtgtggagcactcgaatcctccacagccattcccctacaagtgatgacatattatacatactctaaacttaattagttttatatgcatttaggtttttaataattagaaattattttatcaatccaacaatttattatatgtataatacaatattattacctcttgataagatcggctggtaaggcttgttgatcgaatcgccattgtttgtcataggcatcagcacatagctcattggcatattttccaggagagaatgaagattcaattatgcctccagcattgactagtgcctctctagctaaggcattaatctccattgtgtatcgaaaatgtgggtgtaacaatctatagatagggtgtatcacactaagttgtctgtttgctgctattatatatggctcagttacacaatgtgttcttaacctaatcatcattccatgtacaatataataactcaattaattatgcatccacatataccacaatatcactatctaattaattttttcaagaaaagataaatttcatatttgagatcttatgttttacgaaagttattgatttggattttttgttttgttaaatgacaaatttagaccctgtattttttaaaatagtacaaaataatccttgagattaatttttgtcaattttttttaatataagcaacttgaaatcaatttctatcaagaacaaactcaaaaaaatataaccagtatagttataacacttccaagtcaggtcataatattattttgtatcattttaaaaaaaatatagggtctgaattgttgtttaacaaaatagagaattttattaataacttttgtaaaatataagatctaaaataatatttttctattaaaacatgattataacaataataatgaaaatagatatacataccaatgactaacgagttgatgatagccagaatcatgagctagggcatgagctttggcaaacctccatagccaaacagcagtggcatgccaagaaggagaaaagacttccttccattgtggctttccatccattggtggccgagtcaactcaatggccaatggtcttaatgttccttccaaagttagaaaaaataatgttcttgatccatataatgttgttccttttatttctcttactttctttacatatggtagtagtaaatcatggtaatctaagataaacaatttcttttctctcatggcctgtaataaacatatatatatatat

SEQ ID NO: 189340 - DNA, 868 bp, Cannabis indica
tatatatatatataaataatttgcttgagtaatgagtggaatgtcatttttcacgaataattgttattcaaaaagttcaacattgaaccttaacatctttacttggctctggtattcgaatttagtattttttttttttctctttctttggaagttaaattttattcaggtaataagagaaatattaaaaaaaaaatgtgatgatcgaataaaaaataaagttgatttttcatatttggtataaaaaacaattgattttcccatatttttttcacttttttctttgcccacaaaaatctaagttcaaaatatagcaataatacttctagaggtgtatggtgacgccatgtggtgggggagagaggattaaacatgaatagtacaacatttctgggtttcggcctactcaaacctaccttaccaaaaccaacaacaatacttattgaaatcatgaaaaaaaaaaggacaaaaaagtactttaaaaaagacagagagagatactctgttccggaaacgatggatcgtcataaaatataagcacacaacttaagcttttgatacattctatatggtattgtttgtagttgtgtgaattattagaatggtgtactgaactcagaaacaacatgaaataaataagtttggcagacacgtttaataatcatgtcgtgcttgtgtttaagttttgacacgtttaataatagtgtcgtgttcttgtttatcttaatcatatgtgttcgaaaaatttatgatcgtgttgacactataacacaaattaatttcgtaagtttattattttttgaaaaaaaattgtgttatttggataatcatacataatcatgctatcgtgtcatatcgtgtttttgta

SEQ ID NO: 189341 - DNA, 3285 bp, Cannabis indica
ttacttgggtctgtattctgcttctgtcttgttgttgaatctgaacaatagaaggttaaagaatttaatctgaacttttgaattacaacttagaaagagaaagagagagaaatcgaaatacataagaagatcgacgaacagattacataaaaaaccaaccaaacccctcaaaatttcttttttcatctttgggcaggttatgggttgggtgggtttggctgcccccaacccgattatgacaatggaggagggggtaggaaatatttcatataacccaaccaaacctacagacgaacagattaggaggatatggaattatccatggcagtaagaggatggagtgtaaactcattgtaaagcttagtctaaacttgtttggactagtaaaaacaacattccgtgaataattcggactcacactccatcctcttattgttcacctttttgggggtttgattgttttgtaatgttttctattccaaaagtaattattactaattgatcgttttttgttcttcataaactacagcctacaaggcagaaatgtttttgtgtgattgaagtgtttatagtattttgaagtttcttgtttggccttataattattaacttattatcaatcaacatatctatttggtattgtttttctggatagctgtgtttttgtgtaattgtttgtgatcatatgtttggagacaaacctcattttctttcttcttcatcttgaagtttatttgaacaacatacatatttttgttaaatttgatttttacctcttgtaaagcatgtgttttgtttactgtccaataaactcacgaaactttcctttgtctttaggatggatataaaattcgagttggtgattgtgcattatttaagccaccccaggagtcccccccatttattggaatagtacgtaagttgacattagacaagaaggacactctaagtttaagtgtaaattggctttatcgacctgctgatataagtcttgcaaaaggtatatcgcatgacgcggcactgaacgaggtcttttatacctttcacaaggatgagattcctgctgcatcgttactccatccctgtaaagttgcattccttcgtaaaggtgttgaacttcctccagggatatcctcatttgtatgcagacgagtttatgacattgagaacaagtgtttatggtggttaactgataaagactgtattaatgtgagtatcattatcattattatgtttgattgcttgtggtctccattgattaataagacttattatcattaatttttataaactgcaggaacgactagaagaagtagataagccattagacaagagaatactagaaatgcatggggccgcgcaacccggaggccgttctccaaaatcatcgaatggtccttcatcaacaccgcaattaaaatctggttttgatattgtacaaaacaacacaccctcttttcttcacaggctaagggaaaaaagagggagcgaggtgatcaaggttctgatactgtgaaacgagagcgtttagctaaagtagaagatggcgattcaggtcaatttaggcctgaaaatatgttaaagtctgagatagctaagataactgacaaaggagggcttgtggacctttctggggttgaaaagttagttcagctcatgcaatctgacagtgctgataagaaaatagacttggctggcagaataatgcttgttgatgtgattgcagtcacggagagatatgattgtcttggacgatttgttcagcttaggggcttacctgtgttggatgaatggcttcaagaggtccataaggggaaaattggtgacagttgtcccgaagatagtgataaatctgttgaggaatttcttttggcattactccgggcgcttgataagctgcccataaatctgcatgcccttaagagttgtaatgtgggcaaatctgttaatcatttgcgtagtcataagaattctgaaattcagaagaaagctaggactttggttgacacatggaaaaggcgtgttgaagctgagatgaatgtgagtgatgtttccaaatctggacagggtcgtggtgtttcatggcccaacaagcctgcatcgtctgaagtttctcatgctgggagcaaaaaaaaggggaatactgctgaggttggctcaaagtgctccaatgtacaaccttctgtctctaaagctcatcaggttaagcttggttctggggatgctgcttccaaggcatctgcaactcctggattaactaaaccgacaagtgcatctgtgggtacgttttcgaacgatcagaacttcagaatgttagttgctgtaggttcctcagatcttcctttgacaccaattaaggaggaaaaaagtagcagttctagtcagtcccagaacaacagtcagtcaagtgaccatgggaaaacagtgggttcatcatgtaaggaggatgcaaggagttcaacagctggttctgtgtgtgtgaataatgtttctagcagtggttctcgccatcgtaaagtaataaatggctttcaagaatctgctattgcaggaggtcagaaggaaatcgggtcaggtaaagctagtacgccaagtagaaatgtgactcctgaaagaccaactactggagagtcccttgagaaacttgctgatgtttctcctgccgaccacagtaataatagactcattgaaagattttcaaacactggtcggagccctgctagaggtgcctctggatctccttttgaagactctgttgccgcatgtggcagagcttctcctcctgtgaaaaagcttgataatcatgataaaaagcctaaaggtcgaaatgatgctgtccgtgctaatatttcttcagatataaactcagatttgtgtcaaggaaaggatggtgggtttgaagaatctgcagttcctgcttatgtagagcatcaaagggctggtgaagatggtgaaaaatcaacagaagcatctaaagcagctggttcattgtcaaatataatttcaaggtctgggaaatcgtacgaggcttctttaacctccatggaagctttacttgaaagttgtgcaaagatttctgaagcaagtgcttctacttcacctatggatgatggggggatgaatttgctcgctagtgtggctgcaggagaaatatgtaaatctggtaatgtgtcaccatcagcttctccggtgagaaatccatctacgccagagggatcaagctcaggcaatgatggaaaggtgagacaattaggggaggtttctctagccaagtgtcaatctatt

SEQ ID NO: 189342 - DNA, 3235 bp, Cannabis indica
ggtttgtttggagaatttggaaatggtgttcgaaagatgtgaagaaaccaacttggtgctaaattgggagaaatgtcacttcatggttcaagagggtattgttttgggtcacaaagtgtctagaaaggggatagaagttgataaggcaaagctggaagtcattgagaaaaaaaactatagctatatcgtcttctccagctccgacctcacgcaattgattcctcttaaacactcgctatcccgatcattgctaaatcatctgcaagttctctgacccaaagttcatctccttggtttgaaaaatcacagatctaaacgaaaaccaaaaggactaatcttagatctgaaccaattaaaaattcaaaccatcctcatttagaccctccaaaattttggggaatccccgtcgttgatgaggttcatcgccgaaagggttgtttggccttggagggacttcgtaaagtcttctgcttccttctcgcgtcatttccattagttttcccatctcccttgtaagctttaatggcggatcggagatcccgcttcatcgctaatggaaaacatggccaccatccaaagacccattgtccctgtcattgtctccgattgtgattgaaggcctcatggcagacacagttcaaaggaaaggacaagaagcgaaagatgggttaatcatatatgtttgtatatatataggtctagattttttactacagatctaacttttatccaaattttgtggtggatttttaatttttttgacagagtaaatattaggttcttgactatggctttggctttgagtatattttttttttattgatttttagggtatttttaatagaaggtagagggcttctatgagcttgggcttcgtccgacgtggtatggtggtggtggtggtggtcatggcagtgatgtagtggtagtggtggcagtagtgtggttagaagaatgagagtgaagaacatttgaagaaaaatatatggaaaaagagaaatagagttggggaagaagaagaataatgaaaatgtttttaaataatttatttggatttttaaccttaaattgggtaacttgcgaaaattgtcacctatttttttgaagttaggaatttatctacatccaactaatttttcgagaatctataccgcaattttccgttttaatttaaatataacagattgagacattttgtgccataagagaaatgataaatgtaaaagctttcgctccaatgttggcatatttaaaatgcaccgatttgaaaaacattatccgacatatcaaactataattatttttgttttcaagcattcttttgtaactattcatttaagatggtggtgtaggattttgtaaacccaactaaagctattggaatgttatattcctataatttcagcccaatagatatctgccaaaatggagggttaacatcttgtttccttctctttcatgctatatatcagtccaactagatgagaagaatcgacaatgtaaaaattattggcataaaaaaccttagtgatggcaaattcatcagaaggaactgacctaataaggacgacactatatggagggcgtacattatgggcagtagtgaaaagatgactgaccaaaaaacaaatgaaatgaaatgaactgaaccaccatcactcattcatacgccctcccctcgcatcaagataagattattaacgagcttcttacacgtggcatcctcataattgtggttgatgataattattttctatgcatatgctattggtctaatattaacgtaatatcttcatcaaagtaaaccaacggtcaagattagaagaaatccgagcagaaggaattgtgtccataagatgtatgatatgttattggatcattatatatagagggggggtaaggttcccatatgcgcagagcaagggagcacagaacagagaaaggcaaaaaagaagttaaaaaaagtaataaagaaggcatattaagctatggcttcttcaatgatgtcttctgccaccgtcgccaccgtaagccgtgccagcccagcacaggccaccatggtcgcacccttcactggcctcaaatctgctgctgctttccccagcaccaagaaggccaacaacgatattacctccatcaccagcaacggtggaagagttcagtgcatgcaggtatgatgaagattttttaattaaaaaaattatacaaaggctaattttgtttataattacttaattgaagtaattaattagtgatatatatttgtgaacaaattttattaaaaaggtatggccaccaaggaacgtgaagaaattcgagaccctttcctatcttccaccactttcagttgagtcattgcttaaggaagttgagtacctcctaagaaatggatggattccctgcttggaattcactatcgatgtaagtaaaactgatggttattagttaattaattaattagtctccgtaattgtaattattacatttattattttataattaatgaatgtatacatgtatataggacccttttgtgtcccgtgagaacaatagatccccagggtactacgatggacgttactggaccatgtggaagctgcccatgtacggatgcactgacgcaactcaggtgatttctgaggttgaggaggcggcgaaggagtaccccgacgcacatatcagaatcattggcttcgacaacaaccgtcaagtgcaatgcatcagtttcattgcctacaagcccccagtctaagtcaaacactgtcgttttgtatagctaagtaaagtggttcatcacaccctcttctgagctatatatttatatattaacaaaagggtctacggtctctctgattaaatttgtatttaggcttttgaaagatccttttattttcttttcttttttttttttcttttttttttgttcttttttaattttggtactttagatttttggatcggaacagttcgatcgtaatttgctttttgaatttctgttcctcgaactttcaatgtggtcgagaatttaccattaataataagcatcttactctctgtttttttgctccgaaaatcaatcataaaaaataattggttgaaatgatctatcgcacaagtatatgtcatatttttctataatttatgtgtacaatattatgtactatcataacatgatcaacttttatttttaaaataataatatataatatagtttttaaaaaataactaattttta

SEQ ID NO: 189343 - DNA, 1869 bp, Cannabis indica
cccactaaaaaccctctttgagtcttgaaacaaacaaaaacttacaataaaggagaaacatattcatatattgaccatttagtatatatggcttttaaagaggaagaggaagagcttatgggtcaccaagttttgtcttattattaataaaagcaatctgttggatcccaataagctcataagttaccaattcaatccaacggttaatatgcacttttgaaaatataataatttaggtttaagttttttttttttttttttagaaaaggtaataattaggtaagttaatgttagtgtctctgtctctgactcatcatgaagcagaagaagaatgagtgtcaaatattcattgaacaacgtcaaaactttgttttattatgcacagaaagtgatgtcttcaataccaatatctctattttgaaattaattccacctaatttcattgtcgtttcaagacacttcaagtcatacataacatcatctttaatcaaagatataaaagtagagttatatttaacaaaaaataataataattttgtcatatttttatattaaattgtatttgtattttattgtgtaattataaatttttaaattaattatatcattaatactcacttaataatttaataaaaaaatatataaaaatatttgggtttctaaagtggtagcagcgctagttgcaatagggatttttatacgatcttttgttgcaatttaggtagcagcgctagttgcaataggagtttctatgtacaattttcgtaaaattacaaaaatatatatatatatatataaatataaaatttaataataatgatgcaagtcattcaattcaaaagagcatatagattaaaatttaataataaaacattaaaaataacataatagatataaaaaatatagtatttattgtaatgtaaattttgtactgtgctatattgtgatctaaatttaaattactttgttatgtattatatttacatcacaatttgacacaccattgtgagaatagagcaaacgcaaaacaagaaggtacaaaaccagagatataaaccaagaagaaaagaaagactaagaattgccaaaaaagctcaacacaacagttggcttgatctgttatttatataggattttgaagtacagtacaagttgcaagaaattaatagaaaccagtaaaactaactaaccaatacaattaactaactaattgatttaactatatgtgaaacatcccctcaaacgaaatggtgaagaagtcatttgaagtttgctcttccaatagttaaatctgtctctgttgttaataatttggttaaaacatctacaacttggtccagtgaaggaacatattgaactgcaagctgatgagctaatatttgatctcgaacgaaatggagatcaatttctatgtgtttgcaacaagcacggaacataggattggctgctaaagatgttgcagactagttgtcaacccagaggataggaattttaacaacaggaacctgtaattcatttagcagatatgtaagccatcgaattacagcagcagcatttgctagcgctcgaaatccactctcagtgcttgatcttgcaacaacttgttgcttcttggctgatcgtgatatgagattgcagcctaagaacatgacatggccacttctcgatctcctatcatcaatacagctggcccagtcaggcccatcatggataatgcccgttagataccttagtaatctcttgcaagcctcccaatgtgtattggttggagcatgaatgaactcgttgagtttatttatgatgaaagccacatctggccttgttaaactcaagtattgaaaggcacctaatgtaaagaccgcttaactt

SEQ ID NO: 189344 - DNA, 1888 bp, Cannabis indica
tattttttgaagtccaaaaaaacagaacatccatgttacaaaatttacaaaagttcacaacaactctattgcattgaaaaaagttgtttagattacaaattggcctaaaattgaagtatacactaactaatttgggtggtgattataaccattctacaacaaggacagtgagtgttgttgtggagccatggcaccaggcagccatggtggaaccggtgggcacaaggcaagtgaaccaggccctcaccaggtctgaacctctccaagcaaatggtgcactcttcttggtctgaggctctccatgggctcagcttggtccaaccaaacttccttgatccactactacttttctttgacccattataaacctccttttgtagctcttcttttttcacctcagatttttcactatacttttgtcctaaatctctgctcttgttttgcctgatttttttttcatgtacaaataaatatcaacagggcaattttgcaaaattcatgaagttgatcatcaaaacaagggagaaaatatatatatatatataaatataatttacctttttggttcagattttctttgtgttctcaacctttcatccaatctttctttggcttctctggctactactcctaacttctcatcatcttggtaaaactgatttgaaaacattgttcttttcttcttttccattattttccattattttagtttttttttcaaaaataccaccccaaaacaaagatttttagcaaaatatcaaaattaaagtaaaaaaaaaaaccatattagttgtatggtgaagaagaaaattaccagtattgaagctgaggttgtatgagtttcatggttgcttgtatacaaacaaaaggaagatctcctagtccttccacaagatgatgagggtgcacccatggaatcacagctccctccactttgatgaaatcttcttctcctggcacattcaacaccaggaagcattccagccattgattatttttcctttttcttataataaaaggaaaaaaaatgctataatttacaatatctcaattcttcaaacatgttacatagtatactgcagaaaaataaaataaggaagaaatataagtgaggagagtttttgttgtgatttgatgtatgtatacatatataactatatttatatgatatggaaagaagaaagagtagagtatcataatttttaattgattaattaggtaaaggtgaaaggggagacaaaagagggtccataccattgatggctgcccaaatcaccttcctcaataattattcattaatattattattattataaattctagattctatatctaaatattatgtaatgcaactttcaagacagaaggttaaaagggtaacaacctacagagaaattgcatggaagattcaatattgaatggttaatggttatataaatttatatatatatatatatatatataattatataatttggagttgggcttaggcttgaaagttcaattattaataataatggtaaagtggttagcaggctaaaaaacaagttcactaccagttagtatcttggatacttttggatactagtgtttaccatgtgactcaccaaattcttgttttttttaataattagtattagaaattacaaaatgattaattaacaatttagattatcaagtatcaatttaaaggaatgagatatatattggaattttctgacataggatctcaaaaaaacccaataagtggaagtgttctacaacgtataaacaagtagcatgtggtgaagtatatgtgattgaaatataggtgattatcatcatcttcttctgttcaccatcaaaacgaccaccttcatttacccactgaacaacatcttcatcttct

SEQ ID NO: 189345 - DNA, 1300 bp, Cannabis indica
aactctaaccttaaaatatgacatatacatagcaccatcatttgaaaggacattctgatgttgctgcttgtctccttttttaaattttgttccaacatcaaggacatcatctgaaacaatcgatgggcttcgaccattaagagagcctttcttatgcaccctgaaaccagtagaaagtagaagaaactaataagatttatgcactgcaaaaatatattcgagaccatttgaacgaagccgtaaactgaccatatttcaacaaatgaacatagccataaaatgaccatttcgacaactggtttctgtcactagccatataccttcttttttttactctccccttcccttttttaatgtagacaggaaaaaaaatgaaagataaaaattgtaattgttaattagagttgagaaaagattcaaaatcaggatatcaaatcatcaagaaaacttaacccctctgcccaaatataaaaggaagaaacatatcattgtaatatttggacatatgaacaaccatgaatgtcgtactaatatacaaagttttaaacacttttctgaatcagatgagatcctattctctagttcccatatgaaaaggtaaaatgctcatagagaatcattttgcttaaacaggggagaaacaaaaatactacaaacaggaaatatatttatgtaatgcacatctgaattacaactgttcaaattaccaagtttcgtactttttgtgaccataaatacttgaattaacattgtcaatacaaataactgaattcctacctgttcttatggtctgcacctttaaccaggaaagaattctggttgtcactgctgcatgctttctcatccgcagcccaagaacacgaatcagatgaagcagcaacatttccctcaagaacacgaaatctagattcatttgcagatactgaaattcttctgtccatttgattttttgatctgcatagaattagatactatgaaataagtttggaaaaaaaattaaaaaagcaaatggatctactagagaaataaggcattggacaagccagacacacagagcttgaaaaagaacaaaagacagtcaacagcaaagcaataaacagaggcttaatatacagagtgttcctccataactgctcagaattttagacaattaatttatacagaatgacagccaaaaatgtttctcatcagaatttgaccacctaaaagtatattatgtgagcagaatgctcttcagcaaacttgaagataatggaagactccaggataacttgctactttattaaaacaggaaaaaaaa

SEQ ID NO: 189346 - DNA, 1714 bp, Cannabis indica
agtttgtcaactagaaatgagaaccttgaattagataagcctttggtgaacaaatctgcaatttgatcatgtgatgggatgtaccgaacttctaactgtttctgtagaactttatctctcacatagtgcacatcgatctcaatatgcttcgttctagcatggaatactggatttgaagccagagcactggcactgaggttgtcacaccacgttacagagggaagacagaagggaaatttgagttcccttagcagtgtctcaatccaggaaatttcagctgatacatgtgccagggctctgtattcggactcggtacttgacctggacaccactgcttggtttttagaggaccatgacaccaatgtttctcccaagtacacgcaataccctgcaacagatctcctgtcatcagggcagcaagcccagtctgcatctgaaaaaccggtgatattcaacctgttgcagcaactgatatgaagccccagggtactggtgcctttcaaataccttaacacacgctttagagcactccagtgtgttgttgtaggaccctgcaggaactggctcagtttgttgactgagtatgcaatatcgggtctcgtgtgacaaagatattgaagagagccaataatacttctgtaagccgagggattgtgcattggttctccttcatctttggacaatggtttaccagctgtgattggtgttggacatggcttgagattactcaaattaactttctttaaaatatcctcaatgtaccttatttgagtcaaatacagcccagtattgtctcggaatacttcgattcccaggaaaaagtgtaactgtcccaaatccttcaaggaaaatagtttgttaagtctagagatgaaggcatcaactctgttgtgatcattcccagtcactattatgtcatcgacataaataagaactaggattatacttttctcagacttgtagaagaacagggatgtatctgccctggaattttcaaattgccagccaattaaggtgtttttaagtttgtcgaaccaagctcttggagcttgcttcaagccatagagagacttgttcaatttgcacacccagttttccttccctttttcttcgaatccttgtggttgtgccatgaaaacttcttcttccagaatgccattgagaaaggcattatttatatccagctgccttataccccatcctctagatacagaaatagtgagaatgattctcactgttgagggcttgatcacagggctgaaggtttcaccataatcaattccaggtctttggtggaaacctttggctactagtctcgctttaagtctttccactgtcccatctgctctcagtttgattcgaaatatccacttgttgccaaccaagttttgattgtctgatgggggaacaagcacccatgttctgttcttctttaaggcaatgacttctgtattcattgcattgttccaactcgggtgtttgagagcttcatcaatcgtttctggttcagtataagtgatattcgatttagctgagccaatgtatgtcttaggcttgaatatacctgctctagcccgagttatcatttggtgtgtgggttgtaaggctgtggctagagtaggttgaggtgactcagctactggttcaggactatgggactcagtgactggttcgagatcctgctcaacagtaaattgatcaaaatttggaacaa

SEQ ID NO: 189347 - DNA, 2979 bp, Cannabis indica
taaaaactatatatatatacatcgattggtactgtagttttctcgttcccaatatatatagccgttaccccaagacaaaaaacacgtcacctgaataaactctcttttcttacttaccaccacactttcccacctcagattctctcctcccaaacattacttccttctactaatatagtttcaactttgttttgtttttgtattcattcatattctctcactgtaacctaaactctacaaaataataatctcaaacactcttgcgccatgtttgtactacacaccatctgatcccaccccactccactcctccatcaaccaccctagttaattatatatatatatatatatatatacaaatcttatttattatataactatattatacttccacaccccctttcttgatcttctctctcaaaaatattttcaatattaaaataataaaaaatgcttgtatcagtgtttttggctctttttctaccgtgcgcagggatgagcgcagtgtttgtggtttatctttgtctgttatggtacgccacgattcaacagaatgaagaagccgatcagttccggctgccggtgaagccggttcctaatcaaggcttatcagcttcggagcttgagaagttaccaaaagttagcgtgaaagagctggtgatgggtagtgagtgcgtatcccctgtgtgccttgatgaaatcgaagatgggcaaccggctcggcttcttcccggctgcaaccatggctttcaccttcagtgcgccgatacatggctttctaagcattcagtttgtccgatttgtcgggccaagctcgactcccaatttttcagtgactcagatcaaaatccttgttaactaattgaattaaataatggcgatcgttttctctaccttcccccctttttttttactatttttgttttggtatattttaatttgtgtacagtatatatattatattatataaatatatcaacctgatcttttgtttgtttcaatatctgaacaaatcgagtgttagtccttatattttcaattatttgtttacttttattggtgataagatttatgtattaattcttcgcactaataatctaattaagttgctttatttgagatgattattgagatgggatttaggtaaaaagcattgttaacctttcaaaagctttgatgaagataaacatgagccatggaaagcaaatcaatcaatattagtgtaataaattaagtgacaaaagaagatacaatgattgagtttctttttatttattattgtatttgttgtagttggatgcgtttgatgatcaatggtggtagtaacactttcattaaaggcataatcttggaccaatggaatcatggcacgtaagaggttgggagtgttttccaagcgttttaatgaaacagaaccgacaggttggcgtgcttagtaagcgtagagattgaccatttggagcccactaaaatgtgatatgagatggggtcctttcgtttcgccctatagtggtgccactataattagaaattagaatacaagctgttcaagtagcccacaggtaattttgaactgtgtgcaaaatagggttactttaggtatttcacatttgtttattataattaattggttcgctaatcccacctgaaagtatcatagacgaaatagaatagtccaaacaaaagaaaaaaatgtaacttttttaatgttttggagagcaaaagaggaagacgactaaaatatggaatctggtgcaagtatttcagcatttaaatgccttccttttctgcattcccatacaaatgtgtcaggttcttcatgactacgcttcacgaggttcctacgtacatagactttggtaatttgccatctgtatagtgttgtaatcaacgaattaaagaaaagcaattaacaaaaaaataaaaaatctgagatttttattgggaaccaaagaaagatcagcatttattttggtaggtcaaaattcaaaattattctttaattaataaaggaagtgattaaaagaaaaacgttacatgattaaaactgtggtttgttttttctcaactttaattcaattccaattggggtcatagaaacctaaggatgaattggtgtgttttatttaattaaatctaggcaaagtattatgtggaagctgtattaaatggtttttatttttgacactaattatttaatggtaaaaagtagggacaattttggaggaggaaagcacgtcagctgaggccgccaacaatcttggcaaatcattttctttgttgtcagagacagagtagtgctgtgctgttgtggtcaaaaagcttctcacgtgcctcgtttagtgggctggcagtaaaaatgagaaaagagaattgctacaaagtatatatcactcttctactcttttcggtgtgatattattaggagtataaggttttatataatttaacatattaatttttaaaaaatattattaattaattataaaacgtcgaaaaatattaaatagaactggtgtctaatagctaattcataaaaaataaagaaaatgtttacttctcacgtgcctaagagtagaagaaaagggagggataagtgaaatcttttatttaggatgcagagattttttcaacaaaatatatataatatcatatttattttttaaaaaagtaataaataattatgttagaaaaaataaaattatagttttagaaattaatttatattttattctttcagttctctttctaataccaaataatataaaagaggagttattttcctctccatttttaatactctttatcttttttttatctttttcttccattctacttttcatcactctaaccaaacataaccttatgttttcccagtatataccttcatcaaaacataaaaaaaataatagttttccaaataaaaattgatctctctgaaaacaaaaaatgaatgttagaaaagagtgttccttttgt

SEQ ID NO: 189348 - DNA, 2462 bp, Cannabis indica
atattatttatatgtatgaacaaggaataatattaatcaatgataatgaaacccacgtcgatgaggttattatcacgtaatacaaaatatggtatcatcttaagtcgatctcaatttcttaatgtattttttttatatagttattattttctaaaattattatatatatagataaattattgggagaattgtttaattaagacgcgcgtgagaaattttagttgggagaatgggtgatgctctgtaatatcggtggtgtccacattaactaaaaatgttaaagcatactaattgacccacacacgctaatcactcattaaattatataaaaataagataaaaacacaatttgtaataaaatgacatacttaacatggtattttttcatcaaaaaaaaacatggtatttaattatgagtactattaaggaaacagaatattgaccgttcaatcaaatacgttatctcgaagcgttagcatgattaatattaagcttttgtgattatggtgtgatgacagaatatttgtatgcataaatgcatggtaccttttataaaaataggacccaaaaagaagaaaaaaaatacaaatattatgtaaaaaaataaaaaagaaacatagaatattaaacacgaggcccactcactgaaatacaaaatagaatatcaatcattttggacttactaaaacaaaaaaaagaaaaaaaaattgaagaaagaatcttttttatttatgcaattgtcattcaaatgaaatctttttttctcactttatagcgcaatcaatgctctaaatatgttttttagatcgacaaagaatttgtttgggtcataagaagaaatattatcattatttttagatctttttacttgattgttaaatgttggtacttttacgtaataattttaagttgaaaaattgaaatcttatcagtaatttctgttaattttttcttcataaaagaacacaaaataacagtgttaattttgagtgtaaagtgaaattaaagtacacatatgatttaaagtgccacttggcattacctcggttgaggcgccggcttcaatggctttgacttggattatactggcaggccagccttaactcacctaatcacctacttaaatactctgattctaatatcttaaatgttttaaatattataaattcatttatttacaaatatttgtcacaaacggatcccaagttcgagaagaatgaaaaaaaggtgggaaatcaaaactagttagggggaaacacacacccgtaagctgtaaagtagccatattttcctcttcgatttttgttttcttacttcttcttcttcattctctttcgtctcatctaattaattatctttctttctcaaattttgatgaattcaattaagtcccctttttttcagtgacggagttggattcatatgaaacttaattcactttctctcaccagcccagtatttaatgttttatcctctggtgaattaatctagaggtgggtataattcctcattcatggaaaaaagatctcacgagatttccatggacattgcaataccctttattgcgatccaaacttgtaagtcttgtatataaaaacagtttttttttttttaattgtgtctaaatctgtactgtattcataacattatcttattttaattgattttgtggtttctgggtgtgtaggaaaatgagtcaactcggtgtgattctgcaggaatcgctgagtagagagagggaagcgagaacgattctgtgttttctgagggaacaaatggacgtaggagatggaggaagaggaagaaggaggagtctgaaagaacggtttggattgaaaggaatgggttgctgtggggccacgtggggtttcaggccaacagtaataagcgttagagataatgatgaagaagaaaacgacaacgacaacaacgaagaaggagaaaaccaagaacgacaatctctggaaactatttttaaccaaggaacacttcagaatcacccggagaatgatgcggatccggtttgttcagatccggatccagatccggctcattcggcgccgagcatgaatcttgcagcggcgttagccgccgaaagacaattccggcaaacaaacgaaaccccagcgagggacgaggcggcgtcaagaacggcggggagtacggctccgggaacgccaatgagggtgtctttgatgagattactggaggaaacggacggtcgtgatgggagtacggagaagagtaatgcagtagtagtaggagaaggaggggtggggaatgattcggtgtgctgcgtgtgcatgggaaggaagaaaggcgcggctttcatcccatgtggtcacaccttttgcagggtgtgttcgagagagatgtggttgaatcgaggtgcctgtcccctctgcaatcgtcccattctcgagattctcgacattttctaagaccatcaccatcatcactat

SEQ ID NO: 189349 - DNA, 3988 bp, Cannabis indica
ctcctttctctttttcaaaaaaattaaattttaaaatggagggaagaggtcataataattagtatttaggggttaagttgttaagacaaaagagaaagaggttttgagatcggaaatattgagaaaagaaattagagatccctttttgtatcttggagtaattttggtgacatttctagaaagcttcttatcacaaatctaaggctcaaatcatagaaactgagttgttggtttgttcagttgtttcatctcaaaatgaaaccaaacagttttgtatttctagaaaactgcatttattgtgtgtacttttgagaagaaatgaatatatttgctgttaaaaaaccctcctaatgcttctaaacaagataaaattgatttgtcttgttagattttacatttaatttcacaaatggctctatctttcagacatgtctaatgacttgtaattcttttttaaaactttaaactggttttggcacttgattatcatggtgatatttgcttcctaggacttgctaaacctggtcctgttatagaaactttttgtaccgacgaattagtctcacagcatgtgaaacttgacggggttgttactttggttgattccaagcacgcaatgcaacaccttaatgaaataaaaccaagatttgtggttaatgaggctgtagaacaaattgcttatgctgatcgtattattttgaacaaggtatatttgtttgtacatacatttaagctgacatttgctttcacaatacggggatgattttgtgcttcgaagctaattggattccaactattcttgcagatagatttagtgactgaggctgagctggagacattgaccaagagaattaaggtgtgctttctgagatattaataactatttacagtttaacaaccccgaggggtggtctagtggtaaggactgttggaaagttctagcaggcatttgttcgaaggtttgaatccccatagactcaaaaatcttggggccactgcgaggtctctcggtggaactgctagggccaaaataaaaaattaaataaataaaattaaatataactatgtgcagtttaatgaatagcacataagaagttattgcttatatatgtgtcttcctctgcttctacttccaaaatggaaacttctctgctaacaaggagaccagttgaggaaccagctgcttcaactaaaagaaaccaaaaaaatcaacttttgtatcctattcggcttttgtgtttcactttaatagtaaataatttttaaaacttattcctttatttgcatttgtgtcagcatattaatgggatggcacaaatggagctagctaagtttggatctgttgacatggacttcgttcttggagtgggaggttatgatcttgataggttattagctagtctctatgtctttccattccatcccaatatttatttccatttcattgaacatgttaatgcgtcaattacaggattgattctgaagttcaggtagataagtcctgttctacaactcatcaacatgaaactgggaaaggtattgttttctatctgtttcttgctttccattttttttctgtgtttgtttttttcttcaaatttatttgatttataaagagcatggtttcgaaacagaaattatgatttatttggagtgaataaatctatatattacaaactaaatttacttgtcatacttgatatactaatagtggacatctttttttttttttgtatagtgtagcatacccaatcattttttttttaaaaaaataataataaaaaagaattagtatacctttctttgtttctaattttgtgttatgttaaatctcttaattttcaattatataaaagaaatgttatactgaccttgtacctaagcactttgtagaggctaacctagtgcctacatggaatgggacaagattaccatcatgacaaagtgtatgatcagcaactagactttgacacatgcatgtgaattcttgtttaagaatgaatatagttgtcagttgattatattactttttaaatagcaatatcaactacatcatatcaacgatatgtttgatttttaaattactttcttggttatcaacttatttcattacatcacttgggttggataccacagaatgcaacaatcatcatcatcatcatcatcacaatcacgttcacgattctgctgtcactagtgttgctattgtttccgaaggaaccctcgatattgacgaggtaataaactctttgttgtgtgtattgaattgcattttacttcaggaatccaatgttatgcctataaccgtatatctttgcagtacacttgcctgttgggttttagttaagccaataactatccaggcagcgactcctttgaattattctttattttattatccattaggcactctttctttaggtgcatacataaatacttggatacctgcttacatacataacgttcaccatttatattattatttatttattagtttttttgaaaagctaacgttcaacatattaattggtagaaatgcctgtatgtaattcaatgaaagttttatgttgggtttttttttttttttttgtggcaatatagtcagtgtatgtatttaatctaccaatgacacaatacacagacatgattcagaataaatacaaaccattactacatgagatgaatccagtttctactcactaattaaatatttgagcagaatatctttatattctttcacattatgcaaccaaagtggaacccattgtctaatctttttccataagctttcaggatcacttttctcgtcttcaaatactctcttttattttttttaaccaaattgtccagactgctgccaatactgcagtgatccataaaatttgtttgcccctacctcctttgaaacaatagagatagtgaggacattgtagtaatgaactttgtttacctacattggctttagccaaatcttccttgacgatgactacgccttttgaactttgactaatgaaactttaggtgcatgggatactgagcttaacaaatgatcttggtgttggagatttttgaacacacagatgacataaaataaaaacctgacgaactgttttgaagattctaatgtaaatttgtaatccttccattgcttctgcctgcaaatgttcttgaagtcacctcgtagaatgtagcgaatagccaatagtgttctaatgttaccttccttttttatggtgctaagtgacactctcatgctgtcgtattcatgttaacggtccaggttgatgattggcttgaaagactgattgaagaaaaaggagaggacttatatagaatgaaaggtgtcttgtctataaaagaatccgatcaacgttatgtttttcaggttctcattttctcatttgtattttttttatgatatgtatatttatttatttatatatatgttttcgaaaaagataacgtataaaattaactcaacattaattatatgtgctcttttcttgtttacttgttataagggggttcattccatactagatgggtgtccaggcagcacatgggaagatgatgagaaaaggataaacaagcttgtgtttatcggaagaaatttggatgaaaccgctttaagaaggggtttcaaaggttgtctactatgatatgaccaggcatgtatctaatgattatgtcatttatctatacattgaatttttggcatttcagctgttgacttcaacagacaacaattaaaaatgatcaatagattagaaatctgtgtgaagtaatacaagtatttttgcgaaaacaatctctcaagaaaactcattgaacttgtgagtcaataaaaagtaaatgttatccataaacatatccttcattaatatcaacacaaagaagaatcactatcctctctattctctatagagtcattatctttcttaaaccatggtgttcaattggcccacaatataccataaaattatatttg

SEQ ID NO: 189350 - DNA, 795 bp, Cannabis indica
taaggttatttatacgattttggaagtgtacaagtcaaatgagggatgcttatacataggttttctaatgaattgcaggaagagttctggaccgatcccagcaggtccatttctaaggcctatgagagaacagaccaggctattctttctcacagcccagacttgggacgaggaggatccacggcagttactgccattttgatagacaaccgaaagttatggattgccaacgtcggagactcacgagcagttctctcaaagaaaggacaggcagttcagatgacaattgatcatgaacctaacactgagcgtggtagcattgagaaccgaggtggcttcgtctcaaacatgccaggttgtttgactaatccagaggtctatggcatatgttcatgttagtatgttccttgcatttcacggggaggagtaaagtattcatttgcaaaactatatcagcccttggcccatgcattcattcaaattatcaaaatttttatagtggtgcagtggtctatctagccttgatctatattttagattgagactagcttagtttggattgaattataacgtcatttaggattactgaaggcctaaaatgaatatgttttctgagtttcattctatcattttgagggaataagtttaatctaggaaaatctactgggatagttccatgattaactttcaaaaagtcggttttgtttatgcaaaacaaaataattgaatatttcagactaagagaatataacaaagggtgactgctatactctagtatgattaaatttacactag

SEQ ID NO: 189351 - DNA, 578 bp, Cannabis indica
ataaaacttatccaatccaatattctattagatttgattgattcagatgattaaaattaataaacctataaatattagatgtagttccataaatacctctacataactattaaatattatttggctttggtcatactagtagtcataccatccatctgaacatggaaagagtcatcatatcttcaaaaagatgagtttgtattgtcatgaaaagaattaccatatcttcaaaaagatgagcatatagagtactataaatgtggtgtatatacttttttttttagcttatgttcattcattggtagtgtataagaacatcttcaatagaatgatatttagtatgtattttttccaatgatagtgtattaaagtcaaaaatgattacaataaactgatagaaccagatagactcatgttgctattgctgtccatgtaaacgttttgtattgatcaaacattacaattacacctttcttaacaatcacaggaacaagccagaaaatgtttcagtaaccatttaggctaagatgaagataaaaaaaagaaacagttttacaaaacataaggttaaaaaaaaa

SEQ ID NO: 189352 - DNA, 1362 bp, Cannabis indica
agcttctaactctaaggacaaaaaccatacaaaatctccatataatatattgtgaagaaactcattttgtatgtatacatgaatttagacaattgtaccgaaataacttcagacaccaaattttattattattattaaatttaagccagaacaaaccagcacacttttcatatattttgttttggtatcttcgtaattaatagttatagtttcttttaagcaagctatcgatttgaattcacacgcttgtattaaataaaaaaataaaaaaaatcatgatatttgtcagaattaaatatctgaagaattttaagagaaaagatgattgcttcaatctaacgggactgcaattgtcactaataataaatacgtaaacacaataaaagaaaaacattaactcttgtcagtatataagtgtaaagaagaggtatgaaagtaattagagaaaaataaaatgaaataaaaattagtgtgcaacttgaaacaaatcaatacaagtaaaagggtatccaaattaaataataaagaaaatgctgttttgttttccaagggcacatgatctggcaattctctgatagctttcttcttattatactgttgaaatatttgtcaatatgtgtaagtgaatatatacacatatgttaaatacagtagtgtaaatccttttctaaagtgttttaaaatattttaataatattgacagaaagtaaggttgaaactatttatctcacattctgtacatgtaacaaattattttaatcttgttttaaagacaccaaataattttgaacttttttttaaaaaatatacagtattacatacaaatatatatattaaaatgattagaatgtggaaaacactagggagtacatcccgcaccataaaatctcgctcaaatatatatgtatagaaattattggtattaaattgaattggggtttgagcatatggagatagggatttgtccaagtcccaaaagcttaggctaagggggccatgtgataaaagtagctttctttctcatgtaaagcgaccacgcccgtttggctgcaatcatgtggtttattttgttataatttcatttcaattcacacttttcattctttatttttctcaagtctcaattccatcccttaatttcttcttctccacccctatagtatatacgtagggcttgtttggctactaattttgtatttggttatgctacaagactcaataaactaatccacttaattctatttaattgagattgggataaataacctattttgacaggattaattatattttgaattttgtaaatatattttagatttaaaaataatataaataggagaatgaaaaatttatttataaatt

SEQ ID NO: 189353 - DNA, 4027 bp, Cannabis indica
aagaagagatatgaaaaaaaaaatggtagaaagactctcttgcatcatttaatctgactcatttaactgacatattaaagtgacaattttaatttaatcctattttgaaaagtaaataatttaatttaaaaatatagatatgctaattggaagtcctatttatattggtgttttttttgtaaacgtagtgtgcaattattagttccataccagaaagtgtgtcactctccctagtattagtgcatgtaaatgtaatatcttctaccttaaaactcaattggtagtgtttttttattttaataccaattttcttaacattatttttgctatcttcttttgaaaaatacaaacatgaatttaaatatttctcatatcgcgaaatttgaattcacccatttgactttgttcataaacttatgtttgaacaatatttaacagaaaaaaaaaacaaacttttcaatggtgacaaaatttgaaggaaaaataataataataatttgagactccaaagagaaggacaaaaacaaaaatagaaaagatagtgattggcgtctcattgatattgcacacgcaaatatggaccatattccatcggcccaaatataatatccatttgctgagaaaagtcaaaattgttaaaaagaaagagaaaataatacaatattcatgactggttccttcaataaattcataacaaatacaagtatcgtttcggggtcatgaatttatattcatgactctcatttttgactgcctttccaataaaatatataaatacaatgttagataataacaacattatcattaacaacaacttctgataaattacaataaaatatacaaaatttaaacaagctcattaatttcaaccgtccctgttgcttaatttaataagcaatttgctagaaaacattacaaaaactaactttttattttgttttgttttgtttgcaattctcttttaatctgtataacaccataaaccataaacacttgaaagtcaagatgtccgtacatttcattttgactatttagaaaggataaaaaagtagatcttttctttgaaatttcttcatcttttaactgtgtttgttaactttattccatcccattctaagatccaagtcaataaacccatttgtcaaccgcacatatttttctctgagctccaatttttgattgagtactagagcttctgttctgttctggttttccctcgttgaagctaaaacaactaggtagcttttctttcaatcatttctgatattatcattcttttttttgttcaattttttgtattaaattgttccactttggttttatgattttgggtatttgttgattttcacttcttttattgtttttctctttatagggagaggatttcattgtattatcaagagggtaaccaaattttttgaaggttaaatgctttgtggtttttccattaaaaatctttctagtttggtggtgaagggttttgaagttcatcaaagaaaggttttttatcttgagtctttgtgattgttcttttgggtttgcttcttctatggctatggcagattttaaatctgtgtttccggagtttgaaggggaagataagttaattgctgcggctaaacacatatctagggaattgagctccaataaggggcttacagatgaagctaggagaattttgattaatcttggtactcagttgtcatccatttccttaactgatgagactaagagtgagaaggtttgtgagatcaaaatgattgaaaatcaacttgattctgttgaagagaaggttaggatttgggaaacagatcagtctatgatttgggattctgggatggatgagtttgatgagtatcttgatgctgctgaggaggctaggaaattgactctaaggttagagagtttgtctttgaatcaagatgaaggtggtgatgaaaagaatgagctgcaaagaaagtcttatgatattcttcaaacaacaatggatagacttgaggaagagtttaaatacatacttgttcagagtagccaaccctttgagcctgaacacatgtcgtttcgttcgagtgaggaggacactctggatgagagctccatgaactcttttggggatgattcagttgaggaatctcttcaaagagatagtctcagcagaatctctgatgaattgattgtggatttggtcaatcctgatgtgattcctgagctaagaagtattgtgaatttgatgttcaactcgaaatacgatcgtgaatgcattcaagcatatactaatgtccggaaggatgctttggatgagtgcttgttcattcttgagatggagaagctaagcattgaggatgtaatcagggctgagtggggtagtttgaactccaagatcaggagatggattcgcgctatgaagatctttgttcgggtttatcttgctagtgaaaaattgctatgtgatcagattttcggggagcttggatccatcagttcagtttgttttgttgaattatcaaagacctcaatgttgcagcttctgaatttcgcagaagccatgtcaattggccctcaaaaaccagagaagttaattcggattattgacatgtatgaggtgcttgctgatctcattcctgaaatagaagccttttacgtggaagaatctggttcttctataaccatggaatgtcatgaggttctaagcagattgggggactgtgtgaaggtgactttcgtcgaattcaagaatgccattgcttctaaccactctgcaaatcctatatcaggagggggaatccatcctctaaccagatatgtcatgaactacttaaggacacttactgactacagtgagaccctcaactttcttttcaagaacattgatgaagaaggtgatcagttcacaatattgtctcctgaaagtagtccaacttttagagaagaggagaaaagaatcagactttccccattggctcagaatttaatgtcagtaagtgaagttcttgaaggaaaccttgaatccaggtccaaattatacaaggatgtttcattacaacactttttcttgatgaacaacatttattatatgactcagaaggtcaaagggtctgaactaaggcctatatttggagatggttggatcagacatcacaactggaaattccaacaccatgaaatggactaccaaagagctagttggggtccaatcctttctttattgaaggatgaaggaatacaaaatcctggttcgaactccgtctcaaagattgttctcaaggagaggttcaggagcttctatcttgctttcgaggaaatttacaggactcaatcagcatggattattcctgatgctgagcttagagaagacctgcgaatctcgacatctctaagagtaatccaggcttacaggacatttgagggaaggcattctactcacattagtgataagtacatcaagtacaatgctaatgatttggagaattatcttttggatctgtttgagggatcacctaaaatattacactgtccaagcagaaggtgattttgcttaatgtatgaaacataaacatgtgtttttcaattagtcttttgctagctcttgtttgataaataaacacagggttaggacttaggctgagtgtagtcttttccccccatttaagaacaaggggagagatatgattgttaccttattacttccatatacatgatgttgtatggtttcaaaagtttactgttatcatttgttaattcatatttaatcaatcaaataatattttggactaactggcttggacaagtttgggaaatttgtttgttcttagaatatttttttttcttttgaaatgtctaaccaggtcaaactgttggctcaactgcccaaaatgccattaaaagcaatatagataagctttcacaggtcttgtctggcacgactaactttgtagaaattgaagccaacttggtatttgaacattaaatacacatacccacgtagggtttacttgcattgcatctcatcaagttgatcttcatgtca

SEQ ID NO: 189354 - DNA, 2789 bp, Cannabis indica
tgagtgagctttagttctatttgtagtgatgtttctaatttgtttgtcgtggttggtggtggcttttattatgctatatgtgtaactcatgtatggcactagccaaattttttacattctccttaggagagttaatttgtgttaagccacgttcttccattttctcaaaagacctcatactaatagagtaggtaaaacacttatattcaagacaactcttacttattcttcccatgtgggacttgggttaatacttcaattgttaggatatcaactcacatcccacattatgaggctatttggaaaaggcctataaataaaaaaaaattcaatacattcaacatctttaattagtatttttatttagttttaatgagtaattatattttcacatgttatacgtaaaatatgtacatatgaaaattaacactaaaatgtaactttttttgtatttagattggatggatccaattcaatcaaataaatactggatctaaaatatttaatgttagaaggatccgatccgatccaaaaatactaggtttaacccaaattaaaccaatagatatatatgaaatatattaaattctccacatttattggatgttagattggattgattggatgactaaaattaaacagatcgaatgataaaatttagcatttaatatataatctggatagaacaaaaacattaaatatgatccaataaaaaacctaaactatgagtgtaatataaatgttataaatcactaggaacaatatggaacaataccgacaaaaatttgtcactataataaatttcaatcacacatatgatagttatctaattaccaaatcacaatcacagggttaaaggttggtagtccactttaatatttttattttgcataaaagaataaattttttaatttatacttgcttcatttaatttgttttcaatattctcttaattaacatgcatgcattaacacatttatttatttttgtaatgaataaatctagtaatattaaaaaaaaatggtgacaaattgacaatgattaggagaggggaaggattatgatgaaattcgcagacttaattgagcaaaacttggaggaactagccacactagaaagccttgattgcggaaaattgtttaactataacaagtcgatcgacataccaggggtggccgccactctccggtactacgccggcgcagccgacaaaatccatgggcaagttttgaaaatgtcacgtgagtttcaaggttacactttgcttgaacctattggggttgtaggccacatcattccatggaatttcccttccactatgttctttgccaaggttagccctgccttggctgcaggctgcaccatcgtactcaaacccgccgagcaaactcctctcacagctctgttttatgcccatcttgctaagcaggtaaggtattcatattatataatatatgatttgggcatagttttaaatattttttagtgagctgaagtgaagcttactattaattaggctggtatacctgatggagtgcttaatgtagtgactgggtttggaccaacagctggtgctgctattagctctcacatggacattaacatggtattattgattatatatatgtatatgctataatatgcagtactaagtaactttatattgtattagttgaattattggtttgctcatgttttgttgtaggtgtgttttactggctccacagaaacaggtagagaggtaatgaaggcagcagcaatgagcaacttgaaaccagtttcattagaattaggaggcaagtcacccctcatcatttttgatgatgctgatattgaaatggctactgatcttgcccttactggaatcctttttaacaaggtaataataattatgtagcttctttcactgatgggtaattatgtgtaagttttagcattttggattgtataattagcttattaaaaatgtttaagtttttatcacttatttgtattatgacccagggagaaatatgtgttgcaagttctcgtgtttatgtccaagaagggatttatgatgaatttgtaaacaagttagtagagaaggcaaaagcttgggttgttggagacccttttgatcctcaagtttgtcaaggacctcaggtaattaactagaccaaaattagcattagataaagaaattaacattttgagtttgggataaatatatatatgctaatgtattgtaggttgacaagaatcaatttgataaaatcctaagctacattgagcatggtaagagagaaggagggactttgttaactgggggaaagagggtagggaacaagggatattacattgagccaaccatattcactgatgttaatgaggacatgcttattttcaaggatgaaatatttgggcctgttatggcactcatgaagtttaagtaagtcaataattaacttaaataagctttattaatattgctatttgtttaggctaaataccattttgaacttagtgttttacaaaagttacacaataaattctcttctttattaaacgacaaaatagatcatatattttctaaaattgtaaacataagcccttgagctcaattcaagaattttatttttaatataactaacttaaataattctaatacgaataaatacagaaatgtaaccagtgtatcataatatctctagaagagattattattaagttttatttaacctaaaaatctaaatttgagatcttatttgtactaatttagaaaatacagagtccatatatattattattaa

SEQ ID NO: 189355 - DNA, 898 bp, Cannabis indica
tttcatagattgaaaatgatgttcttgagcagcgaagtctagaggttgcagttccggaatgaatgggacaggtttgggtaatcgatttttaatgtgaggacatgatgattgaaccattttcattcctaattaaagataggaacaacagcagccccatcccccaaaatgcatagtgtattgtattctattgaatcatcacacagagaaggtggccagcttacttctagttatgcattcttgtttctcgacccccaaatcaataggctcctcatcccacaaccaagagtcagccttatctgctggatgtatgtggcacaatattaagaataatagagaattcaaataatatatttaatcccattctttagtagtgtagttattctgttttagattaattcctttcgtaatgcaaattagggattattttgttgttagtttagattgataggaaattgattctcttctccaatatatttatatatctcctcccgatgatatcaatgaaaatgttatgccatcattaatcaatttatacgttccaatatagtatcagataataacagtcgatcctaaacctttcccacatcatcattatggctacttgccatccccaaagcaggaaatttaacccaaaatctttaactcatcaacatctcacacccacccatcatcaaattgacctccaccaacatctcacaaaccaccaacagaaatttttataatatttaaataattaatataatttaaactattaaaaaaaaaaaataataataataataataataataataataataatatcgtatgagagttttacaacatctcaaataataatattaataagaaataaataagaaagtaaatgtataaaaatgagaatataatttgattggaattt

SEQ ID NO: 189356 - DNA, 4179 bp, Cannabis indica
cacacaatattccctataaattgtgaagtcattcaatgcgaaagggaatgctttttggtactcttaactagcgattactctgcataaatctttgtatactctcgagagctattaagaaactcacatggccagaccttgtgatcttagtagttttctctaagtaatacaattaaaaggagagtatactattaccactatatggagccgaacctttataattcttgttttattttattgtttttattattaatttattatcactcttgttgctttaattaactctgtattgttggtcaaaagcgagatcaatagtttatattattaatataactgtttgaaattaaatattaaatcaactaaaaataattcttatgttttcttataggaaataaacaaggtaaacacgtatatcttttttcgtgggtaacagagttgtgctgaactactgataggaaaatgtaaaacataacgtttgatattgaattcataacaagaaaaaaaatgtaatatatgtgtataaaactaaataggctgattgagatttttgccccttaaactttaacacgtacaaaatcatgtccactgaacttttctcgccgttaaaaatttttcctgaactattgagattgttagatttaaggacttttgtctaatttcattcaattttactttcggtgattgtttatgtactaaatcatgctccccagactttgatatctaccaaatcatgtccctcgaactttgacatgtactaaatcatgcccctgaacttttattcatattagacttttttactaaaattaggcaaaagtccttaaatccaataatctcaatagtttaggggcatttttgacgatcttaaaagtttaggagacataatttagtacatgttaatattcgtggaaaaaaaatcatacaaactgaaaaatatgatatttatgccttaaatatatttacaatttaatactaggttttgctgtatacgcatattcatggttgatacagtaaagagggtaatggtaaaaagcccattggatcatttaatgttcggcccacgaagacccaataaaaaaggacaattccaataatgaaggcgtttgacggtcaacggcagcgtgcaaaaaccgatgtaaatttactataacaggtccatggaatctccgttatctacacgtgtcgtgttctcattggaccttactcccttccacctctcataggcgacaattttaagcaccacaaccatccccactttttccattccattttatttttctctttgcgtgcggctacgcgcttactctcttattttcttactctaaacaggtatggacccaaacccttcttcccctattcctcattgatttcgattcaggattttagggtttgccttctcttttcgatgaatttctctgtgattttactaatttgtttacattttgaagatctagtgttatgagtcggctttttatttgtttttattttgtttttttggcttgtttctgatttggtaacgggttcatgtgtttctgatatatattgtattaattttttattattgatttggcggttgggtgagtttgttttcatcacaattatatggtttctttagatctagaagattgatcgtaaaaataataatttgttttttctagtttgtctgggctttataattttttttttcaaacatatataattgtgtgttaatggattggatttcgatctgttggttgccgagataatttgtggaaaaaaaattaaatgacaatagtaagtaggtattaacttttgttttcagtataaaagagtataatcttttgttttttcaggaatataggtctgttactgttaagattcatgtaagtgtgtccgcgtttcttttctagatctgaatacccatgtgggtctgtaattacctttgttcttttgtgctttattattctcttcgtcaaattttattgtatatacgatgttgattcagcgttttatgatacatgatttagaatttcattaaaattaatttttagaaatgatctttaggatattctagtgatgttttcttctactgtcgttttatttattgggcatgtatattttcttcagatctgaattacgaaatatttgtgtaattacttagtaacctataacttttttgtttgtccatagtaatgtttgccttagagaaagttggccttttatatcttattttgacccctacttgtaaagatgtatgatatgatttggagtttaattgttatacgtcttttgattattttccagaatccagtaatacataaattatttaaagatgtcgccaactgaatcatcacgggaggagaatgtctacatggccaagttggccgaacaggctgagcgttatgaagagatggttgagtttatggagaaagtagccaaaaccgttgatgttgaggagctcactgttgaggaaagaaacttgctttccgtggcttacaagaatgtgattggagctagaagggcctcatggaggatcatctcctctattgaacagaaggaggaaagtagaggaaatgaggaccatgttaagatcattaaggagtacaggggaaagattgaatctgagttgagcaagatctgtgaaggaattttgaaccttttggagtctcatcttattccctcagcctcatctgccgagtctaaggtattttatcttaagatgaagggtgattaccacaggtacttggctgagtttaagactggatctgaaaggaaggaagctgctgagagcactttgttggcttacaagtcagctcaggtgtgtactatcatagtaaagtagttctttttgttggcattttcttattttggtaatggttttttacatcttatttttttttatatctctttgcaggacattgctcttgcagaattggctcctactcacccaattaggcttggacttgctcttaacttctctgtgttttattacgaaatcctcaactcacctgatcgtgcttgcaatcttgcaaaacaggtatgtacttttgtttgcatatattacatacagtcaataaagattcttactttcatatctaatctaatctaaattatgcaggcttttgatgaggctatttctgagctagatacattaggtgaggactcgtacaaggacagtacattgatcatgcaacttctccgagacaacctgacactctggacttctgacatcacggtaactttctctcccactttcaaatatctttatatgtttatacatattgatcatgtaaataatttttctttgttatggtgaaattttaggatgatgctggggaggagatcaaggaagcatcaaaacgtgaaactggagaaagcactggacagcagtgatgaccgaagaaaagcttggatggattaaagaagaatgtgtactctgtattgtgatttttaagtagatccaatccaaccatggttgtagttgcacattttcttaatgaatgaactcagatgtccttgacgtttcagggttggaactattccgacgtattatatattttgctattttgctttttatagttggtgagaagtgtctgttttttttttatttttttttcctttttcaaaattatttattttcaaactagcattggaagtattcaattttagttttgaatgaggtgcatgtatgtaataggtcagtgggttgtgtttatttttatatgtttttgtcgtcgttttgtgcacgttcaagttaaacattcttgattcatgaggtcatttgtctcatcggaatcgccagcttctcactttgatttgaacgtgtagatcaaatatattctcttaaaaaagacaactcattcttttttttggtaaattagcaagtgttatttcttaactaaattattggggacagtgtctaccgaaaattatggtaaaggcaaactttttgcttttaatattcttttaaacttgattagttgtattttaatgaggaaaatgggaccgaaaaggattgtaaaaacaaacacttgtgtacctcaagtagtgtggggacatagcagcaaggattacttggattttcgcttctatctgaattagtcagcaatgactaagattacattaggtgggtcacaattacaactcacactgataccccatcttttattttagattaattaagatctttatttccgaaatttgaca

SEQ ID NO: 189357 - DNA, 2279 bp, Cannabis indica
taaattggttattttattgtaatacaaaacaattgtaataaattataatttatgtattttagccactatttttggaacattaaatatgaatgtaaatttaagataccaagaaataaataataaagagtttgataaataataacttatacatatttttgaggtatatctatatatggagggttaaaaatgataatcaaagagggttagtttaaccgacaaaaactctttaataattgtttccaaataaataattaaataataataatagtaataagtacacagaaatcaatccaacaagatcacatttatgaatgatttgattgtatgttaaacattttgtgtccatacataaaaaattaaagagagagagagagagagagataatatgttttgtgtaattatattgtgaaagtttatatatatatatatattatataagatgtgccgacacttaatgataataattaatacaatttctatccatatatatatatattattataatgtttaattactatatataaacctcacatgcattgtgaacattcagtgatatcatgatcaacttcctttcttccatatatatccttaagaatatcaacaagtttcactttatatgtcgctggcttgcatcttccaattccttaattttcttgtcttgttgcaaagaagaacaccacatttacagtctagctcaaataaagggaaagcaattacatttatcatcatttctatcaatttatgtgttgcaataacaactcaaccatgtttaataaacaagaagaaagttccagggttccaattattttaagatttaattattcttatttctaaaagaaaaacaatattacatttacaggaccttttatttatgggaaaacttgtgaagcaaacaatgaatccagtagattgaaagccagaaacccatcaatatatcctagtctaagatggtatttttaaatgtattgttggggatggggagcccgaccttttttttttcttcttctttttctttttctttcttatctagtattttataactttgtataagatatataatatatattatatattctggctctaatcatttctgactgtctccacactagaatatcaatatggccccttaccctgagtcttttgatacccatctgtcctttttcttctgtcccccccaaaaaagatagtaattttaggaggtaaacaacacgaagttgggatacatggaagatggggtaaacaacgattgtaggaggtaagtcaagtttataagccacagtcccaacatcactcaagacttgaaatggtccataaaaatgggcagccaacttctcattgcgaaggacaaccaacattttctgttgataagggcagaattcgacaaaaactaagtcaccaacctcgaattgaatgtcgcggcgatgttgattagctgttgtcttcatctcgtgtttggcacgaaggagatgcattttaagatcatcgagaaatgcatatcgttcctccaacaactggtccacttccatgaccggtgaaccacccgaacgataacacaccaaggctagagggtctcttccataaaggaccttgaatggtgtggaatcctaagatgagtggaagctggtgttataccagtattctgccgaagagagccatttagcccacactcgcgacttctcgaaagcagaacaacgtaaataagtctctaggcagctattaactacctcagtttggccatcagtttgagggtaatgcattgtgctatgcttcaacacagtcccttgttttaccactttgctaacttttctcatgatcttactcagagtattttctcccagtatttgaaatctaagttaaaaaatttcacccatactggtaccttattaacatttttcttagtaaatatctcatgagcactccaagctttcatgatcacaggtttctgttattataaaatttttgtattagatgagaattcaatcgctgtaacactaaaaatttcacctcatgacttcttcgcattcgcatctcccttgttagttccctgagtaatcttgcatggacgacctttgccatacccacagttcagagctgagagttaaaccttagcaaagcaaaatttttagagaaagttattttatacaaagttttctcttatctctttctatagtaataatttatgagaaatttataaataattcacatatctgatcaagagttcaaaacatctattattttccaccagttcagaaaacaaaattatttggtgtttaattttg

SEQ ID NO: 189358 - DNA, 2811 bp, Cannabis indica
gattattttaattaatatacctaatatttttacaatatttcacttttacagacctttttgtcattataaatactaaatatatacaatgtctaaaaaaaaagaagtttattccatcactatataacatttaaaaaaaaaaaaaaattgagtggaaacattaaaaattattaggtatacatagaactgaagaaataaaaaaaagaaaaatttacatttagtacttttaagttcatttaatttataattttgacgttagcttttttattacagtgtattttgatgattgccaagattatccaagtttctaacgtcactccctactctccttccttctctatttatctttttctctatattcctcaatgtaaatattttaatttccagaatttaagaaatttagttattggagatactaattatataataattagaaaccgttgtataattattttaatcttttaattaacatttattttaaaattttattatatatgattcttgcaaattataacatagttatagtaaatattaatttttattttgaagattgatcttcaaaaacacacagttatattaagagccctttttgttatatatgactcttgcaaattataacatagttagttaagcatacctcagataataaatcttcacttcattaacattgagggtataaatttgacaaaattatactttacaagtatatattttttgttgaaataaataaaaggtaactgataattaatttaaaaaagagagagaaaaataatgatgaaagcacggtgacacaaaatattttgtacatgttttttcctctttggcaataatattaataatttcaactttatttcacgtgtgacatgaactgtagtagctagttactgttttatgttttggggaaacctgtctttaaatttctcatataaaccacccaaatatgaccagaaacgaaatttcctttatctatatatatagaaactctctctatttaatttattctcatctctcatcatcatcatcatatggttctttagctacccagtgaaaacccatctctcatcaaaacgacacatataaaatggcactagaggctgtcgtttttccacaaaacccatcatattttagttatagttctaataaagagctctacaccatgctcggtgtaggaggaaactgggtcagttacgaagatgaagacgacactaacaacaataatattattaatatttatgatcatcaagctgatgctacagctccctcatttgattttctcgggaaccaaacggaaaatagtactaggtctccttattatggggattggaacccctcaccttcctctatggtacctcactttaacgaacttcatctctccaactccaccaatattccatctcctgatgcaaccaacggtaataataataacactgccactacggatgaattccaaccgttcgatgctttgaccggcttcccgcagacaacgttgactagtactcgaccaaaacgacgccgttctagaagcagaaagaacaaagaagacattgaaaaccagagaatgactcacattgctgttgagcgaaatagaaggaaacaaatgaacgaatacctctctgtgcttcgctctttaatgcccgactcttacgtccaaagggtacttatattttaatctctctctctctctcacgattttttcttcttttccaaacagaaaatgaaaactgattagtctttttttttcttctgtttttggatttcagggtgaccaagcgtcgattattggaggggctataaatttcgttaaggagctagagcaacaagtacaatttcttggtgcccagaaagatcatcatcaaagtaataatgatcataaccagagctcagaggaccgtgaacttaatatgccgttttctgagttcttcaccttcccacagtactcgactactagctcgaataccgctactcagtgtgaaaataactcagtggtggaagccatggcggctggagaatcgtcaaggtcggccattgctgacattgaagtaacaatggtggagagtcacgcaagcctgaaaataaggtcgaagaaaagatcaaagcagttgctgaaaatggtatctggattacataatttaagactcacagtacttcatcttaatgtcgcaacccaagatcaaattatcttatattcaatcagtgttaaggtaactaattaaataattatatatcaatatattatattaataataattttcttaatattttatttgggagggtaaaatagtccctatacttaaaatataatttggtttttattacatgattaccgaacaggtggaagatgactgcaagttgagttcagtggacgaaatagcgacagcagtgtatcagatcctggctacaattcaagaagagtcctttataataatgcccaattgattatcaaaattggtgaggattcaacttttttttttttcttatttatgattattaacgaatttggtagacctagctagctctctagctagttctgtgtttattaattactagcgatataagtatgatgaaattatgatcacaatcatgtataccatgtttgcggaatatgtgaccaaaattaattaatacattttaataatatatatgtttcttaatagttgttgcattcatataaacaacatcttctattctctaagattctttctgtgtatgtgtatctttttatagtttgatttgtaatatcagtttgttctatttatcattctgtataagtgattttaattagtttaagccatctttaattattattattattat

SEQ ID NO: 189359 - DNA, 3678 bp, Cannabis indica
aagttttactaaaaacttttctgacattgagtagtgaaattttatagatctgtaatctcatctttaatccatattcactaaactaaactcactcaatgtattttgtgttttgcatcacaaaatcacaaactttgattgatttaccaaataaaataaaaattagaaattaatgtgcatcaacactaagaacaagaatcttattgataaattccattctgttgttgactgctctcttattatcagcttgaaaattcagcaacaatattttcatagcagcccattccagcttccaaaaaaaaaaagggaccaaaaacaaataagaaatgaatcaaataatgctacaatttcatttcccacatcacaactatgagtgtaaccaaactatgtttgaccaaaatgcaagagaaaaaaacagaacaaaagaacagtgaaagacagaagaaagatgacatatagtatacatacaatcttgttgtctagtgcttgtaatccgggttgtctcgtaacccaagtttcgaaagtacaaaacagtatgaatcccagtcggttcttcgaagatatttcaacaacttcttcctcctttgcaccatacttgtaagacccttcctagaatgcttatcctataatcataggatatgtatattattagtatatataagaaaaaaaacattttacctcttgggagttacatgtatgatattttttaagttcttttctcacctttttgtgtagagttgtggataaatgtttgatcttggttgtgagttgtgccactgcattgaacaatcgaaataaagagtaaggagttgaatatatacagagacaatcttaaagttttatgcttttccctataaatagataccttgtactcttgcagatccacaatcggattccgataatttaaactcatctctaactttggcgagctcaagtttcattttttctgctgccgacatgttatctggatggaaatactgcatcgatgatgtttcgaaagttgaagaaattcagttcaatgttcagacatcaaaaaactacaaactcatttcaagcaaagagaaatttttaaaagaagttgcttttattaactgatgtgtagataactataattagaagaatgaagaattcaatggacatttctcatatactctaaaattcatacatgtataaattctaaaagaaaataaaatacagagcactggatttgaatttgagactccaacttatctactcaaacatgcaattaaaatacagtgttctagtttaaaacaagatctgggacaagaaaaaacttgtttcaaaattcaaaataaaagtgtcctcacattaattgtaatccaattgtgtcaaataaattaaacgatgatcaaaactaacttcacatactttaacttaatcgtcactgtaatttaaatgaaacagaaacttaccttctcaaccaggtgttcctgtggaggttgtgtcataaagttaggagtttgactcaaccggcccaataaattgagtctctcaattgaagctaaaaaaaatccaaatcaacaagtgaatatagattatgagcatattctagtctgaccatgaataatggataataaaacaagaaactcaggcacaaagttcggttacttactggaattcttcttcatttcctcctccgcggatatcttctccaaactctccttcaaatcttgaatgtaaggaagagtaaactcagcctttcggtcttcaaactccctaacctttatcaacctctcatttaactcctctatcgaaaaccaagctccgtccttggcctcaggcctcaactccctcaacatattccctaattcctcctctggatatgtcctcgcaaacgccgcccccgtagcctttgacctatatccatctctcttctccctcgtatcctttccaaacacagatgctggcaacatgtcagtgcctcctatcattgttgtccgctgaggggaatccgatggtttcaatctcaaacggttcgtaaacaaattatacatctcagactccctacgattgccatcttgctgaccctttccagatgactttagctttttcatgctcatacgaatagcttcaaacgaaaggtttccttttccaatttggtcggcattgtcaccctccgccttaccaagcacatttctgctcaacaactccttaaacgagttgttcgagggcccacctgaagagaaaggcgaaggtgcatcagatctgcggcggaactcagaaagattgttacgaatttcttgcagggcatcagagaccttggaggggttggtaatagtagattgagagggatgagggaaagtgaaatttctgggcgggggcggtgaagttgatctttgctcctgctgctgcctcagactggctttgacatcactgaagtatgaagagaagggggactcggacgtggaggactttgatttgtccttttggtcatctgggtcagctgagtttgaggaggaggtggtggagaaaaggtggaacagagaagggttcgccaaggttctgcattttggtaccaataggagcgccatagcacaggctttgaactgcaaaaatgtaattttgaaatgaaaatctgaaattaattactgaaaacttatttttgaaaaatttgattgactcactttctaaaatatttacaccaaaatactacacacatgacttcactcatttaacatgacaaagatagagtgaagactcatgccttcattaactgcctcaaacctaacaataacaatagcaaggactcatctctcactatttgaaagctctttttagctaactagccaaactgactatacctttatttctcttagtttttaaacaaagttgaatgttaagagctacatacaataagctaaagggtcttcatctaaattatagtaaatacaactaaatagttattcttcagttaaaaaactgatctttgtgatattgatacttgtaatgtgctatgataaacattatacaatgcctaaacaagaacaataacaacaattttagcataattcattgaggtcttttatcgaacatatggcagtcattcaaaatcgtttacaaaaaagactacatattcctcacttccttttctctataacaataacccttaattattttgattcgaaatccactaaaaatacaaattttatacaacaaataccaaaaaaaaaaatgagagtgaaaaaaacaagacttacaattaaaatgtatatacagatttgttgaaggatatgctgttcggaaccagacgagttgtgaagaagaagaacaataggagagaagtaggaggcgaagaagaataagagcttatatggtttttaggtttttgggatttgggaaatgaatttttcggaaaacattattttcaagcttagtttttgagttcagaacgaagaaggagaagaagggttgtgtttgaaaatttggggtttatgaaattgggcctaggttttgggctcaaagactaggcccactacaattaactagggatagttttacaaaaaaatacaaaaattataaaaatatagtattttttcaacatttttatgatttttagattttattatataaaatataatttttattgtatttttatgttctgttcttgttattttatagttgtatttttcgttatttgtattgttattttattgtattttt

SEQ ID NO: 189360 - DNA, 2871 bp, Cannabis indica
caggacaagcgtactgctttttctctttctacatctctttctctctatcgtgtctgcttttttttcgttctttctctaggtctgactcgatttttcgttttacatagtcttggaatctctctctctgtctatttgtgttaagccctcgatccgtggaggttttggtttttgggaattttgatttctagggttttttttccccccctcttttttctcttgctatttggttaacgagcaaggctggcgggtatcagggataactaaatggcggatccgccaggtatctgcctactggattttggtgttggattgggtttgataggttcttaccattgttgtgacgattataatagctcccaagagtgaataaaggaaaaagcatgctgagcgtgctgcgtgtgcaccttccttctgatattcccattgtaggctgcgagctcacgccctacgtgctccttcgccgcccggacaagaccgtcaccaccgatgatgtgcccgagtccgccccgctggatggtcatttcctgagatacaaatggtgagtatactaggtgatttgtgatttaaatttcagttttttgagctcaaggttaatgggttgggttattaaggttcggatatcgtgttttaatacacgggtttttgtcaaaacctgaactttgtattggttttggttgagaaatgtctctgttgtattgatttttttttttattgggaagtctttcgttgtgacttatgctttcatcgttttgcattctagagctctatgtttgctgtttcttattttttttagtttgtctaatcattatcttgttatcagtaacagttattattggttagaaggtggatttactctactgaaacatttcatgctatttgggaacttgactgctacgttaattagtcaatgagacctaggaattaatgttacggtaattggagctgatggttgtgggtgacaatcatgttgctgcaggctgcagcactgtgaattgttgtactagcactatgggaattcggtttgactctatttttgtgaacaaaacatccacttaggggtaatagattgatttccaagttttataggcttaaagctgttccttgaaaattcaatgttagtcatggattaaagaacatattttgtgcttaatttcaatgacaaaaaaatctgtcatagtttttttaatgtccaattctcctttggatttgaatgtttgatttgatacataatgttcattgcctatttcactttgtaggtatcgtatacaaagtgataaaaaggttgccttatgtagtatacatccatccgaacaagccacactgcagtgtctggttgtgtcaaggcaaaaattcctgttgccaagagttaccattgctctcccaagtgtttttcagatgcgtggcagcatcatcgtgttcttcatgaccgtgctgcaagtgcagtgaatgaaaatgggaatgaggaggaagagttgtttggtcgcttcaatagctcatcatctggaagtctcaacactggcttatctagttctgcatcaaccccaagcttgacaaatggatcagcacctctatacccggctgctgtcacaaggaatggtggtgaaacatggtttgaagttgggcgctcgaaaacctacacaccaacagctgatgacattgggcatgttcttaagtttgagtgtgtcgtggtggatgcagaaacgaaagtacctgttggacatgttaacactatattaactaaccgtgtcattccagcgccatcacctagtccacgtcgcttggttcctgtatgtggagctgatgtgatggggctagaggtggatggacgcatgtcatcttcgggaacatttactgttctttcatacaatattttgtctgatgtatacgccactagtgacatatacagctactgtccttcatgggctctttcttggccatatcgcagacagaatctgttgagggaaatagttggctaccgtgcagatattgtttgtcttcaggaggtatgcaatttacttcttggtttgtgttattgggctgctgactattgactgaacatcttgtgatgtttacacctgttattttatttggttgcggggctttttttttttttctttcctctcttgggtcattttctgatctgaactattaatgcacataggattatccttctcttaattgctgtagtttgcttggcttctctcaggttcaaaatgatcattttgatgaatttttctctcctgagctggacaaacatggctatcaagctttatataagagaaagacgaatgaggttgcttcaggcttctaatgtgttatggtataatgtccaatttttaaatttttgttgctacatatttattgtgcttttgttggttttaggtctacaacggaaatccacagacaattgatggatgtgcaacttttttccgcagagatagattttcacacgtcaaaaaatatgaggttttggagggagaataagtgctgtgcttgcatagtataagtattgtagtatttattcttttattattgtctaatttaaattgtccttgtttgcaggttgaatttaacaaggctgcacagtccttgaccgatgctatgattccaagcgcacaaaagaaaagtgcattaagtcgattagttaaagtaggttgaaggaaattatagttataactatgagtgccaatacctgtaatatagtttgctaaactggtggtccttttacaggataatgttgcactcatagtggttcttgaagcaaagtttagtaatcaggggggagctgaaaatccagggaaacgacaactgctttgtgtggtaatggaccacttttgctttttctttactgttttattagcagatgtcaat

SEQ ID NO: 189361 - DNA, 1042 bp, Cannabis indica
aaatctagtgagtaaattttcaggtacaaatgttcatcctactccaacctaaaagttaaaacatcccaatggctaaaaacaaaagtaaatctcctatatataataaattaaattaatgtatcctaaataaacatctttatctttggaaagaaaaatgaactataaataaagaacattgctacccaacaatccttattattattcttatgatgccacgctttataaatatagtagtattttgtttcaaaataattattattaaattaaaatatataaataagattgtgagggcctccgtgtaggtcacgtcatcttccaatcaggcaataaacgttggcattgttctatgtattgatactttcttcttccactaaaaaagttgggttgatgtgttacttgatcaccaagacaaaaagcaaaccccttcacaagattcccattatgccctctcttttatccttttattgacttaatacttttttttagatataataataaagaaatatgacactatttaatatttttggttaatttagtatttttttttttaaatttaacatgtattaaattatgtcttttaaatttttttctgaactatagagatggttagatttaaggatttttgtttaatttcattcaattttactatttcagtgattatttatgtactaaatcatgttcgccagactttgatatctaccaaatcataccctctcgaactttgacatatactaaatcatatccttaaatttttatcaatgttagactttttttactaaaattagacaaaagtctttaaatttaacaatttcaatagttcagaaggcatttttaacgaccttaaaagttcaagggcataatttgttatatgtcaaaatttgggggtaaaaatcttaattagctatgggtatcgttttattgattgataatattttttaaaaaaattaatttattaagttatataagatttgatacttaattatattaataggaatatcacaccgaaaaaaatgttaatcagtaataatacattttaaaattt

SEQ ID NO: 189362 - DNA, 5228 bp, Cannabis indica
attctcaactgatgataaccggatcaaagatcaattttagagaagactatatttccctaaagttgatcgaacaaatcatagatcctaggtagaggttacttattcttgattgccaacttgtttagttctcagtagtcaatgcacatgtgaagcgatccatctttttttcttaacgaacaacaccggagctcccagtgtgacacactgggtcgggaaaccctaagtcaagcatctcttgaagttgtatcttcatttctctgagttcagcaggagccattctatagggcgccttagaaactggtttctttctaggtgtcaatcaattacaaaatctatttctcactgtgatggtaaccttagaagttcttccagaaatacattcaagaactcttgaaccactttgatatcttcaggctgaacagattcaggccgagcaatatttaacaccattgctagaaaccctaagcatccctcctgtaacaagtctctacctttcaacaccgagatcactgggattcaagaaccctgaattgatcccacaaatatgaacgattcttcaccctcaggtagaaagatcagcatcttccacttataacaaatactagcagcttacttggagaagaaatcctaataaagtataatatcaaaatttgctaaacttagttccactaagttagtgctcaacgccatatctcaatcctaattggcatatacctaatccaccttatggggataactaatacttcgctaggcagtaggattccaaacctatttcataaccgccacacggcctatccaatttgtcaattattctagtcgccacataggaatgtgtggctccaaaatcaaataaaatagagtaaaaagagttgttgactgaaagctgacctgtcaaaactaaaggactagcttcagcattggcctcagtaagggaaaacaccctagttagagcgggctttgcttctgtcttcagttcttctttctttaattgcgcgaagtctcttttgcttagttccatggcccacttcagttgtctccctaaggattccgatatctgtagcacctaccgaagagggtggtttgttagtactttgatggcgtgggcttgaaagtaaggtctcatctttctggaagcaattagtaagaaaaatgacattttttcaatcatgggatatctagactccacgcgcagcaatcttttgctcatgtaatagatgtgccccacttaatttgtttttggattaattaataattcaaaagataaatatttatttaaatttgaatttaaaatgttgttacagataatatgattgagatattcccttaaagtaattggaagattctctccaagtgattgagagagtttctcaagtagttaaaagattccttcaatcagatattagatatttagtttaaactaaatatttaaattctaataaacatctacgacaaaaatagttacagatatttatttaaagatttgaatattattattttaatatttgcattaataaatattttatttaattaaagctttattattattttataggattgaattaatatatacatataatttagaaaacctaaaattgttaatgaaaatattatcattattcactcaaagagaattattttttctcatgtgttgaaaaaaatcaagaacacattttttgttttatcttaattagcccacaccaatccttgtgtgtggtgtaagatctgaatgatcaaggtgtgagttcatcattattgatctaggatgcaacacacaaaaagattcaaggatacttttcctgatacacttgaagcggcaaatgattccctccgtctttttattttaggtttaatttatatacatatgactcaatgataatctcataattgcttccattgacatctgatttagtaccataaaaccaaaaatattgatgctccactacagatcggtcatgtcatggatagcacaccggttgccttcgtccatatggttgtcttctgacattaggaaatctgaaaaatggacaccaagcaatgagtacccaaattaaaaaagtggcatagtgaggatatgggagagtcctcccatataacttcttggagagatccttgctggaccctatatcgaggaataatacattctcagataatagaatcgggaacacattggaaagaaataaaagaaaatatgttgttgtgtgacaccaaaaggatcttggacagaatatgcaggtcacgacagtggccccagtgaacgtcgtcagaatcctcaaaatcgaaagttatgtaggaataagaaacttgaaaatccctagcattcttaatttcctaagcatgaaaaggtcctaatgtctttagttcattaaacatacagaggaaaataaacctccataaatggcgaagcatgaaacactgatcgatagaaaaataaaggcaaccagatcccctccccccccccaatcaagagaatgttcatctaaatcatagcatcccaaaatttgcttaaacaaaagaaaactaaaaatcacagaagtggggtacttacttttgatagctaaaactagaggtgacggtttatgaacgaccagtaagatctttgcctaaaatctacgaaccttcgctataagctcattggagtctttatgaaaattggacaaagatgacacctgtacgaggacgaccaggctggtggttggaaatagtttctatcgaagttataagagatgtttgaatagctcaacattgagattaaacattcaccgatgaaagtttctaggtattaaaaaaatggctaaaaattccaaagggtgaacacactgggtatttaaaagtgaagagacaattcgcatgactctgatcccagggctcaaattgaatttgagaaagcataaaccccacatatcccatggtctaggaatgtgaaaggtttccattaaatgctctcgttaaaacttaagagaccttccttaatgataccatttgccttgaggagcgcattgacatgagtagctgtaagtcttcagcccaagaccatacgcgctagtaagtgatgaacaaatggacctcaccaatagaatattaaaatttgggatacctcaacgtcatcccaaagcataatttaaagaggccatccttgtttatggtctcgggtacaatcataaacttggatgggggtaaatattatttgtatttctggatagctataagtgtaccacaatgaaggcccaatatagaaacgaggcccattcactggcccgtaaggatcatttacacacctatccatcaagaatgggcaaagccagacttaacatccagttccatcaacactatcttttattgacgaatctgaacgaccccaaacttaaatctaccataaattctcaatgagagaacatgcaaattgaggaagggtgctaggacatccgataacaaaatgtgaaggggcgtccgaaagtgcttggggtcacggaagcggacccacgttacatgattttaacacaatctcgagagatcaagcggcttgttccctgtattagaccatagagaagggtcataacaaaaaggaagtgacctttttggccaacacccactactctgacattctctctctgatgttgacgacacacacacacacctttcgctgtaaatagcgcgtgcgtgcatgtacgatgactaactacaacttgggcctcacctaatagatccaataacaaatattatatttcaatttaccctattagtgagctttggacatcaagaacaaatcctaataggttcgggtttgcccgacccattaagaatgcctataaatatgacattatcccttcatgcaaagggttgacaatttcgtacaagaaaaagcagtaaatactccataccaaagaacttaataatattgactcggggactacggatcgttaatgccccaacaaccacataaaaaaatggtatcattttccttttttaatttttttttcttcaacataatcttcttttaatttagtgttcaaaaatctcgataaattgaaagatattttttagttatgtgcagtgggtttaaagttaatcacaatgtttaaagaaaaaaaagaatactttttcttatatagccacatttatataagaagcttttattattttttgaaaaaaataatagaaagatatttttttagatgtggagtggatttaaatttgaatagcaatattttttcttaaaaaaaaactactctttctgttatattgtcacatttaggctatgttttgtaagaatgagagtaaaatggatggagaatctataaatgattgagaggatagtctagttttttttttttttgtgttgcttggtattaggagtaaaggtggaaggatggagagtaagctagttattaaaattaccataatatccttattagtataaatatttgttattttttaaaggataattttggtatttattattagtagggttgtacaaaaaattttataaaccgtgcaacctgaataatctgtcttcaacaaaccgaaaaaactcgaccaaattataaactacccaatctgttaattgggcaggttaaaaataaattcaacccacccaattaacccgagttgttttattcttttttttttagtttttagtattacttttctagtttttatttttattatcataaatattaataatatatataatataattatatataaaaaaaactcaatcttgacctctcacactctctttttatcgtatctatataacttgtccaagtcgaaccctaaaatctgaaaagactaaaaataatcatgtcttcttcttactgacgtcgccatcaacaccaagcacctccagtgtagcagcgggcagtgggagaagaaggcttatctcgaccaagacccaacctcagtccacccatgcaaaaccccatccgttgccacataattacgagttcttgaaacattgaagcttttcacttttttctttttgcctagaaaaatacaataaaaaactgattagattcaaccagcatgttgtgtatatatatgtatgtgtgagtattttgaagtcataattttctctaggtgatattctattttcttgagcaaatcactatcaaaattagaattactgtactgtacgaaatctattcttcaaattctatgatttctgtatttgattatttgtgggcataaaataaagttttaatcttgtttcaaagttttttttttttttt

SEQ ID NO: 189363 - DNA, 1214 bp, Cannabis indica
atgtagtacctacctggtatgtacgttctcactgtaccccctattttcttttcttaattctatcatcataattgtgtttaaccatacattgatttttattaataatcaaatttattttgtgtaagtttgatataatttatatgagatttaggaccaaaaagtattgtttataatcttgattgagtcgagcctttctagttatagtgacacttttgaactggtcaggatgactacaaaggttgatgcacatgctcagccttgtaagcctcccgactattctgaatgtgtcatttgactctggagacttgaatagaagccatggagtaaagaatttgaaagaggaaatttgttaaagctatcactaaaagatgttctatttttaagtagaaaggttaaactcttgaaaaaacaaatcccatcacactatactagatcttaatataatggcctgatcaaattaaatttggtttgcattgaaaaataatatatatatatatatatatatatatatatttataataccaatggttgtttttgttttttctattgaaaaaattctataattgaaccttaagattcaatacaaacattaattaaggattgaaaacgttaatagtttagttaacaaaataatccaactgttatggagtgtggcagcaggtgctgcaatgcaacaagtccaatttatggcaaatctcacattcaccaataactacagagacatcaacttgtctaattattatcatttagtattgtgcaaccatgaaaatttcatttatgctaataataaaaatgtacttcaaccacctccagaattcaactcccaacagcaacaagagaaagcatgtaaagtcaaaatatgacataatttataaaatatgaatatgtctaaaattcattaattagtcatattggttaagaattttaattttgatattgatatagtttaaaatctttcttacaaagttgtctcaaggcttttattatatttctttgtataaatactagaaatcatatgtatattaagatattaacattctccgtttatatgaaacagagttgtcaactctgaaattgagatggttaagcttgatataaagaaactccaatccaaataatttagtcgaaaaaagtagaataaaaataggcacaagtttaagctaattattttgtaaggcatcttcaaccggccttcaaaacactaaatataatgt

SEQ ID NO: 189364 - DNA, 5265 bp, Cannabis indica
ttatttggctcgattgtctagctgttcatcgatccttttgaagagttgacccgaatccctttttgattaaacaaatccacttgcaaatgagtagaacaagttttaagaaataaattaaggaatttgagtttttttttttttttttttttgttcattgcactataaattaggtacctactaaattatcattcagaatggagataatgggatctgggtcagggccatttaagcagagtgcaacatacataatggagaacatgggaagtttaacaacctgctttttgtgcattatttgggacacaaagaattaatatagtggagaagacaaagataagaagagattatacgaatcatttttagtgaaaacaaataaatacaataatagaaatgcctaccctagaatgaaattggactaaaaatgagaatagcaattaaatagaatagttggggtttgttgtggtgtatgaaaaaattgttcaatacttctgagaagtttttatatatggtatataataaaatgatcactgtaaatgaagactttctattccacatagtcagtccaaaacaaaacattcttataaattgatatgatatattgataatactataatagtttgagactcgttgcagagcccaaaacctttgacaatattaatttgcgagtagttaacattaatgaaaattaacataaaatttagttttagtttaatcagacaaaacacaagtagataagagtggaagatgaagaggcacaagatccactacatcttcaatgatgtattggtcatcagatacaaaacgccctcagtaaaactagttttggtatataagaaaagattatcaactccacaaacactaataacaacaaaaacaacaacaacaacaacaacaacaacaataataataacaatcatcttaatcaactttcacaaggatttgtaacaatcaggactcccaacttagcaccgacacactttttctttcttcttttggtacaattaaaacaaagacaagaaacgcatctgaatcataatctgctgtctagctgaggctatcccatgtcaacattttcctcttcttctttttaaccttcttcagcttaattgttcatccccatttccaactctggatcagacttgggacttggcagccaaaaagcagttgttttcagacactagctagtttctgttttgggatttctccactgccctcggagctaagggaacaaaccgaaagtagttgttagctgtttgactctaacctctagtgcgagaataggatacaatttttcacttagtgctaaacaaccataattgcttcataagtataaagtttaggctgagattaatcaaacatattagaatctgaacttaagaagcagtcattctagaatttttctaatgtaaagaacatagggtaatttgtggcaaaaccctcttatgttttaatttttatacacttaaccccttgatctttttttttttttgtggcaataccccttaacttcacttttctttgcaaatttaaagcgccagttaaattctactattaaatgccaactgagattgctactgtgtatacatgtgtacacgtgataataaaaccttgaagccaatgaaaacatgccacgtatatattggtgtacatagacacaatccaattggtatttaacggtaggatttaactggcgctttaaatttgtaaagaaaagtgaagtcaggggatattatcaccaaaaaaaaaaaagattagaggttaagcgtatcaaattaaaacataaaaggatttcgccacaaattatccaaaactatattgtaacatacctacctactcaggctccagcccccagaatacaatatttactacttatcaaaaacaccttccaataatggaacctgaaatgtatatcctactgttgacacatcaaactctgattgattggatttaaccatcacaactctaaacacgcccaattccaaaaatactagggagttcgatttctgatgtatactaattcactaccggcaaattgttattagtatgtattatcagattccaattttatcaacctaaatgcttttgaacaacttaatgctttcccaaaacacctctatatttccaatcaagagattctaaacagttctggtgataggtaataaacctgaacacgtatataggtgttaccttacgagatgctaatatgaattctaactatgatttacataattttaagacaatgctagtaacagtctgaatcaagaaattatagaaaaggtacctaagccaatggcatcagagcccttcatgatctttagcttcttgcatgaatcaataaacatcctgggacaaaacataattaaagttcagagacattatatgaatagagtagatccaaaaaaatataagcctactagctcactgcccatatataaactgaaacaaaattgctgaatataagctctgatgtaggttataggattcatacaaagagccacaccatcaattaagaaactatgaacctaaacaataaggtccctatgcagtaatactgatccttaagtttcttggatcactattatgtaagagaatactaactattactaattacagttctctaaaaaacccttcacttacttgtactgccccagccctatctcatctttttggtcacaggtcaatgataggttcacacatctcattggatttgaaaggtatgcattctatattatgatttcagctaaattactgatgcaattgacgaaacaccaacaatgtccattattttctcttaattataatgccaataataggtttacacatcttttgacttttcatgtctgatatgaatgcataatatattatgaatccagctcatttactggcttaactgatgaaacactaaatccctttaagaagcaaatacctaacctttcttctagagtgggaaatacaacaggctttaaacatcaacataagtaaaacattattgtcagacagaagaaaagtgcatttttacccccattctcatacatcagctacataaaaattttatcacggcctaacttcatatcttggatcacaaatgattgtgtttgcatgaaagcaagttcaaaaggtaaaaaaaatcattaattaacttactcccatgggacatcaccaacaagcatccagtcaccatctttgtcctcataagtgagcacatattcagatccgtggaggagatcccttaacttactctcactcagcttttccttccctggagctccatgagatccacattgacctgaaatattaatataatacaagtagatgggctcaggccaaaatgggagttcatcttataataaaatcatatggctctacttattaatgcaagaaccatgaagtaaacatttgaaatctatccagaataaaacagcgaaaattctcacctatggtgaagcagctgaacattttttcaagagcagaagacaattcttgataagtagcataagttctcagatccaccttcctcaaatagggagcaccatccatgctgaccttgacaaaaagcgctccaggatttggtttcccatcaacttcgtcattgttcttcgaagcgggggcaagtgaattcttcctaaatgatcttataggaggccaaccaacaacctgtgccctgccacgacagaaagcagcatctttaagtactaacaaatatgaaaacatattagattttgttgctttagacagcaaaaccttccttccattttttaacttactttgcagcaggagcattgttgttagcagaagaaacatgattatggttggctccattagtagcacgagatctttcttgcatccctttagcagggacctctttcactgtggctggctgagcagctgcagcccttgatggtagcatcacattcattcctgaattacctgggaattttccttgtcccacagagtgtggagattcattatcagaaccagatgcatacctccaatttccatcaccatatgctgaagttttcacctctgagaatccatccatagcatcagagaatcctcttttattgcccaaaacaacattcttctgtgatgaagagcagatcccatctttcaaaggaagcaaaggaaaaagttgcttctcatcaagtttccctgagcccaacaaacagaggtcagtttcacgctccggtgactgggatccaggaagaccaagcctcaactcagtagccttaaaattcagattgctcctgttctcttcagacaagtttgaaactgcagagctgtcaaccgaagaacaatccgacaatcccaggtaattccgttcttttagtcctgacccattttgggatctacagtcaataggggaagaggaagacaccagggtgctgtgtccttcctcttcaccacccagcagtggtggagacatattacgactttttagtaatcaatactggctactgccaactgttttggaaaaataacaaagaattaagagcacaaaattacataaataagtgaaaaaaaaaaaaggaaaacatctaaactgctcaataaatatacataagtttacatacatcaatcataacaattaacatggcattgtattcatctaaataagtgccgtatatatgaaatagtaaattaataaagagaataaccccacagacaattggcaaaaaatgaaaacatattcttttggcattaaaatttggacaaagcaatacagcacaaccaacaaataggctacaagagattattactataagcttcttcttcaaattcttctttttcttaaaaaaaaatgaaatttataagaaaaatcttaaaaataatatagacggctactaatctttggtgggtttgtgcatggggtacaatattcaaatggaaataaattagaataaatgaccaaatttgttcttgttaaacccgcaatggaaaagtcaactctacatttcatattcatttgcattaccttagctttaaatggtcaagtacgacaactaataacttcatcaatacccttttttccccatctcctaaaattttcccggaagccaaacaggccaaatgagagagagagaaaaaaaagaaaaataaccagctgaaaaaagatctcatccaacactctaaactaaatcaccacttcccaaaaccccaaaaatagttacaactcgctacacgaacgaaacctcactacttccacctcataaaatcctaagactccaaactaacagcatcacaaaacacaaagagtcaagaccgagcata

SEQ ID NO: 189365 - DNA, 1298 bp, Cannabis indica
atatatataaatatatagataaagtttgatatttaaaacattgattgatttatataaataataatatagattataattttttccttgttattattatttcttacactgctctcactacagcttggaatcttggttccttgggaaggaacttctgcttagcataaactgacatgtagtcaccaaacacaaactttggataaatctgatccaggtgtttgtgatcttgatctgcagatttctccaccaataataattcaggtgctggagcaatggtagccttgagtgatggattgtaaaaagaagcaattgatcttctattcccactagtgccaaccaaaaccctgtgccaaacactcttgtatctaccattgcttagaacctcaatttggtcccctgtgttgatgacaatagcattgggaattggttgaacatcaatccacttcccatctttaaggatttgaaggccacccacattgtcatcttggaacaacaagatcacaccgcctgcatcggtgtgagctcggagcccattcactagctctggatgaggacatggagggtagtgactcacctttgtcccgaaaaacgcttcattaccattactattaccattaccgttatcttcaactccacagttgaaggctgtcttgatgtttccctttggtaaacccaagttctcatccatcacttccatgatcttctctgctaacttctttagctctgtcctgtattcacccattgtttccctgcatgtacatgatacatcccattaactaaattacaaaaagctaattaagttaattctgattgatgatcaataataattaattacttgaatccaggggtgttggaaggccattcagcaccatccatgagagtaaaaacatcttcccaatcagcatcctctaatttgtccccattgttcttttgacccaactcattcaacaaattcatagctgttgacttgtagaacttttcttctctttccatcttaaaacactcttcacacaccctcttcaccctttccagcagcacatctgaaattccatgattcaccagctgcatatataatcattaattaatcatcatcaattcatcatcatcatcatagtctaacattttttttatgcataactataatataaattaatttgtgtagatagaagcttcaattacctgaaagaaaccccattcctcacacccattggcaatttgagccaaagtttcagctctgctctctccactattgagctttgagaaatcaatcactggaattgccatttatatatatatatata

SEQ ID NO: 189366 - DNA, 2952 bp, Cannabis indica
cggtttggacggattaacccgactaaaccgaacaattttattgggcgtgttactattttcttttttcttaattaatattgggcgggttgtacttagatttttgtaattcaatttttacattgggttgaataaaatgtagcataaaccgaccaacgtacactcctagtaaaaattgatgtaaaaaaaaattacaaaattactatttgtacaaaatatagctcaatttttacatcttctattagagatggtcttacataattaaaaaacccaagcgaagggactacaatacatcacataagctaataaatatatttgtggctaaaacaatgcaactcttataaaatcaagtttttttttacaaatttagatgaataatttaaaactactaaaaaagattagttaatagttatccgagttaataacaaacttcttgagccaaaaaccagctacaaattaaaaatatatatatacaaatggattgatagctcaataataataatttaaagaaatttttatatataagaagaaacaacattcttagttattattttttatgaaaataaaattaaataaatgtaaagtctctaaaattgaatgtgtcacatcattaattagttataatgtcagttaataagcggtctcttctaggcacaagaattctattcaataaagcacctataaacataaataaaaataaaagtaaattagcatattaaacaaacattgacaattaaattaacgatagaagtattcttgagagctatattcctacacatattattttatcatttttagtattacggaaaaatttaacttatttgtaaaatttgtgtaactgaaaatgtcattaattattagaatcgaaacatgtgtggctctcttaatttgaaggcacaagacaagcatatggaggtacaaataagtcactaaaacacatataaatctagctaattggcacactatacttaatatgaagtaatagttgtttatgaagctaaaaaataaatttgcaaccaagtatcaaaatttcaacttttcaatacataagaaaaaaaaatagtggtgaaactaccaatactttttttttcatttcaattttgaccaattaattatcacgttacactgttacagtatacaattatgttttggtattttgacaaaaagcgaaaacaaactaaattttggcatttagatgaacatcaaattttaagttaaatattaatatttagtttttattaacacaaaaattaaaaatcaaaatacatatttatatatttttaaaagaaatagaatttcataaaaaaaaaacaaatcgtttaacaacatacatataaactcgataggaaaagtagttatactgaaaataaaatctgaaaaaaacagactaatctagcaaaactataaaccactttgttaatttcattaatttgtgccaaattttacactacttacaatgattataatgctctaaattatttgatcctataaattgaaaatattatcctaatagttaacttcatatatatatatatatgatccaattagattctaatttcccataacagagtttcaacaactaaggctacatattatattatatattgaatgaaaccgacttcagctagttgcatatgtgttgttaatattatcgaatttattggattatttgcaggttgtttccactataaatacgtattaagaactgaaagacaacataacctcacaaaataatatttacttattaggccataaaactaggaataaagaaatggccaattctaacatcaaaactctttatttgattttcatgattactcttcttataactttcacaatcgctgaaagccgacagactggaagtaagtgtttaaaattataaatgtaaaactaaactgaaatatcaattgattaaaattaataacaacatattattcaaagttagtttatatgtaataacacatgcatttatttcttatataattgagcttcttttttctttgtttttttaatggaagaattcaccaaaaaggcaacagtagaagctgccactccaaactgtaattcagtttattctgttcaagctggagactcttgtttttcagtagaacaagggttccagctgtcaaccgatttcttcactgcgatcaacccaaatctcaactgcgatgcccttttcgttggacaatggctttgtgttgatggaacactcacttgaatttcttctaccaatgtcggaacaagttaaaataatatctacgattatcctcttttttatgaataaagaaacagagacctaatatacctgtttcaattcgcattttaatgaaatgtactttgtttgtttctagcattttatttcttgacaatatataagtccatgaataagactgatccctattcaaaacaaagccctctttcattgttaagttcttatatattacatatatgagcgcagtccaaagcattttaggctatgtttgttaggaaggatggagaataaggaggatagacagttggtggaggattttgaataagaatgagggagatgagagtagcaattctttttaagttatttagtagaagggatgaattgatggaaggatggagagtatttatttatgaaattataatattctcagtaatttcttaataatatattatgggagtatttttgtaattttaataattgaggaagaagagcatgaatccttccattcataaattggggatttagaagagttttctctccatctacctatcactttcctcccccaatccttcttgccaaaacaagtagatttattgtatccttccatctctctccctcatctcctctctattcattcacttctccctcttaatgttaattgtggtgagtttgtgaatatttttttgattaaaaaaatgaaaatattttctaaaaacttgttctataaaaaaataaaaatattt

SEQ ID NO: 189367 - DNA, 2043 bp, Cannabis indica
ttcttctttatttggaatgcattgcatattttgacatccttaatgccattattgaagttttaagtcctgattttattagcattcagcaatagttttcttctttatagatattaggagatatgttataggactacagggtgctctcctgctgcaaattttattttggttttgagtttatctgatagtgcctgagatgttgttactcaatcatctttgaatgatactttcctgcaggtacttgcagcccttgctgaaacaatgaagaaaggaaccagctttggtgctccttgtcttctagaaaatgtactagcagagatggtcatctcagctgttccaagtattgaaatggttagatttgtgaactcgggtacagaagcatgcatgggtgtgcttcggctggcccgtgctttcactggaaagccgaaaatcatcaagtttgagggatgttatcatggtcatgctgatcccttccttgtcaaggctggtagtggtgttgccacattgggacttcccgattctccaggtgttcccaaagcagcaacagttgatactctaacggcgccctacaatgacatctcagctgtggaagaactctttaagaacaacaaaggagagattgctgcaattattcttgaacctgtggttgggaactctggcttcattcctcctaagccagatttccttaatgccatccgcaaactcacaaaagacaatgatactcttctcatctttgatgaagttatgacaggattccgtttatcttatggtggagctcaagagtacttcggtataactcctgatttaactacactcggaaagatcattggtggtggtctgccagtgggtgcatatggaggaaggagggagatcatggagatggtagcaccagcaggaccaatgtatcaagcagggaccttgagtggaaatccattggcaatgactgcaggaatacacaccctcaagcggttgatgaagccgggaaactacgaatacttaaataagatcacaagcgaacttactcaaggtcttttggaagctgggaagaagaccggccacgcaatgtgtggtggatatataggtgggatgtttgggtttttcttcacagaaggacctgtacacaacttttcagatgcaaaaaagagcgacactgaaaagtttggaaagttttacagaggaatgctggaagaaggtgtttatttcgcaccttcacagtttgaggccgggtttacaagcttggcacactcagccgaagatattcaacaaacaatagctgcagcagaaaaggttttaaggcggatttagattgctatctttagtactattttacctcattttctttctttcctatcacttgcatagttgccatcttttgtagatgtactggagagtttgttttgtagacataaaaaatcatgtatgattagaaccagaatgttctagttcaacattttacccttaaaaagttgttgagtgtattaacctgcatttggttttgtgttttgtatgttagaataaatcctgtttaagagagaattgaactcaattcaatctatcaaaaacactgcatttgtaaattgtaatcacaagtcataactgaattttcatcataaacacagcattttctccttatattgaatgtggatctttacaataatgaggtctatacagcttgtttgacataacataactggaatgatatctataatataagactacaaagtagaagagaccaaacgagaagaaagaaacaaaatagaaaaaggaaataaaaacaaacaatatgctgaactgaaagtgaaaactaataatctgtaaggagtcacgaacgaagaacacttgactttctttctatcaagacaaatcatcatcaccagcttgtacttttacacatgaaagctgccacaaaacatggtctccaagacttattctgttgcacaaagcttacaacatactgactctataacattttaattcacagtatagaacatgagcatacaactttcctgggagaatcatcaatcttcttttctgttcaggaaaaca

SEQ ID NO: 189368 - DNA, 1013 bp, Cannabis indica
agactaaaaaccatctgagcaaatagataatagatgaggtgtactacaattgattaatccaaataattttattttgtttacttattagaaaacccaattgattaattatttaaatacttattttgtgttatattatacaacttgtattttaattttatttaaaaaacagtctaaattaatattattatctttgatgacattttatattctcctttacttttaatatatttaatcatgttttcccattttttttagttttaataaactaatgaaaaggaatgactaccataaatttaagagaaatgctaaaaggtattcatgatgtctaatatttttatgaggtgtaatatcgctattgttgtaattaaatattgactcacttatttaattttgataaagattataaagaaccactaataaataataagtaccttagtaccctataacaatgctctatatgtcattctcatccttgattagtaagggttcgttagttgggaagaataggaatgaaagtgagaagaacaatatatatttttttaatcttgaattgaaatgatctttataattatttctatttcgaaatggtggaaaagacactattataatagcatactaatactttaaaatgtaactaaactaataagtgaaataaaaaattaattccattctattctatttaattacctccaaccaaatacaacttaagtgtatttatctaaattaaaatttaccattttatttttttctcccatcataaaattcaaaaatagaaaatatttcttcacatccttcctaaaatctttattagtgcaaatttatctataaacatgtttacattattattgttaaaaaaattcaagtattactcttaatagccaaatagccagtatctcctaaccaccccctcccctctccataaaagaaacacaaaactcatgagaatgaaaaagcctctttgccattatttttattttattattatttttttatttttatttttttttttttta

SEQ ID NO: 189369 - DNA, 647 bp, Cannabis indica
tttctttggaaaagggaaagagaacaaattaaaacgttaagaaaaaaaagtagtagagagattcaaaaaaggcaatttaattccttgaataaaagaagaggcaatttagttaagcacacgaatggggaagaaaattagtgagaaggatgaagagaagagaggaggcaaatacacgtaaaagaagggaatccatgatggtgtgatgatgatgattatgataccaaaatagccaaaagaccaaactttgtcttccctatgtagctgaaatcattacccaccgcatctctattccatacccttggttttaacaaacctaatcattatcattattcattacaacaatacaacttctctcttccttaactttaccctctctatatcatcattacattacccttcttccttttcctctcttaactcaaattaccaccttcacctccctctctttctctctctactcattacattgttaggtttagtttaccaaaccccaccctaactacattttacttatttgtttttagtatatattaaaaattaagtgtcgaattcaacttcaactaaaaaaattgatacatccaaattagtaacataattagattaaatgtataattagattaaatgtgattggatgataattttttaaa

SEQ ID NO: 189370 - DNA, 5753 bp, Cannabis indica
aaaaaaaaaaaactaaaataacaacaaagagaaactcaaacccaaccttattatatttgaaaccaaaatgctaaaatgttggaactgagtaaaattcaatgaccaatgttgaaactaaacctatcaaatatagttcgagctgaaagaacattgaccttataaatacagcaaacacatttaaattcatggtctcatcttgcaatatcaatagaactcagaaccagaatatgttatgtgctcagaatatatattttatatgaaaagttaagaagaagattaaaaagttgcacaactgttaatttgtaataacaaataatgattaacacagatgagcaaatgttgctctaaacatacatgtattcacccccatgaagagcattggcagcacctttcctctcttcttcagcctccttttctctctccttccaactctcgtatgcatgatcatcggttctcaactcgtgtcgacatatcggacatgaattgtgctcatcctatcatccatttatcaataaaaaaccaatcaataaaatgaaaattctcaagcaagaacacaagagaacaataacataaactatggaactatagtaacaccaactcaaaatccattacacttttatgaaattatgaatgattatcaattctcaacttgtgtcgacatattggataagaattgtgttcatcctatgtaggtaaccaagacagactcgaacctcaaaacttgtgggagcaaaccacatgtccaaccatttgagctacctttctcggattaaaaacatgtcaagaatggaactatagtaacatcaaatccaaagttgatggcatttatatgcatgattcttaaatttcaactagtatagacatgtcttacaagaatttgtgctcatctattcaaccatgagtaatgatatgtgtacataaaaataaatcacacacttacgtgtaaaacccttcttaaataaatatgattagttaaaattacttgatacataagtgtgtgtcaagtttgtctgtgcctgcatatccatttatcaaccaaaccaatccatgaaatgtaaattctcaagcaagaaaacaaggagacaaaaatatcaactaatgaaactttagtaatatcaaatcaaaaagttgattccaattctatccaaaatcatcagtttccaaagaaaaaaaaacatacaaactaagaaacaatagtaacatcaaaatcaaaagtttaaggcattaccagccagggctttaggcaaggagggtggaaagtgtgattgcaaggcaactcttgcatcttatcattcataaccaaattctctttgcaaatagcacactcagcctctttatcaagcttctccaatacctcttttgtaatattgattattggaagcttagccactacttctttactagctggtggtactctaggggctgctctatcatcctccattatctacacaaatttcacttcataagaactctacatatataatacttcaaaagctacatactaagatagaatctagagcaataccggtagtagaaaatcatctaaattttccataagagattgaattaagctagctgctgcaggatcagaagggttctcatcttcaagtgcagctgctattgattgggaagaagaagaagattcagctggcaagagtgaagctgcagcattcagaagattggcttgaacaagccattgaggctgaggaggctctctatcaaccgttagatgaccctcaaacaagtaacctgaaattgatcaaaattttcaactaaagattcaaacatgaacaaaccccatttcaaatcattaccccaaatcgaaaaattacctcgtgaactggttgattgggatgaatgagaaggattatcttcctgattcaaaacctccttagcctgagaaatacaagcccccaaatgggtcttctgagaagaatctgaaaccaagctttgggcttgttcaaacaaatccattccggcagcccaaaaccccggcgaggtgtacctcgtctttaacaccgtcgcaactcggcatataacagaatagaactacaaaaaaaaaaaacctaaaattcaaatctttatcaaaaacccattaaattaaaaacatgtaaagaatcagagaataaaaaagtaccaatttttgaatagaaggagaagaagaggcgtaacgatgatgaagaagagattttagggttgatattgcttcctcgaatttttgcttctttgatagatctctttgtaattcctccaattgttgtttcagaccattttcatcactctccatttttgattttctttgtaatttgattctatatacgtgtatatatatatatctggtaatggaattgggatctttgtgagattttttcttgtgaagggggtcacctccttcaccgacccgtttggggaagaaaggttagggagaacatgattgggtgtgttacgttccttgtaagcttacggtaaaccccactcctccactcctgtgtagccacgtggtggtatggtcaagcagctttgatcaatatattatggtgaagaacacgactctgattaaacgacacgttgtttctttatacagaaaacgacagagttttcatgtagaaaaaccatgtacgacatgtcgttttgaattacaaaaaaaaaacattaaattaatattttataataatttttatttttggcgttgttttattcttttgtgttgattacaatgattttattaataatttatatatttttttagcagataatgtattttttttttacttttagggtcaataccattttggatcatgcattttacaaacattacaattggaccatctgttttaataaatgacaaagttgaccctgtatttttcaaaatagtacaaataggaccctaaatttattttttgtcaaaataaaatttaattattatccgatctaaatgtgttatgacaaaactgtttatatttttttgtatttgttcgtgttagaaattgtctttaaattggttatattaaaaaaaaaaaaaatcaaaaattaagctcaagatactatttttactattttagaaaatataaagtttattttattatttaacaaaacagagaattcaatctgtaatttttgtaaaacacaagtctaatagtatttaaccttatttttatggtgaaagtaaattaattaatcgaaactattacaaattaacttcaaaattagcacaagttaattagactctctcaaaacttacaaccacattacaaaagctcaacaagctcaataactctcctctctttagcagaggccttcttggtggtaatcaaagataatctccctttaatacatctctgaattatcttctctacacaatcaattatagaacattgtttctcaaaataacaaaggttcttattgtaccatatacaataaactcctctagcaaatgttgcagacactatctcaaattactcctccaaactaacttttaagcgattgcctaactcttttggagaaagagtattcaaaaaataaattcgagtgatttagggcttagtacaaattaacgatgttttggtagcttagtcatgtagaaactgcatttatttattagtctaataacattttatatatttttgttttaattttgtatgaatattaaaatgtattttattttatgtatgtatttttctaaaatgtgagaagcaagaaaaaattaaaagaaaaattgggataaattaaaaatatttattttatacaaaataaaaataatcaaatagattacaaaataaaactcccccaaaacaaagaaataataaattaataaagaaaaaacttttgataattgaaattattctccttttatacctaattttcttatgtattatttttttccttttcaaagtaaaaacaaaattctactcgtgtttgacaattgacatatcttttattatgacaaataaaatatataaaaaataaaggataaatattgttttagattttattttacaaaagttattaattagactctctgttttattaaatgacaaaataaaatctgtatatttcaaaatggtataaatagtaccataaactgtttttttgtcaaaataaaacttaataataatccgatttagaaatgttacgacaaaactagttatattttttacatctgttcatattagaaattatcttcaaattggttatattaaaaaaaatattgcagaaaattgaatttaagatcctattgcgaaacacacaaaatagtatataccttaaaattaaataaaaaaaatcagagaataaaatagaaatataacaaacaatccaaataaataataaacaaatttaattaaaaaaaaaaaaaaaaaactttcctcattacaataacactacaatcataaaacaaccaaagattataactttgtcttactatgtcaatcaaacaatcactcttactaaattcagttacaagccaatttcagttggcatcttctttttttttcgtcaaagaatctaaaatacataacaaattaaaattaaattaaatattatgacaatgaaagatgtcaattctaaaatcttcaacaagtcaaataaaatgttttatcaaaccaaagcttcaattcttggctcaaaggaaaatgcagacatgaaatccacagctttaccatcaacacaacacttaggcaactcaatccaatcattgctcaccaaatcacaaacaacatagctaaaaacctctgcagagttcaaacatatcaaaatctgatcaccagctccaacacaatttatgtcaaccttctttccataccagcaatgtgacaatgccggtggcatagccgcgatttggagccaagctcgggaagcctcgtcgtaggaccagactcttaagctggcactctcaaagaactcagacaaaagaacaacaaacattttgcctctacattcaacaacatcgattgagtactcacagaacacaggtaacaatctaggaaactcgaaaaatgtcttggtgttgagattgcaggacacaactttccctgttgagcttaggaaataaacaatctcttcaccattttgatttgttgttatgactgatgagtattgcttacatgggcttctttgcatattggttgctactacattcccagctttgcttaggaagtaaactgcattgtcttcattgtctgttactgagttttcatccttgaattgttgtaattcgatctcttcttcccacgaattagtattcgagttgtagactttgaatgacagctttggtaactcaccaaacactaaggtgattttgttgttgttcatcacaatggcatggagattttgattttgtaaaggcgaatcgagcaatggaacttggctgcaagaacccgaaactggattgcataagatgaaatctccagtcaaatttcgaaaacagatcaaaccaccagaggctgcaacaggcattgagttgtggttaggacttttcttaaggagagttggttgattaagccttttccatgtcttttcagctgagtcaaacacaaccattctgttgagttgaggatcaaccatgaagaaccatggatctcttgatggtatgtctgaacaagcaagcttaaaactttccgaatcagccactgatttccatcttttgcatactgaagttaggcgaaaaaatgtggatgttggtagccacgaaaggattctctcaagaacatcttggttaagatcttccatggagaaaaaattgctgagaaagcaac

SEQ ID NO: 189371 - DNA, 3599 bp, Cannabis indica
cccaagtttcatctctctataggtacggccatactcaagaaccaaaagaccaaaatttctcacctctttagcagcaatttagaggggtttagctagggaattcttagattttggaagattgaagctcaaggtaagcttcctattctccttctctttgaattccaagtttttgaaatttggtttttcatgcaatttctgatttaagttattttaggaattgtttgggtttagttctattttctagtagcttcttctctttcctaggttcggccacaatcaagaaccaaaagaccaacatttctcccctctttagcagcaatccagaggggtttggctaaagaattcttagattttggaagattaaagctcaaggtaagcttcctcttctccttctctttgaattctaagtttttgaaattaagttttacatgcgatttctaaattaagttactgtaaaaattgtttgggtctagttctgttttttggtgttgatttggagttatttgagctgttttaagcaagaatgtttgtttatgattgagtttagacaaagtttgagctttagagctcaaactttgctctttaatggtgaatcttgtttcacgggattatatctgtttttattgcttgaattaagtttgttatggcttaattaggttgtttggagagtttggcacgatttggggttatttgagttcatggtggagttttagggttttctatagtgaattggttaactggttttggcatacttgaagaatcggttaaatgtttccccaagtagaaccctgagaaccaattttctgttttgggaatccagtttaccgattctaactgttttggaaccctagctttttgtgttttagcaatgcgtaggttatttccacgctatccattgataaggaaacttctagttttaattttaagtccctgaaaagtgatttagcgtatcacttatcagttttacaaatttgtgacttaggagcctataaatcgtcgagcagcaattttcccttatatttacaggcacacttgaattcgaaatcaaggtaagattagtataataatatgcatatatgattacatatttagtgtgcatgtttatgaatgcttgttaaataacataccagtaatggaagtattagtgtacatagagttgcattgaatatcgatggatatatgtttggcaaagtactaattgatgctatcacattggtatgattagagtaccgagtataggctgacattatggttaataatactatcatacgaatattctagactcagtacgtgtgggacgcgagataggattataattaggtgtatgggcgcctagttattcgactcataaatattgtttgcatgtgtaggtaagggcaagactaaagctggacatcagtgagtttgagctagtgaagattgtacatatcaagacagttagacctggagtgtccgatctttgggataacaagctatattttgttagtcgctagacgataactttgtagttaatattttgtagtacagttgtaacttctaatgacgagaaatcaaattatgtaaagtttaaaggttaattatgaaaagttttaattaaacacaatttttaataaagtcgttagttagaaccagattgcacaattattatttaaattacgataacacgcctaatttagtagggtgttataatttggtgttagagctgcccggttgtctgtcttttgaagatcatcacgatatgtacaattatcatcagagataagctcaactcacggtttagtaagacttcaatgctttagtagtttgttttattagtaagttatgagaaaagcctgttagaaagcatgttaatagcctggtggctgaatatgcacatattctttttcaaagtaagcagtaattagaaattattattgatcactatctaagcaaatttgagtaatgaactacttcgatttgagcagaataacaatacccaaaaagaacatgcgagtcgttttgtgtgttgtgtgagtgtgttttggtagttataagttttggtagttataagtttaaggtgtacaagggaaaagtatacaatcacgccttctgaagactcaaagcaaggaggtacgagtagcggcgataatgagcttacgaggtctaaggattcgaccgagggtaagctgcaaccactctcctacaacttgtaaccagagaccacatgcctacaaatgggaccatcctcctgcaacttgggaccaccctacagcaactggagaccacctgacagcaaacaagaagcccaccttctttaccagcgacatacagtgtgaaagtgacactttgtccccttgggatcactttgtacctcaggctattatagcctataaatacccattctcagatgtgacaggagattagaaaatcatacttgtaaaaccatattgaaagcagttgaaatttttccattatcctctccattttaagagagcaatttgaattacattttatctttctcttcatctcatttttggacttgaagtatagagtttactttccagccacaagttagttgacgagttctcacctttaatagtttggcgctgtctatgggaacgacaagcttcggccaagtcgtttctttacacacaaccatttcaaaatgcctaaacgctcatgctgccttcgagatgttgagattcgcctcaacaataaccagttggttgccgtaggatgagaccctccaccccccgtcgctagagaagaaggtgtagatgatcacagacctcaagtggggagtgaaggtgcaagtaggcaaggacctcaagaaggtttagaaggaaatttttgtgaggaggtctcggtaggtgatcaatgcaatagggtaacaacctcgataattgccacaagagaaggagcattacaaagacggaaagtctcttcactaattagacaccctccaccaccgacaccaaatgatcccagaacctcacatcctagggcgggaaaagaaaaacgagtttactctgtaacgttaagctcttacactcgcatgcacaatgaagaaatgaacgagctgaaaatgaacaacttaaggctggaagagactatggtgaacatgcaaaaggtgttggatgagctcttaaaggggtattctgatgaacccctattcaatgggaattcaaggtgacgaagaaagataagggcgagccgaaggatgaaggaaagtcaaagtactcaataagtaacatgttggaggtgtccccgtcaaaggcaaggtctcgaagaaactcgaaaccatcgttatagtagaagaaggtcgactcgaaggtggccctaatgacttgagggaaaaacttaaccaaaaaaaaaccgtcaagaagagagtgtcgttattgacaatgcaccaccgtaaggaaggtctaaaacatacgttgtaggaccttcgagagaagttgaataagaggaggcaagagcttgatagagaaatggaagacctcaaccggagaatagtctaagctgcattagaggaaggtaactaggatgaggatgattttaacgatgagtcacccttttcaaggggaatccaatccgaataactacccccaatttcaaag

SEQ ID NO: 189372 - DNA, 1174 bp, Cannabis indica
tttcaagtcttaggcatggactttgtacattgccataggaaaatgcgttgtacattcctaaagttccttccaaaccgtttatatcttcatgaacaaattaatggaatagaaaacaacatacccttcggatgcatttataaacgagaaacgacacagctgcccccattaatggcgagatcacccacgaagaagtcactcttgccaacgaactccagaagactgcaccggatcctccatagacaagtccaaatccaaccattgatcctactatacagtgtgtagtagagacaggccacccgaaatatgatgctacctagatcaaaattaagacactgattacttcaaacaaaaactctaagaaatacttaaagatgttttggatttctacatgatatcaaataaaccttctctatatttgattaagtaaaacaatgtttttgttaaccctttttgcaggatcaaattatgtatatttgtctattaagatattcaaatagccttgttcttaatccttttgcaacagattgtttctcaaactagcctgcaatctagcatcaaatccttcatgttttaacttctttattatattctacactaacaaagatatctaattgattttttgcattgggacttcgttattaactaaccattttgtcttaagtgggatgttaacagttgaaattaacaagggccaaaggaataaaaaataacgttggtcaaatgaagataggccaaaagcacaagtaactgcattgcacccaattataaacgagtttctagtgtaatgttgtttattataatccaaggcaagcaggcattgaaaatttgcaacaaaccaacttttgtgtgatttgtttaaagtttctcccaaatcaacaatatatataatataaatatttctttgcatgctcactttatgatattatgggtgcctagcatgtaaaatcagatgtagcaaaaggtagagaacatcatggattaacaaaactaggtttgctaattttggttttgtaccaggaatatggatagttttaattttgtaaggtcagtatggataattttgattttgtacgaccagtatggtctaataaaaaaaatattgatgtactatacacttttagtaatggagacaagcacaaataagtttatagacacttttagtaatggagacaag

SEQ ID NO: 189373 - DNA, 8249 bp, Cannabis indica
gagagagtaccaaatgaatccgagacattgatatgctagagaagatgaagttgcttttcactgagaaataaatctgagagatcgatctgccgaagaacacgaagttgctcttcaccgagaaatgcaggccaaatcggccagagaatcagcgaagatggctgaacgggaaaatgaagaagtttgggtgagagggagattacaatacagccttatacactgtttttattcagcatagaataatacaggatagattgtattaaaaattagggtagtaatatctattacaatacaaggtcccacccaaacatagtattcttataatttaatacaatacggagcccttatacagggatccaaacgagccctaaaaatataaatttacataaatttttaacatgttatttcatgtaaaaaaacataatacaacccctcttttataaaaaaaaaatcatcccacttaacttaaatcatgagtctgtaactgtgcacccacacccatttagtgggtgcacactactacaaacaccctatatttttttatgcatgtacatataaaagcttaattgtgtattgaattttattatagtatttgatttagctttcataaaaaagaaaatatgaatttaataattaacaatttcagtttactaaggataagttagtaaattcatataacacatggtacaacccaaggaggagaacgacttgtcgtttcaactcaaggcttagcttagcgcgcgaactcactaactcggcgccttataagtacgagtgcatcgcgactcgtctctgttctaattttcaaaaatagttatttggcgcgtaaatcaaggtactcttcctctctctccactccactgtttggtttcacagaaaatgtatgagaaaaatagaagaaaatttgttttcttcttgattgatcatcgtgaatttagtttttgtcgcttaatatttcgtcattcaaatagtgaattagagaatctgttcttttcatctttgtttctctcagcagcgggaagcgaatcaggtattttagcttaaatcttgtttggtttgaagaaattgtgaagataggaactgaattgctgctatcgaaattcgaagttagattttatttactcaatcgtgctctaagatatcgatttgatgtataagatgtgattaattgtcaattcaaaatgctcaaaactttaataaattcttgcactcgatctccaaatttatgtttacctacggttatctttatcattcattaaccgatcgtgtaattttctagttataatcgcagtaagtatgggaatcctaatatcttttccttcttctttttggtttgaatctattccaggacagaaaatgtcgaacatagcagtttgcgctcgattcaggcctttaagcacaaaagagagaagagatgatggcgattcaatctgtattcagtgcttagactcggacactttcactttcaaggtttctaattcgaaatttagaatcataattttgatgattgaaaaatatgtgtgactttgatcctgctagtaacctgtttttgacaaaactaatctcgatacatggcaatggcaggatgagaaagaaggaaattcaacatttaccttcgatagggtgttctatgagaattctgagcaagctcaggtctatgattttctagcgctgcctattgttcaaggtatataactcatattgttgcaactcttaactctacatgtattttctctctctacggcgtgtattaattcttgcatcttgaacttctgtttgcttgctatttcagcacaagaaaatagcaaaatatgtggacgattggaactaatcatatttatattctggatcgtgtgcttgtttgaactgagatttaaaattttcacatattggattaagaatcaataagaaattataaattcatgcacatgtgcccagtaaccaatatgtgtccaaaatatattagggaaggttaaatatatgaataattcatatctataattgactttagccctaaaaatcacagttttcttctgatgttccttataaatgtttgtcatcatcactcagatgctgttaaatacactaatggaacgattatcacttatggacaggtaaaactcagtaagtcatttgtcaaaattttctttccttctaattttttaaaggctcctcggtgtctttgtttcaactcttcatataagcttctctaaatttttataaatgaatgacagactggagctgggaagacttacagcatggaggtatgtcatcctagcgtcactagtataatactgattctagatattcatatcacaattggaggtgtttgcatctattaatcagggccctgggatactagaatccgatgatcagaaaaaggggttgcttccacgagtagttgatggaatttttgaatgcataaaatcttctaagaatgcaaataagtactccgtcaagttgtcgatggtattcacacttacatttaagatgataattgttatttgttacttttttttcttttcatatcattcgtgcaaaattaacttcatttatttttgcttccctgcaggtagagatctacatggagagagtaaggtatacccctacaaaaaagaaaaaatataaataaaaatagtcatccatgtatttcttgaaatgctcctccaacaattacagcctataactgtctttgtcagggacctctttgatttagcaaaggacaacatacaaatcatggagaataaatctcaaggaattttgttgaatggcataaccgaagtacgttttcttatgtagcaggactttcaagcaattttgactaattgaaataataatttccaaggtttgctgttcacacatagttattacttgagagtaaatttagcaaactaacccggtaactctagcagcttttccactagtcatggtttgattgttcagtatacttcagtgacatattagtaaccatgctgaggccctcttgatgagattccaactgtgaagatagcttattagctctagaagtgtaatagattggaatccattttcgcgtgtttcctttgtatggaatttttctcctaaagagtaattatgccaagtagggacacagccatagatgcaaaaattggattaactttaaagaccacttatttctttacagaagcagcttcttatttgtttcattttcaggtctccattaaagaccccggggaagcattgcaaagtctagctgtaagatagaactactactgaattttgattcacttctgtagttctcactatatcttctaacactgacactgaatgttcagagtggtgtagcaaacagagctgtgggagagacccgtatccaccattaacttttaaaatataatgacagtagattcctctgtattctctttgggggtactctagatttatgtgaagaccatattttccttgtttctgaccttattataaatagaaatgaacattacaagcagcagaagtcattgtgtttacatattcactctccagcaagaattgaagaaagacaatcggtacaacatctatttgtgtttgtatcaggtttttccataaactaatattgaactttgaaaatctactgacaggtcgagaactagcaagttagttcttgtggacttggcaggctcagaaaaagtagaaaaatctggagctgaaggaagagtcctcgaagaagccaagagtatcaacaagtctttatcagcccttggaaatgtgataaatgcgctgacatctggttcatctgtaaaaacaaatcacattccatatcgtgactccaaacttacccggattctacaagatgcccttgtcagttcccttcactcttggtccatattattatgttattcaactcttactgaaggtatatcctgatttcatcttatagggtggaaattctcgaactgcattactatgctgttgctcaccaagcccctcgaacgcaccagagagtctttccacacttcgatttggagcaaggtgcattgctcattgaatctccatgcaggataaaaaagaattcctaagacaaatcactacaagagctagttgtgttttcgtattccgtatattatttaaaactgaaaattttgacatttcacgtaagggaaactcgactaacatatcactgaactaaagctatggactttcttataataataataataaaaagatttatttttgttgatacatgctggagcagggcaagtcatataaaggcatcaccgcgtgtaaagtgcaatgaagacaaatctgctaaaaagcatggaactcctccttctcccgataaagacgagtcatgtgagagaattctaaacgaggtaggaatgaacctcgcatctgcaattcctcaacttatgttttcatcatcatcatcgttgtcagtgtcaaaacatttttattctaattcttctttttaattgcaaaacttccataacttagttgcaaaagagactagacgaggaagatgtgaatctactggaggagttgttcatattggagggaattttctttgatcctaattcagaagaggagttagagcttgcattggaggatgttactttaaagacaattgtatcgttgaaacaagcagtggaagagttagcatgtgaagttaaagaggtaagagtaaaattcagcatttaacttccttgcatcaataaaaatttcatcatatgattgagataatattttcctaccatattacaccagctgttccttcatagaatttgctcacttttaaattgattatgaaaaatctttacagcttaaaaaggaaaacaaggctctcaaggacgaaataacgcgggttaaagtatctgatgccaaatttgtaaagactggagaagcttcaagtgttgtgcctaggattttgggactctgcagtttcttctctgtttcctggttcgagtcattcttacctttgtccaggtaatgaaatcataaatttccaacaaggtgactgaatttctggggttatagcttcattatatatttgttcatgagacaattagtagaatccgtgaataatttggtatcaactcggttcttattgaaaatctaaaaagcattatccaaatataataattttttcttctccaaaaatgtgcatatactatccttcaaaagtgcacatgtatatttgtctattcgtataaaacattggggatgatacccaaaaacacttttgtatgttaatgcatgaattttgtcattagatacaatctcctttctcaaaagcagattcacaaaatctagattttactcctatttttttaccttcacatccacagctcctaaagcagacagtccaaaagttacatttccataaactacaagagaaatagagagagacaataagcaatggatacagatactgagagaggccaaagagatgctagtacaagttactccccgagcaaagctcagccttccacttattaaatggcagtttagtaagggtccctttttgcatacctggctagggtattctacaagaagaatgtaacccaggtgccaaccaagttaccattattaaaaaagaagtgacagccctcatcaaggaatgcatctcacagtatataatacatccctgaaacgatccatggtagaattttcaaggaataaagtagtacgaatcatttcaacgataccctataattggttgagagccatttcagactcgtcctcattgtcatctgtactaaaactaccttcctgtgatgctattccactgttagcttcaggggataaaccggtaattgacgcataccattcaccttgcaaattgcctgaatctctcatcaatttcaccaaaacctccttattttcgagatcaccttcttgctcacataaatcaagaaaagcagatacgttaacaggttttggcctccaattctttgaaccctcagccgcaaaagcttttttccagtaaaacaaagcgtcggaaattttcttctctccagcatgcccctcagcaagagtctcccatgtggctgaattgggttttcctcccacttcaacaacgtggtcaacaaaatttaaagctttctccaaatttctttgcttagtataataaaccatgaaaagatttgctattctagggtcataagttgacttgaccagcaaccattccttgtaaaccttttctgctccttcaatatcatctattctgagtagagaagagataattgcatggtagcccaaatttggaatattgggatatattgatttataaacattccacaccctataaatctcttctttgttaccaatgctaccataaagactaaaaaggtagtgataagggatccgatcccgacctgtgattctactctcaaccttcctcaaacattcctcagccttcctgatttgccccatcttgatatacattgtagccattgtactaaatgtggtccagttgggattgatggatttatctgttttcagctgttcaaatacttcttccatcttctctgcagatccttgtgatccacgacaggataaccatatattgtaggagtatatatctaatcgaatgtttttcttcaccatttctgaaaccattaactcaaccttctcataatccttgaggttcatatatagtgtcatcatcacattaaagggaagagaatgtgaagcataacctttagttctcatttgatcaagcaaagattctgccttttctttcattttaccacgaacataggcattgagcagagcgccatatattctcctgtcttttgaagtttccgatagactaaaaaaaaaactttcagctactgcaatcccccgaactttggctattaaatctaattgaattgcagcatcactagaggacaatctgaacctctctactcgaccgttcatccactcatacacctgcacagggaaagcagttcaatgctaatgataaggaaaatagttaaacaagataaacgggtaggcaccaatcgagatgtcaggaagagcaactataacaggaaatacttcatttcctttatttcaattctagtagcacagcttctttgtatggacggtaattggtatttacaatttcaagtttccatcctctgtagatatttgattttcgattttaattaacaatataaagacagcaaaattcactcattaaccacctttatcctcaatttaaccatggatttcatccaaattagcagccgaacttttgacaaagatcaaatcattgcataatgttagagtcccttgggagttaatcaagctaacccaaacaataaaaccatatctcaattctcaaccaaacatatcagctaaccaaaaaccaaactcaagactcaaaaataaatcccaatataaagattctcaagagcatgcatataagaacagttaaacatcataaactcatgtaaccaaacatattatatgtcaaaaatggaagatgcccatcgcccacccaccaagcaaaacagaaaacccattaattctaaacacttcccaagtaaaaattgaacaaacaaatgtcttgttaattattacctcaagagctctctcaaaacgcttgtacttcctcaattctttgacgaccctacaaagatcccatttagagagtacctttccctccttctcccactggttcaaaacactgccagaaccaagttcaggattctccataagagaaatcctcttgtatatggcgttccatttcattaaggggcgacgctcgtagtccacagtgccatagctatggacttgggatatggagcaggagactgaaaagctgtgatagtttagggattggcggagggcacaagtgggatttctagatgggagagaacgagagtaggaaagggaagaggacagggagactgatgagacattgggattttgcagacaagtttggagaagcatttttccttttttgggagaaaaagattaactgtgaaaaaatgagagaaagagggtttaggtttacagagctggcagcaatgacagtgtttctcttttcttgtagataaacctctcgtcatctgaattttagtcacgtttctagtttgtttaaactccacgtattagaaataaatatttaatttgtatgtaatttagaaacaaacaatattaacgatcattatagtttattttattttattaagaattaaatattaacgaacaagatcctcatctaaatcgctacatgcaaacggtaggtgggggagatcacatggctcatggccaacattccaaaacgg

SEQ ID NO: 189374 - DNA, 2268 bp, Cannabis indica
aggttttaaacatcataaaagaaaaaaataaattgacactatccgttaaaactgtgaaactgagatagaagaagaagaagaatatggcggcttctctctcttctctccaccatctctcttcttcacttctatccatatcctccgtcgtctctctccgtcccatacgatacattcttcctcgcctttcatgctctctttcttcttcttcttcttcttctcgcgagttcaatatctcctttgctcccgccaaacccaagcccaaaccccaactcgaagactccgaccctcaactctctggcgtcgatggtcagctcttcattccctggattgtccgtggtgaagatggaaatctcaagttacagtcccatcctcccacgcatctcctccaggccatggcccatgccgagactaagaccaaggctaccaccgccgccgcaaagaagaagaagaaggagactgttgcgaagacgactgagccaaagcattccaaggcttcgcgaaggttctataacgagaattttaaagactctgaacagaggctcagtaaggttctcgctgcggctggaggtgattattcgaaattctcactctctcttatctgcaattccttctgggattgtttattcgatttctgttgattatgggagaaaatgctaatttggacaggattaggatatttagtgggaaattgattatttggaatgatgaagaatatgagtgataggttagtggattttcgtggaaaattagtagtttgtagtgggaaattgattatttagttttgtgttgaaattcaaagaacttggaactggaagtttggactttgttttgttgaaggttttatgtggatattctatagttcttttacaccaaaagcaatatttgtactttactatgtctgaagtgtatattttctttcttaagttttgtgttttaatccgaagtattgaggatgttttcgaccaaaggttataaattctgtcaaatgcaagtaaagagcttttcatttttcagttgagaaaatgtgtggtcgatcttttgaagaattgtacaagttcaagttggactagtgtgatttatttatgtatttttaaaaagaatttatctctgtggttgttgtgtacagaaatttggaaatgtcttgtgaattttcaatctttcacttttattttcattttagtggcatcaagacgaaccagtgaagaacttatttttgaaggcaaggtgactgtcaatggctctgtttgcaagactcctcaggtcacttgttgctcctcatctattactagaatatttcaacctgttagatgtgagctttttattcatgttttgaaactattgctctaacaaagaggagttcttcatattatttttcttgctgatgagcagactcgagttgaccctgcaagagatatgatctatgtcaatggaaatcgacttcccaagaggctaccaccgaaggtctattttgcccttaacaagccaaaagggtttgtcccttgtttaatccctgtttattctttttttcctctagaaattgttacttagagcccggaaatacttttatctaggattaatgcaattatgtttgacaggtatatttgctcttctggagagaaaaagtctgttctgggtctatttgaggattatttaaagagctgggtatgcataactgagttttatacttttttttccttttgaatttgttataaaagactgtaaattgagcttgtgaactgaaagatcctttttcattaattaacagttaatgtatgtgtttcactgaattttttatcatcaaaaatattgaactcaaagtttgtatttccaggacaaaagataccctgggcaaaccaaaccacgcttatttactattggtcggcttgatgttgctacaactgggttgattatagtgaccaatgatggtgtgtagcgcagccattatatgcaaatgtctttatgtaccgatttgtagcatgatacagtgatctaacttattctcaacactataacttctcaggagattttgctcagaaactttctcatccatcatccaacatgtctaaggagtaagggcttgtaaaatattattatttttagtgataaaggaattatcattcttaacagtttctataaattatagtgaggtggagatttcttatgttaaatcatgtgatttgattattgcttttgataaacacttctaagttggtggtagattattctttgcgttgtttttgcttgtggaaaagaatgctgcatgtatat

SEQ ID NO: 189375 - DNA, 5830 bp, Cannabis indica
attttataataattttttaattagctatgtttgatatttaaactataccaattagtatcagtgtaatactttttaatatttctcttttttattaagtaataaaggaagtgtgtgctgcctaacttaactttttaattaaatttaaagtttgttttaattaatagtgtatcacctctaagttctagcctatgctcataaaaccaaataaaatgtatataatttcgtcatgtaatatattatcacaatttctaacaatattaagatttattattactattattagtttatcacatacaaatgaaaattatatttttatattattgagaggaggcaaagctatctcatcatgtgaacctctacgtagttttttttaatttcaaacaaataaatacccaaaattataatcaaattttaatccatgataataagatgatgatatattttcctaattctaatatatttttccacatattatttatttaaatgagctttttaatattgtaaaaaatttggtaagaaattataaaaatgaattaaatcggctttttcagctttgaataaaataaaatttagtgcctcgtttcgtaaaagcgagattagaatagaattcttcaaagtaatgaaatgaaatgaaacgacatagaagaataatggaaacgacatgaaaaagtgaagaaaagatgcaagctcaagctcaaggtggtcatggcggtcaaggtcaggttcaggttccggcgagcgaagtgttctggtcactggtccacaaagccgataagaaattctccaaaatcagagatcttccctattaccaccgcaacaggtaccttcctacctactcactacgcttagggttaccattttcaatttcaatcttcattttcattttcattttgatgatccatgatccattcgatggatcaggcaggagtacgatgcttacttctacaaggtcttcaaggtctacactcaggtatggaagttccagcaagaaaatcgtcacaaactcgtcgaaactggcctcaagaggtcagagatcggcgatattgcctctaggatcgctcagctctacttcgctcactacatgaggaccagtcaggcaagctatctccacgaggctttcatcttctacgacgccattctcactcgagactacttcaatttccactctcactccaatgcttcacctcacgacatctccctcgcctccaaacatctccgcttcatttcaaggtacattttactttcttattggattcgatttagatcagcgtttgtttgtttgttgtaaataaataaacacgtaatgtgcttgcttcaggtttctgatggtgtgcttgcttttgaaccggcgagaaatggttcagcaactgcttaaccagctcaggcttttgcttgatgaatgcaagaggaccttcaaagaaaccgacttcaaggaatggaagctggttcttcaggagctggttaggtttttgaaatatgacaccaattttatgaatatcaggcctcttaggtatagtgttgtgttggacactttttccgattcgctgtctccacacaactgttctaggaatttgaggcttcgagacgctgttctcgccagttatcatcacaatgaggttaggtatcgatcaaggttttccttctctatctttttttcaattcaatcacaaatgctttgctaatgtctgtcaacataacctgaccacatttcatggctaactgaattggaaacctttattgctgttgttgttatctttggtggtacacaggtaaaattttcagaggtaactcttgacactttcaggatgcttcagtgtctggagtgggagccctgtggctcattttaccaatcaaatctaaccaagaatggtcaaaacggaccctctgctgcccctaaagatattctcgaccctacactgcctcctaatcctagaaaggcggttttatatcgtccttccatcacacattttctagctgtaagtatgacaaatatttttcaataaggcttcatacaattgtgaattttcatctatgctctctattatgttaagttaacatcatggaatttattatgagaaaactgtttactcctactacttgtagttatgttgttgagtaaataactttttagtgtgtgacaatgtgatattggtctgcttgatattatttcagaattgttgtgtttttaagcctatttaaatcttatgtctactttcttatggcaggttgttgccactatatgtgaagagctccctcctgatggaattttgttaatttacttgtcagcttcaggtttatttcttgtcttttattcaaaataacattttagttcgtgattgttactttttgttatagttggtagactgttatttatttgtattgtttcatctataagaactattattctgtctcctgcaggtgctcggtacactgataccacctccccttctccattaggatctgtgttggaaagattagacccttcttccgagcagcctgaagaatgtagctcagcattaaattctggttgtttacactttgggactcgtgggaatggaggtatgtgcttatgttcttttgacaatgtgatttatatggcatttttagtattgactttatacatgagaagcagacaattttctaacttgaggatttattctaacgtctgatgaatcattttacaggaataaattgcatttatcccagtgacctggttccttttacaagaagaccacttttcttagttattgatggtgacagtaatgaagcatttgaggcaagtaatcacctgccatgtttgaggacatctacttttttaaatgcatcggttctcaattgtgatacatgctactttaaatattcaaccaatatttttttattttaaaatcgtattgctgattgtgttgtatattatagagttcaatttttgcatttatcaaaacaaactgtcattttgatgtgtatgatgagtagtattttattttggtctctagtgaaatatttatttcacctatataaaaggttattttgattgtgtgagaaggcgataaatggagcagcaaaaggagaaatggcagcaatccttctttctccgagaagttcgtatcactgcaccagcactggttcgcctcttcattctaccggaagtctattcactgtttttcttacagctccattacaggctttctgtttgttgctttgcatttctgactcagatgttgaaatggtatgtattgtgtaacagtcaacccttttggtttatgaatactgctgttttttagctttttttatcctgactcgctagctataacaaactatttcaggatacatttgttaaggctgagaaattgatctcatctttcttaaaagattggggtgtaaagttagctgcatcagactcccttcatcctgtgtgggctcagattttgaacgaccctttccttaggcgacttgtcttgaggtaacattgattttcactttgtgttcgttagtttatctgcttgtgggatgattgaaatatgttggaacagtgaaacatttggtgggttagcatcagatatgcttataaacgcttggaaacttaaaaatgtagccctttttctaagattcaggtgaaattaaaacaaagattgaagacgttggtaaagtaaaattcagaccgtgtcattatctgcaaaaagaaaaactataattcctttgttgagctgattcataaaaaaaagtttagagcagttactgagtctacattttcttctatacaggtttctgttctgtcaggcagtgcttgcattacatgctcccacattcaataaagatgaattcgtaccaaagtctctgcctgcgctcccaccatctttcctgccttcaactgtcttatgtcaaacgctagttatgcagctagcgaatatcttcggtgctaccaacagtttcgtattctctgattcggttgcacttccagaaaatgcatacggtgacacagactcaatgtcatcttcttgaaagcatgggtggagagccaatctgtatcagttcaaacagtcaaaatatccgagttgtgttttcataattgtgctttaagtaggttacaaatttacaagtgtggaaattcagggttaaattgtggaatggtcaatctcactttgttaaaatcaagatcacttgaaggttgttatgtgatatggcacaattttgtgtgttgaatcatcaaattggatggtaaaaattgcctggcatacaaagctgagttgagtaccatgatatattttactaattttgaccatgacattattttgtaatgaagatatataataaagtaaagtatggtttttctatgatgaaaacttatgtgatattgagtctcaacttccttggactctatctgacaattgcataacgaacacagatatcacatactagatagatgtactgctatggatgcttccaacttgctaagaccacaaaagtcatatggtaagaaaatactagtccctaaaccatactttgataccatgatgtctattaatttaagttaaattagtttattgcaaaatggcaaatgacaataaaataagaataaaacagaaaatgagtattaatttaagtttttatatgaagatcgagcagaggcaaactgcagtgatgagttaaatagtgaatgtggcacaagaagtagataaagcaacgttcacatttgcagaactgtctgtctctgatatatattcgtatattaattaatagcacacatgtacactataagacgaaactggtgaattctaggagtatcagattctcactctcgatcatatcttccatatatatcatcttaattatattattccttttttttttatttactatatatactaaccccactactcacttcttctcttaaattaataccttattaaatataaaccatgcgaccatgtacagtacagtgtcctttttactcactatattatatagattataaatagaaaatatttaaaaattgcatgcatatatgtagtacgtggaatcacacattgattattaagcatctttatattaatgtattaacggtatatattaactttgatattattattattattttgaattaataacataagtaaacaaaagaacatgatgatgatgatctaatcaacaacatgctaatatatgtaaattaacgttccatttagggaggtgttatatttgtgttgtccttatattacccaccactccacttatatatttattgactgtaccatatatttataacatggaccagtaattaatatattattaattgtaatatactgtagtctgtaccatgtctatacatataataacccaaacaaattaatccaacgttcatttatctgtactcataatcatcatgatctcaattctcatgcatgctgctatagttctttcttatttatttatttatttatttatattttaataacaaaatgaaaattttaatggaattataactactcagtacgtacgaggcatcatcataacttaagcatttatttcaatcttcaacaatgttcatataaatatatgcttatttagttcacaggctcacaccacaccagatcatcatatactcgtgccatacttttttttcttagaaaagtacgcgtgacaaaatatacagtctaacgtacaatacatgtttatttttttaattaagttccaaattaaatatatatacttttaagttatagccattgcatatatattattagccctcatgaaaactccaaaaaaaattgatccatttcatggtgatgatcttcacggcactgagttgaaataagttataagtgaaaaaaaa

SEQ ID NO: 189376 - DNA, 1188 bp, Cannabis indica
aaataaatgccaaacgaatctgatctgatggcagcattcatcagctaaatattacaatgatcaatacagtttcaggaatgaatagaacagaataactaattaagtgacaagcttttctttgcatggaatttctgctgcaaagatcttttcaatatgctgtcatttcaatatgcacaaatatggaatctttttatagtgttttaaccaagtagatttttagggtcttttagaatttgaccattggtgctagtgcacagtgcacgcaaaacaaatcaatctttggctctcatacttatcaaaaaaaaaaaaaatctttggctctcataaagattattaacacatatgtgtatacacatactacatagattcaaaatcaagttaacttatttgcttgataattcaatcttgagaaaaacaaaaatacaatcctcaactcctataaacagagtaatacttaaaacctttttttttttggagataagtaatactaatacttaaatccttgatgttcatttttattttattttttcacaaatcttttgattttgaatgaaattttttacattttgtatagtgaaatgttaaaaaaaaataaaaaaaaaaataaaaaaaaaggaaagtgcaatatataagaaaatactagtttcatccatagaaaaactttgaatctggttttaaataaatatatatacaaggacttaattgcaaccaaaaagaaatctcaaagaccaaattaaagaatttcatgtatgagttctcactatatgacctactatatccagtagaaaagtaatgaacctagagttacattataatgcatttgtagtgaaaagttctgtatcccaaacatttagatatatcaatttaaagttgaatttatttcataggctttattacaattaaagagctgagaaaacatatcaatcttcatcaaaatttaccaaaatcaactgtgttactttcattgggcttgctgaacactgtttctcaaaagggatattactttggctggttctgcagctccaaacactgaactccctgcaacgatacagtttgcccctgctgaagcagccatttcgatggttgaaggccccaggcccccatctacctgcaaaatatacagttaaaacttgtttaaatacaaaccataaagaggagagatggtagtacacaaaatagtaatgttta

SEQ ID NO: 189377 - DNA, 1826 bp, Cannabis indica
aaaattcattagtgtaactatatattatatcgttacaagtttttaaacattaagtacggaacacaccctatatatattatatttatataaatatataagcataataatatatatttcttttcattaatttactcatttctatcgatctaaaggaacatataaaatgcattatatctctgtggtagtgtttgtatatgttaaattaattcgtaagcattacttcatgtattataattatattataggtaattccaaagtgcaacaaatatgtgaattaattatatagtataatttttatatatatttataaaataaatataaagatgtatatatatatatatatatatatattgctggtaccatcattttgctgccttcatgatcaataccatcactaactcaattccttggtacactatcatatttgttgtcactttccaatgcatgtttcctattatttcgaatcattttcctctggccaatcaaaataattatcaatatattataaagcacagtattattatatacatgtatgtattagtgttgatctctcgaaccacacatgaaatttatagaggttggtcggatctttcagtttaattgggcgaattggacctattttcaattaacagattggacggtttataattttttcgggttattttagtttgtaatttttatcgattttattagtttagtttgggcgagttattcgatttggatggtttataatttttttttgtacaaccctaacttttaggtttcccatagtttgtacaagtccagagcatcaaaaatctgataaaggaccgggatgagatgaattacactaaaaaaatattttttgaccatttgtggccacgacgagttggcttatgtccgtggccagaatttggcagaatgcatgaattgaagattggttcggtggccgcggcgagagtatttatggccgcaaccaattcttcaccgccgcggcaagaggacttatggccgcagcaaaagttgggtagagaagggacaaccttatggcggtgatctcgccgtgccgaggcttttggtggctgcagcaagagagtttgtatgactcgagggaaactttgtatatttgtaatattttgagtgtaaactgattctatttaaggaaactttgagttaaaaagtggggactgagaaaattaaccctaaaagcagaaaaaggacgacaactagagcgagagtggcaacccagatctattccacaatcagtttctttcttctccttttatttcttttatgttaattgttctttttagttttattatagatatgaacatgaatatcatgaactaaattctcaatttaggaatatgatgaatcttatttgatgtttccttgaattagttaatttgattgttagtttttcttttctggattgtgtgatttgttcttatttgctttaactacatgttttagactagccatctttattgtgataaacatcatacatcatactcacatatttaattcccaagcaataaatcatgctatccaatataaacaatcattaataacaaatatttgtctaataagacaaactaatgatgttacttaataaagtaaccattactcgttgttgcctaatgcgacaatatttatacagttgcctaatgagacaaccaatgtcactatcattttctaatgagacaaacgacaagtaagaaacctaacaacatgtaacaccctactagtttaggcgtgttaacgtgattttaacttaattgtgcagcttgttgctaatcaacatgtttattaaaaatcgtaaaaaattaaaactttctttaattact

SEQ ID NO: 189378 - DNA, 2079 bp, Cannabis indica
ccagggacgcgtgacgtgtcagcgtagctggtgtactcgaccagaagagtgttgtgaggttctagaagcttcttggccacagagatgctcttgtgcaaatcctcttcgttggttttgtcgttgtcgatgctgaggaggacgttccttctgcatatgaattggaattgtggagttttgttgtggaaccccgtcactagtagcacatcgccaattcgataccgatttagtcctgtatgtacgtattttatacatcattacaaaaatttctatgaaccccaaatagttaaacaagaacaaacagagttaaaaacaaattttggtataataagaaagtgatcaattagctagctaggttagcacatacatacttacgactgatctacctaagccagtagaaaacatggttttcttaccaactcttagctttcacaaaattaacaattatggaatatacgcgttatattagacgaaaaaactcaaagtaatctatatacattttgtaaaaaacatcaaaattctattatggcgcctattcatttaagatggttaaaaagtaaaaaataatttctcctttttgatctagtattgataaattttttacaaactaattaatctgagtctgaaaatatttcattttcatgatgatattcataattatagaaagaattggtattattaatataattaccggcaaaagtggtgacgaccaattcataataagatccacgtgtgacgtggaccaaatcaacaagcctgtcaacagggacctcatcctcctcagccacgtccaacacgagtgtaccattatctcccaacggtataaactcaaagtaacacatattgggcataagtgtgaacgccacgtcagatgggtcactaagaggtttcaagttgaccccaaagtaacactcagaagaagcatacatggtacaaaccaaaggcaacttcccaccactgtagtactccaaagccggaatatactgagccatggacccagttataactgcctcaatgtacttggccttaggccaaagtttacacaacacacccttccacgaaccacctgattgttctccacatatctcctctatctcctcagcaagacccgggttcggggacgaaacgacacttgacatggccgaacgacactcggggtctgtgatacaagggtctaggcggcctagccggatgtcgttgcagaaactgccccagttccgctcgagaaatgaaatggcgcggaggagagcggaggcgaagacagcgccgaggcgaagaacttggtggcggttgactaggccggagaggagctggcagtacatgctttggttgctgtcgttgcagagaatcacttggtctgggctagtgtagttgctaaaggcatcgtaagctcggcacttgaaatgcttactcttgtagtagctagtcaaaaccgcacgtgccggaagcccacacggtgtggacatttcagccttgacgaagtacaggaacatggcttttccttcgtccaaaccaggaacataccttaaataaaatggtcccgtatttaattgagtagtcaatttattttgtaacaagagaaaaagtgagttaagtgctataccttttataaatattaattaaacaacttgagggacatgcaacaaaaagcatatatacgtgaacagcaaattagtcgattatatgtacaaatagtaattgggtttatatcgtggtttccacgtcaaaatgcactgtgttagtgtgtgttatgccttatgccatgatgaagaggatgtcatccctaaagtattgatgaaatgtttagactaggcttgactggtatatggtgtcccatccatggagcactgtttaaacaaaaggggatagataagaacacacaatatataaatggctggtggataagattttcctagctagaatttggaatcagaatcactagggaaaaataaaaaataaagatgttcttattgcgtaacaagatttgaaagaaagccttttctttcggctacggataataatgatcacttatttgaaagtatatagggattaagtactgtacatattttgaacacttattat

SEQ ID NO: 189379 - DNA, 2680 bp, Cannabis indica
ttttatttttttttaatttttgagacaatgtacaagttcaaaagcaaggagaacattgtcaataataagccttcttggaagaaacgcactctgattttgagatatagcagcaagtagaacttttttaaaccggttcccaatggccttagagacaattttgtagagaactgagcataaacttattagacgataatcacctatctggcggggttgatccacttttggaatgagagtgattagagcagagtttatatctttcatatccgcaccttcatttaaaaactgaagcacacaagtcgaaactagggaaccaacaacatcccagtgtcgctgaaaaaacatcgcagacataccgtcgatgaccggagatttgtcaggagccatcgagaaaagagcatcatcaacttcgaattgagtgaaattctgggttagaaacaaattcatttcatctgtaatggtagaagaaatagcagataacataatgccaagagcttcttgatcaacccctgctgttgtgaacagattagagaaataggaagcagcttcagtggcaaattcagcttccaaatgaagaacactaccatctctagaaagaagtgatttgatcttgttgctgttgtttctagcctttgctctggaatggaaaaatttagtgtttgaatcaccacttttcaaccaatccactctagctctttgttgccaatacaattcttctttttccaataaatcatctaaaatcttttcagcatcaataacttgggccgtatgagcaggggagttagtcatactgttatgcaaagagacagctttagcttgggcattattaatatcctttttcatttgaccatatttgccttgatgccagttttgaagggcatatgcacatgatgaaatattctgcaacaaattgtctaatgcaccagtggacagagattgagaccaatttttcaagataacatcacgacattcagggtcctttaaccaaaactgctcaaaacgaaatctgtggtgagatattgtagccgaccgaacctgatttagaggagaaaccatgaattcaatcgctctatgatcagaactgaaataatcaaggtgttgaatatgattctcactaaaaaaactccttccatttagcattaataaaacctctgtcaagcctttctttaacaagaactccttaaaaattcctattagtccaagtgaacttatcaccagaaaaagccaagggaaccagattacaaacatcaacagtttgcctaaagtcatccattaaagcctctcttcgcaaaggacccccttccttatcatcattagataaaagttcattaaaatctcccattagtaaccaaggatctgaagtggaagtgggagcaaagccttttaaaaggttccaagtgtgagttctttgatgagtttcgggagagccataaaaagcagtaaaatgaaaccggggaccacgatcatacgaaacaaaaacatcaaaataattcattgaaaaagaattcagtgttacatcaatgtcatccttccataacaacaataaacccccttcaaaccatgcctagggacttctaaaccattgctaaacttaagagaggaacgaacccacttgatagaattacaagcaagttttaattccataataaaaagtaagtgagggcgctgcttattaacaagcagtttgagatgtctgaatgccgaaggattgcccaatcccctcgcatttcaactaataatcttcatggcgccatgcggggctgctgtcccgcaacctctgctgaaaaaactgaattctcctcatcagaatccgactgtgattcagaaacttgcagattgttgaactcagataaacctttactgttaccagtattattgcgacaccttttcaacacacttcgaaaatttccaggatcaacctgcattttgaaggtcttgctggatgtatttccatgttgagcaacttcctcaatcaaaatagctttgcctttgtcctttacagaggtagttgtggcatcacagaaaataggattgaaccctttactaggaggagggattggtatatttggtggaggataggtggcaaggatattggtcgtaacagagggattggataggctagatagtgaagttgaatatgcattaatacaatcagtggtaaaggtgagcatagttgaagaaagactttggaaaaaagtgggaaaaggtgagggaagttcagggattgcctctgtttggtgaagggagtgattgctagattcagcatctgtgagaggcgaagggtgtggtggtaaattgatcatacgagtttgataatggttagtgattaggatagctgaggcaattgattttcaggcaagcctagtaataaaaggatacacattagccttggaaaaataacttcgataacggtcataaccggatcaatcccagaatccacaagctccatgaaaaaatgacacttctcaaaagggtggccgattcttccacaatgaaaacaaattatgggaaggttctcatgccgaaattccaactaatgctcatcccgaacttttggaagagtgacaagcttgcccctcataagagggtgagaaatatcaatcaaaacccgaattctgatgaaagacccccatccttcatgcatagaatcctcgtagacatcaacatagtcaccaatccattc

SEQ ID NO: 189380 - DNA, 2567 bp, Cannabis indica
aaagggtgccacttcccttgaagtaaaaaacttgaagctgctatgatcagcagcccaggcagctagacaatgagctccggagttcaaacagcgaggtatccaacggtattgacaatgcgacagccgagcgaggaggttgcgggtagcctcgaacagcccacatgctctccattcaggcgaggggccagccgccaagctcttcaccaaagtctggcagtcggagaaaatggtagcattttcccaacccgactgcagaattctgcagcaacccgaatagaaagcctccagttcagcaacaaaaggagttggcaccttcctcttagcagtaacagcttcaatcacagtccccgaacgatccaacaccagaatcgccacgataccaaactcctcacgtattgccgcatccacaaacacgttaacatcagtccaaagacctctccaatttgcttccgccactgcaggaatggatccctgcatctccaaagaagaaggcctatccaaagagtagtcggccaccaaagaggaaatctcttgctgaattttagacaccatcgggctgagaccctcatggaaggaagagtttctaaccctccacagcacaaaacaaagagatataacatatatagtgaaccgaaccaaatcattctcacccaaaggagtgccagtcggatgcaataaccacttgaccagctccaaattatcaccaaataccatagaatctgaacagaagccccacggtcccgatctccacacttggacagcaacatcacagtgaaagaacaaatggctagccgaatcctctccagaattgcaaagcacacattgagaactattaccaaagatacgttgaagtctattgccaaacggaaggatgtctctagccaacctccataggaaaattttaatccgctcaggacccgaaaccttccaaagagacctccaaaggggttcgagaattccccttcctcgaatccgagccaagaaggcccttttaactgtaaaccgaccatccggagccgcttccaaaacagctcatctttcgccgtcatcgagagcctagggacctcaagggcatcacgaaccatactaggaaaaaaccaagactcaagagcctcccgattccactcaccacttcccgggatgagtaaagaactaactcgcacccctttttcacagattcttggattgaaggaagctacatatctctcccacccatagccaggcagccacggagaatgccatatatccaccaactcaccgttaccaatagcaaaacaggactcatcccggatgaaatctctagtggccataatacttctggctccatacgaccataggttagagttgggggcgctccaaaaggagcaggatcttctgaaatacttatccttgaaaaattgacaccataaggtgttactctcagcagccaggttccacccaagcttagctacaagagcaaaattaagtcctcaaacttcttaaaaccaaggccaccccaccctttagggacacagatcgaatcccagtttgtcagagctaagaatctattggagtcatcagatcccttccaccaaaaacggcgaaccaatttatccaagtcaacacaaatggacttagggatcaagaaagttgacatggtataaatgggaacgctcatagccacagattggatcaaggtagagcggcctgctaaagaaaggagtctagatttccacccttcgatgcgccgcgccatcttatcaactaggaatccaaaatcccttactttactccccgacaacagaatcggattcccgagaaacttatcctcacggttaagatctcgaaaccccaacagacccttgatttcacctctaatccccatatcaacattatccgagaaaacaacggccgacttgtgggaattcacacactgacccgaattcctacaatacatttccaagcatcgcttgacttccaaaacgttctccttattggcttcgcaaaaaatgaaggtatcatttttgctagcctaaaaaaataataattattccacgtcatcaggcggcttacctgaatgtcatgattctttcttcgttacccactcgacgtgttatctgtaaaataaaacaaaaaattagactttactaacaagcgagaaaatctctttttatattattagtagtgcattattataaaaaaaaaatgttcatatctattttatcattattagtaaatgtatttcactgaaggtgttaacaaaaaaaattactgaaccaactaaggtcagcttattagatcgtatataggagtgtgtgtgagttggaggcaaggcgggttcgatccccatatgtataaaaataaaattcaccaaaatagtaaaaaattatttatgtttactttaaacaaaaattatattagctttaatatatagattagttatattatatttatatattatatatattataaaaattgtcattttgtgtcacatcacacacttatgtctagagattcttgtattatattttaaaaatatcaattttaatcatttacagggtatccttttattttattttttaataaaa

SEQ ID NO: 189381 - DNA, 4555 bp, Cannabis indica
gcaacagagaataattaaataatatacaaaattaagctttacaaattaacaaattttcccaggaatagaaaattataatgactgagaaaaagtgagctattttagacaaagagctaggaaatagtcaaggaataaaaatgagcaattcccaccaatgtgatttcgcaattataagcataaaattagagtattattgccatggaaagtatataagaagtagatatttattatgtcatctcacagaacagtattattctagaagtcgatgcttataattatttattattttttaagcctccactgtattgatgaatatggaaaaacaaatatttaagaaaattattagtacttaaatttgtaataccttctagtgaccattgaccaactccgtcagccagacctagccaattttgggaagcaacaaaataggcatcttctgcacctatgaatgcctgacaattattagtgttttaaattatcgccattagtattgaattcaagcacactatttacttctataatttattaccattagtactgaattaaagcacataatcagacatgataacttttgtgtatcatgaatgtctgtacttgttatagctgcacacactattaaaatttcaaaaaagtaccaatgataaaagacatcagaattgctagatagacaccatattaaaacaattctggaattcacataaaaattgttgtataagtgcatagcaatactattgagaaggactagaactcaaattattgtgttgcacttacaattaaaatgagattaaactcctttaattcactttttaaactaatttagtttagtcttcctccaacatggagcgtatataactgtttttatgttctcctaatacatatttgacttataggaaaaactagaaacaaagatttatgcatatacctttgagggatgagtcaataaagcagcaccagtcgatagcacgagactggatgttgagatttcctccctgcaatcaaagtgaacacataaggaactaacacacgacttctctggattttgataatagcttttcttatcaaaattcaatattgctattcggggttttctttctgcattgtatactatataatcaaactattaaataactggataacttagttctcatgaaagatgaatccattacaacgttacgcgcaccaattaatatggggtcgcaagcaaatcataatgtggcatgtgatacttcagaaatttggtaagcatcaaacaaatattactaatgctgattattgctgcaaggaaacaaataacatctgcctatttttaatgtacggtaaagatgttttagtgaccacctaggcattgaacagatgagtacataaacaaagaatacttatagaacacagctacatgtacactgtaaaatgatagctccatctgtactctggacacttatgttggcctatacgcaaccatatgcaagcgaaattcctcgttaaagataattgctccaaacaataaatgtaagtgtggctaaaaatacatatggtgcatacctactaatcacatcttcatttgaatgaagttctgcaacttcagagatcagttctacagcaacatcactgctgtttgatgtaattcctctctcttcttcgcaatttgtggaggaggcatcagaagcaatctagacacatgaagaataagctattgagtttctcactaccctcaaggccatttagaaaactgccaactttaggtgaacaccagccttgtgggaaaagaatgctaaaaatgtcttgaatatatataagcacaaccacagcagcatttagaaaagaaatagaaggatattctgaattcaaaatgcaacagcaaccagtacagccccagggtgaaaaaagaaaaagaaaatgccaagattccttcacctcaaccttcctccagtccactccagcctcaatcttttttgaactatttggagtcaaaagttcaagtgccatcagctatggaacactacagagaagtggacaaagcagcacatccaaagaaacaatacagatacatgcagtgtattcatccagggaaagtattacttaaaatgaggaatacacaaaccaacatgtacatttgcatgtgtgtgtgtgtgcgtttatcttttataatgtattataatttcaccatgcattattctagaagagcagaagccataatgttatatgcaaagagagaaactgaaagtaatcaatgccttatactcttctaaaagaaagaggggttttgtagataggtatgccaaaataataaatcaaataatatgaacagttatctagtggagatttggagaaccatggcatatacaagctacctaaaaactttttgtagtgaacaaaggcagacaccataacaaaagccaaaattaaagaagttggatctacaagttattctctacctttcaaaagagagacccaaggttatacataaaacagcacacaacacaatgaaataagcactagtatttataaattgagacttacggctaatgaagtttctgtttccttttctccaacattctcattcaatacactcagactcctttcctcatccaaagatgtttgggcctgtactgcagaagacacaatcgttgcctcaagcagattaccaccatctccaccaatagtctgctgataagcaacttgaacttcaacttcaacatcagcactctgctcattacttgcagaagtataatgatcatcaaatacctctgttgtgttgtcagcaacttcaacatcagtcctctcctcattacttgcaggagaagtatgatgatcattagatacttttgctgtggtgtcaagtttggaagatgccgacccatttgacacttcattctcacaaatttgtgttgtattctcctcaatgtggctatgcacttcctctttcagaacatcaacttgaggaacattatttctagccccaacaacgtcctcatcatcggatacatcatctgctgtgtcaagtttggaagatgtcagcccatttaaaacttcatcctcacaaatttgtggtgtattctcctcaatgtggctatgaacttcctctttaagaacatcaacttggggaaccgtatttctatctccaacaacgtcttcatcatcagatacctctgttgtggtgtcaagttccgatgatggaagcccatttaaaacttcatcctcacaaattatggttgtattatcctcaatgtggctatgcactttaacttcatcttcacaaatttgtgttgtattctcttcagtgtggctatgcacttgctcattcagaacatcaacttgagatacagtttttctagctccaacaatgtcctcatcattgttaagagacgcttcatctacactatacaaatcagaagataccaacccatgtaacactttatcctcactaatttgtacagtattctcctcacctttactatgtatttcttcattgagaacatcaccattaatagaaacttcatctacaccagatgattcagtagtttcaatctcatatgttgtttctcccaccaatgatttactgagtcctgatacaccagatgattcagtagtttcaatctcagatgtcgtttctcccaccaatgatttactcagtcctgaaacaccagatgattcagtagtttcaatctcaaatgttgtttctgatacaacgttacatacagactctactacactaaaatcttcactgacttctctgcttacttcggcagggtagcttctttctcttacttcagaatgagattgcacttgttctaaactactttgaggccccaaattctcactcaatttttcaccattttcatttaccaaaccttcagtgtcaacatcatcgccatcaacgataaccttatcagtatccacgcccgaaactgatgtttcatcgtctttagcaattccaaaacgaaatacaacgcttccgtcagaacactctgtccaaaccaccatttccagaaactccatttagaaaaataaaactactaaatacagtcatacaaagtcgaaatgataactttccctgagaaacaaacagaaaaactacaacggaaaaaagaaaaaaaaataaccaccgtacctgccgttgaaacgatgccgaagtccggttccgacttggagagaattcgaaaccttgtccgctgtttccgggttcgaattacagccgattttccagcaacattggtgtgatggtgagaagttctggggaagagaatgcgaggatggaggaagagagagctcagaggctggcaagctctaatagggttagagcaaaattcagccattttcgtttctctattccttttcattcatcttaattttcttttgctttttctggtaatataaacgataacataacaaaagaataaaaatcgtattttgttttttgtctgaaaaagatctagtttggctttttagctttggccggagagtgattccgtatccaagaaagtttaatttccgatatctgccatggattccggtgggaagagtccgattccggttatagacggaatcataaaattcc

SEQ ID NO: 189382 - DNA, 3218 bp, Cannabis indica
ctaacttgatcgtggtcggtttgataaaaataatcattggtgaaacgacgtcgtttgagactaaaatatctaaagaagataagtttgaaaattagtaaacgacaccgtttatgtaccccttttccgtctgatgaattatcagagaaagttgacagatgccataaactctttaacgataggcagttggcttggcacataggggtgggcattgtgcaacatctaatccaattatatttatttatataataaaatatatataatatatattaattatatttttaggatttttttgtgttgaatttataacacatagttgttttcatcatgtttagttctattttattataatgttattattttaattatttaaaaaatttagttgcattatacttgtaattgtaataatagtatatttatggattattaaatttaaataaaaaataatatttaatttttacgtatttttttcataatttttaaattaatattaaaatttaaatgtgtaattagaaatttaattaaaaaaacgatctaatccaattagtaattgaatgataattttttaaattcaactaataattagataagttcggataaagagtaaaatgttagattggatagaaaaatattgatttagatcggtaaccagtcttattggcacataaatttttgtttttttttttttgaagcaatcttttcttctcataatatctcaagtcttaaccttacatatacatcatcatcatttagattacaaatccaaagttaaaaatcaatgttaaaagagggaagaggttgaagagctgccgataggtctttgatgtaacatttttctgtatcgttcatctaagaaataaagcaataaagcttgaccaaccacaaacgaaaattggtttaaggtctaaatcaacacctaataaaataaaattggccgaaatttgatacatgaaaaggacaatatgagcacaaactgaccataaacttaaaaaacaaaagtatattcaaagttgctattggtacatctttaccacaaaaataaaattatgcaccaaaacatttcacacactcaattatccgatatatttcgtctacaattagattgtgtggatttctttttattattatttgtttatttatttgatgcaagatttgcatggcctgcttttccttagtagtgttcccaagtaacaggaaagtagtgtagacaagttcaatatcacacaatccatgtttttaactgaaaaatcacattatctacccattgcctattatttctctagaaacttgaagtgaagaacttgtcaagtgtgactatgactcaaaaagttccggaacatcctagatgacccaactgctactaattacaacatttaataatccacacaatttcaatacaaatacgctttcatcatctcaatgcattgaatactctaaagcaagtgaactgaatgctactaataaaaatgtggggcagagagaaaaagagagttatggatcagagtgtgtgtgaagcttaacttcagttgttaatgtcaacaaaatgataaaattattattattgttgttgttgttattaacactgaatatcccatcatgcataaggataaaactcacacatcatcatcatctagcaatagcaagtgctctgttggaaggctcactatcttcagctatttcttcttcaggctcccctacccaacccaagttcacatgtaagtcttccacagccactttgatcacatcagttcttacaccaatatcagttgcatatctgctcatgcagtacattccagcagttactgtcgccacgccaactgggctcggcatcaaaagcttcagcggggaagatagaatggcagccagtggagcaccaatgattgaagaagcttggccacttctaccaacacctaacttgtccattattagaagaccagttttgcagtagagggcgaaatcttcgcagttgttctgaaacacatcgtaattgccaaatccattttgaagaaggtacattgctcggtggatggttgtttctggtggatcagatgctgctgtggtgcaagttccaccccggactttggcaaggaaaactgatggggtaaccccatattcaaagcagtatacagatccatttctgaggaagcagtccaggcaagaaaggattacaccactgttgggttgtctgaagccacaatcaggaaaggttggacaggacatggagtcataggggtcagttgatgcttcacttgaattcatgtttcgttctggtctaaaatggaccactttgcttcccccaacaaagatacctggatcatattacaatcatgataactagttattatgcttgatcatcaatataagtaattgagaaaaaagaaaagaaaagccactcagtttttcccttcaatttagaaggcatatagtttattttgttactaaatcctacattgacaataatctccatattcaaataattacattgaaccagtaaaagtagtacatgtagaaaaagttatgtcccagtttcacaaggcacaagctataaagcatcaaatctggctcctgggtcttatttatgacctacatctccaaaatcacacaaacatctattgcatgaaacatcttttatggtgactccacaacgtggttttccgagcatcaacagaaaacattttgcaagcatccatagtataatgttgcacagaacaatccaagcaattatatctgtcttagtatacataaaaatgttaacatttgttgcaattgtgtttttcatttgtaaatccagcttgactataaagggatcttatgaaagaatcatttgggattagtttgaattcgtttatacaaacctcagttgactaggagtccatattctacgaaattgttctgaacccaaaaatccaaaagcctaaacttgcaagcaaagtttaacaggcaaaacgcaaaaccaaaaacacaaaaatagacaattgagaagtaggaattgacacaaaccaaaaataaaggtgggtcccgaaaaaaggatcatttttgggtacatgcagaataagctcagactttcatacaaggaaatcatgataaaaagaaaaaaaaaatgtaaatgtaaactactaaaatcaggaaaaccaacaaaaaagaaaggaaacccagcagaagcagaaccctcattgtgcagttctttcgaaagattaccaacaaaacaaaaaaaaaaaaaa

SEQ ID NO: 189383 - DNA, 3198 bp, Cannabis indica
aaaaaataaaaataaccctaaaagggcgtgcgtgttctctcttactctcttccctggcgaagaagcgaagagcgatccgaaagccaattaccagagaattgagtgtagaatctggagcaaggagtgaggaggaggctaatcaggaagaggctcgatattcttaggatgctgaagtggttacagatgcaattgtggaagaaagtgagaactaaaatggaaatagcagagtctgatctaggtgatgagaaggagaatgtcgaagagcagacctgggctgacattgtgggaaatgaagatcaccagactctttctcagagtcattggagaaagttttctgcaattaagctacagtgaggagcctttgatcaaggaaggcattaaaattgcccaaattgatgcagaggaggtgaaaacgcaggtagctaattggagttctgctgtcatttgtatggtgttgggagcaaatcctctgtttgctgtttttgaaggctttatacaaaggatgtggggaaaactagagattgctcagatcgtgcgtatgaatggagggttcaccatagtcaagttcaatgatgacgccactagagatcatgtgctggaacacagagtaattccattcgatcgaaaatcggtaattactagaccttggactactgatttagatgctgtgaaacttgttaaatctgtgacattatggattcatttacatgatttggggctgcaatattgggggaaaaattgtttgagtgctttagttagtactattgggaacccgattatggtagacaaagttacgaaggaaaggtgcatggtcaaatttgcccatgttttggtggaaatggatataacagaaacacctctgagagttatccattacatcaatgagaaagggagatcagtggagcagggggttgattatgaatggttgctagtgaagtgtaagagctgtggggggttttgggcatatcatggctgagtgtaggaagggtgaggctaaacaatgggttaaaaaagaagtgaaaagaggtggttcgagacaggagaagacatgggatattgttgatcagacaaagacaaaaggggctaaagttatgggagctgatgaaaaggataaggaagaggttagaatggggaatgaatttaggatacaaggtggtgataccttagggaattctggggttcaagtacttgtgaggcagcgggtaattctaaacagggggttaagccgactggtttaattgctacaacaagggcggacggtttagtaaggaattgggaaacccctaagagagctcatttgctcaagtctaagttgacagttagggagcaggggacttatcataaagaaaagaatacttttgagatgttgcaaaataaggagagtggggcacagggggactgtgctttttttttttcatcatcatgaattgttgtaataatttgtgttggaatgttagaggccttaataaagagaaaaagcaagaggttgtgattaacatttgtcatataaagaagattggagttggagctttggtggaactaaattgaaaggaaagaaggtgaaggatttgatgtcaaaaaattttgttggttgggatagctatactagcccaaatattgagggtagattgttgttaatttggaagcaaacttttctagggtgattggaagagaatagccaatatgtccattactatgtgaaacttgctagtcatactaaggctttttgtgtgacttttgtatatgggatgaatggcattgaagaccggaagatgttttggaagggcctagctaatcttaggttcccagttaagccttggattctcctaggtgattttagctccctaattaattatggagacagagtagggggtacaccggtctcaagggctgaggttgaggattttaacaattggctaagtttgggtctggtggactctttgaagaggcagggatcctatttcatttggtctaacaatcaaggaagtcaggacagaatctaatctagaatagaccatgcttttaaaaacgaggattggttggacttattttcgaattcggctgcttcctttagttgggaagaggtttcagaacattgtgcaatagtcatatcgtcgactgttatggtggagataggggtgaagtcgttcaaattttttaattactggtctgagcatagagactttaaaaacctggttttggaaagttggcataaatcggttcgttctactagtttattggggatctggttcaaattgtcttggctgaagcatgtattgaaggcttttaatcatacaaggatgggcaatgtggagatgggctatcagagagctaaagaaaggttccttgaagctagattgcaagctcaaaataaccctagagttgagatgtttcttttaagaaaaaatagctgcagagagttatcttcaccatgaaagaatgctaaaaagtttcctgtccaaaggagtaagataacgtggctaaatcaaggagatggtaacacaactttctatgcttttatcaagaaaagaagggaggaaaataggatagctagctatgttaataatcatggaacaatagttgataattaccccgatgtggtgaagcattatattgaccatttcaagagctacatgggtagttgcagctccgttaatagacgtcttgacagtgactgtttggagaatggaaaccggttgaatttaaaccagcagctgaggctaattcaccctttcactaataaggagattaaggaagctttgtttagtatccctaggtcgaagagtccaggtcctgatggctataactctgaattcttcaaggttatgtggactgatgttggagctgaagtgtgctgtgcgattaaagagttttttagtatgggtaagatccttgcccaatttaatgaaactgtcatttcccttattcctaaggtggagaatcccatgagagcaatagattatagaccaatagcttcatgctctactttgtacaagtgcatcacaaagcttatgagcaaaagactctctgaagttctcctgtggttggttcaccaaaaccaggggcttttataaagaagagatcaattgctcataatattttgattttccaagacctgataaagaattatggaagaaagattgtctctcccaggtgtgctatcaaaatagaccttagaattatggaagaaagattgtc

SEQ ID NO: 189384 - DNA, 2917 bp, Cannabis indica
acacatgtttgcaagttacacaagtggttgtacaggttaaagcaagtgcctcgtgcttggttcgacaagctaaaagaaacattgatcagatggaactttcagaactcaaaggctgacacttccttgtttttctacaagaaaggccagtcaataatcatagtgctaatctacgtagatgatattattctcacgggaaataatgcagagaaacttaatcacttcataaatgaactgaacaagaactttgctctcaaagatctcgggtccctacattacttcctcggtatagaagcacacagggacaacacgagcttgtaactaactcagagcaaatacatctcagagttgctggaaaaatatgagatgcagaatgtgaagacctatcctactccaatggtctcgggaaaaccattgtctaagtcagatggtaagcctctgaccgacgcaacagtctatagaagcttgataggagccctgcaatatctctgtcacacaacaacggacattacctttgtcgttaacaaactcagccagtttttgcaatctcctacaaccagccattggagtggtgtcaaacgggttctgcggtacttgaaagggactatgtaccatggtttacacatcagttacagtgaaaggttggccttggtaggatactctgatgcggattgggcttgttgtcccgatgatagaaggtctattgctggatattatgtatactttggagatacacttgtgtcatggtcgtcgaaaaaacaagttgttgtgtcacgctctagcatagagtctaaatatagagctctggcccatgttgcctctgagataacttggattgaaacacttctcaaggagttacaatttacttcttctcacaaaccaatcacatggtgtgacaacttgagagccatctctctagcaaccaatcttgtctaccatgcccgtactaaacacatcaaaattgatgctcattttgtctgagataaagtgttgaagcaagaattggagatcagatatgtgccatcctctgaccagatcgcagattgcctcaccaagggactgtcacacagtcagtttcggtttcttgttgacaaactcagagtgagaccctcaccccatcgtttgaggggaggtgttaagacaattacaagtagcagcccctaaggtgcatctctgtatggtgtactgctttgctgtcaatgaatgttataatgattgtgtgtacgaattcttttattttgggatattccctctcctttctattgtgccacttggcatcttgtaattggtctccattgtttcattctctctgtaaatgaattcctttggctcaaaatcaattgagctgagttttacaatttcctttcttctaaaatcattctggtactagacactgctggtaccttttaacatttctcttgtatctatcacacatttttaactctaagggattatggtctaataggaccaattagtttaattaatggtagactataatttagtagaccaattaagtatagttataagggtactttcatgtgcctttaatacatttagtgactattaaccatcccataatgattattgaataacattagacacatagttaatgattgtggttatgaaattatatttatgattatattagtccataatagtaattctaatattctctcacctgaacaagataatcaactatcataacaatatccaactcataaaacaatcagctataacactaacaatatcatatccataggatagtcatatatactcatattacatatgacttgactttgaaaatgtttaatacaataataaccattataaccactactacaaatatcagaattcatgacactactcctaacaatgattttttacgaggaccgtcgctaaaacaattaagtaactatttgaaaccgtcaggaaaaatttagtattctcgacggtttaaaatcgtagtaaacaattcatagtattcccacatgcctatctacttttttctatttcccacatgcccacctatttcttctccaattcccacaccctaaaacgaaaaatcttaattctccaaaaccccacacacacctctgcactatcgccctcctctctcgccgtcttcctccctccctcgatctccctttcttctcgtctctctcgtccatcaatctccacccacccttcctcccatcggtctccctctactctccgtcgcatacttcagaccaccaccacctcccgtcggtgtccctctcatctccgtctcatacgtcggaccaccacgacctcctgtccgtctccctctctctctttctctctctccaatttcgacataaatacatttatttatttatatacttatttatttattatatatatttattttgttattgtataaatttaacgtattttaaagttagttgttattgtagcaaaatttattagttgttttattttaatttaggtagaatgataaagctaatgcaggaaaaaatgggagaaaaatctgtattttttctcttttttttacattcctgatggtttaaaatcgtcgcctataccctgttataggcgacagttttaaaccatcgggaagtctaaattagcgacggtttttaacagttgcctattttgcccattttacgacggtcgtataggtgactgttatagaaaccgacgagaatactttaaacgactgtttaaaaacgtcaagaaaaaccatttttgtagtagtgaacaatcaaactaaaacatgcatgaaatataataaaattgagactatgtgcattcatctcttttagtacctgtcactttagtaaacaacctgtatatataaatattgtgagggtttacgccataaaaataagtatttaatggaaaatatataaaaaaaaatatgaaatataaatataagata

SEQ ID NO: 189385 - DNA, 2070 bp, Cannabis indica
tgttggatttaagaattttcgtcaatgggcccatgacgtgggtgaaagttcgataaacataatttaatacatgtaaaagactaacggaaatagggaaaaattctaattagccttaattaattgagtgttacctgtttggcctgaagaacccaataagggcttgcaaccagattattccatacaatgctactcctattctttggtgattattgttgaatgtgttgttgaagtttttgaaggataaaactgctcctgctgttgcaataagtacagcaagagtctgtacagccaaaaaaaagggacaaatttaattaattaagtgataaataaatgaatgaaaaaacacttcttaaatcattatggaaagaaaaaaagaaaaaaaaagttaattatttgtgactcaatttatatattgacacacctaacatcataattgtgtaacaataagatcagagattggctttgataatttaatgaaattagaaatactaaacagtactactgtgttttcttgatctctaaggttcattataatctcccttagatacttttgtttattttttatattttttagttatccaacaaattaatcagtgggctacataaaatattaatatttgctttaatttctctttcatgatcatcattaaaagttgagttgtggggtatatatcttcaataaacaaagtctcaaagcataaatggtatcttttgaaaaactgtagagatattgtttgtaaagtaatttaatcaaaaacaaaataaaattattaaaaatgggtttaaaaaacacaattgggttagttaatctagactgtataaattataataacatggtaatttttttactatgttcttataaataatttaataaataaagattaatgtaaaaagtcttacctgtgaaataagatgaatctggaaaagaattctaagccttcttccacattcttctctgtttgacattcttatagtgaggatcccaataggcatcaaaaatcccattgaagcccaaagaagaaatccatgaattgtaatattaagcaatagtttatgatccatctgtaattaataatgatatatacatatatggggtgttagtgttacatatttaccaagatcaaaattaaatgagaaaattgaaaacataccttaatgatgttgtctttgtcgatcataatagtatctactcttttcacattaatttcttgagatgaacagagaagaggtagaataagaagaagaagaaaaagaagactcttttgaatacataaaaatcccatctttaaaaccagaagagaaaagagggcataaagtgaaagaaccttcttgtgtgttgatatatgataatataaagctgtgaactttgatcagctcagctacaaagagaagtgaaaaatagtgcttcacagcattgtactacttgggttttgtgaagcaaaattgtagtagtgtgcccacttgattatatattgttttcttcctaatttttctttctctttctcaggaaaatgtcagagttgtgtcatctttatgcctcagtaaaatgaaactttgctgacccatttaaccattcttgccatacaaatctaataataagatcaaatatgtgtcaaaagaaaaaagatggctcacacttgagctctcaaatattcaaagtttggtttttttttataaagaaagagagagagaaatctttttaaagatggaaaggtatgtgtttgtgtgtgtgtatatatataaattgcatggatattattgttgatgcattaggtggtgagaagaaaaaaatacatacttgagtaaataaagaaagtggaaaaaaataagagaagtggggaatgggaatggattgagatttcaacttctttgtggggtatttcttcaactttgacagccttttttttaattttattttaaaaaaaaaaagatggaaaaattggtggtatatgggaaaaagaaagtgggaattttttttttgggagcaaatggaatgtctggttttcaaagttgtatgaaattgttagtatatgtatgtacctatatatataaaaagtggattgttttttt

SEQ ID NO: 189386 - DNA, 3216 bp, Cannabis indica
aaaaaaaatctactttctcaaagttatattataatacaaattaaattaaatttattacacagaggaagatcgtttcatttactccctgcataaaaaacagataaagaaaaagtgtttcaagtgtcagatttaagaataataagaagaagaagatgaaattgaattggagtagtctgttaatttccccattattccttctcattctcattgtttcagtctcactcgattttaacaatactcgcttaatctcatcaacagaacctcaactcggttagtataaatactgttttcctttgctttctccctcgtttcacatcaaaaatggctcccacgttcatggcggtggtggtcgctggctccatctcggctttgtttctccgattcgattctcactctaattctcacactttcaaactttattctctccttctcaactccttgccttcaacgcactcttattcttcttctttactgttttgattccgactccctttatgttagctcgcagcagcgtgatctcgacgtcctttcgatttatttttgcagatctgtagcttccgagctagttgacggcgtcggtgatgccttcgttcgcaggtactttcgattctggtcattcttggtttgcttttggaatacttgctatattcgttaggtgttgattttaatgttcagttccgtttcaatttcgataaaatgtgaggaaatggaaagaaaatgatattgtgagataacccacggtttgttgttacaaaggaaccgagtacaacgaaatggaagaggaatttgactaggggttaatatatttatgtatcatggaagttggttctattaccgttttgttcgcaaatattttgacttgaccaaaaatttaggacaaattagagctttaattgataatttgactagaatttggacttgcttgagctagggttattaaatttatagtggattgatttcatctttactatttatagaatggttttctagcagtagtttcctttttgatgatatagtgcagtagggaaaggaacaaaatggaaattaactttctatattagtttccttggagatttgagatcgctagagctttcatttctttcagaaatttatacttacattactagatagagaaattgcgagaaatgttactgttagtagcttcattttgaatgatttgggatgcataatttagggatgttgaaagagtcccaatggttgagaaggaaactgctccttttttggttcttgatgtcaatcaccgaagcttatgcacccgataatctactgataacaagttcgggatctccggttggtacccctgaggtggcacctgctatgcctaatcttccccttccagccaatataccagagtctaatgggccatggcgaaagcatttcttgcagcttggttcacctattcatttatcaccatctcatcctcctttgacttcacatttctcaaaacctttgatgaagaggaaagagttggcaccttccttcgtcggcttcaaaaacattgctccaacacaatctgacgttggtgtgttgccttctggtttagctcagccaccactgtctccttctgtctccagtaagttagaacatgtatagttgcttttaaattttaattttattcaatatttagatgttaatattttttttttcttctgtcgtatatgacacatttatcataatgcttcacattcattttgcccttttttgcaatttctttaaattgaatttccatcacatacctgcgttgtcatattttaaactcatcaactctggtgtctttcttttcatctaaatccttgctatgattatatttatgcatgtttacatttcgtttgttcagattgctgcaaaccagatatggtgatgctacgggggagtaaagaatgccactgtgtttatcctataaaaattgaccttctccttctcaatgtctcacaaaatcctaattggactctattcttagacagtttggctttggaacttggtttgaaagtttctcaaattgagttgataaacttttacgtacttagcttgtcaagattaaatatttcaatggatattactccaagcacgggaatcagtttttcttttaccgaagcatctgctataaactcttctcttgccatgcatagagttcatttgaaccctaagttagtgggtgattacaaacttctcaacattacctggtttcaggctccacctccttctcaaggtatgtaataacttggacatgccaataaaaaagctttgaagaatttgatatgcttattagagttatttaattaagagattgatgtacattcaaaaggtgaagaattttttaatgttttgaagtttattttaggctggaattttactgttgattaaacttgacattgagagtaccttttatctatcccatagctttagtaaagaacaactacataagctatgccgactttactgtttctatagaaagaaaaatgctatctagaccaaaacatgctagtttatttaaatatttgagcatggtggaaaatcatacgaaatgatcggaagtgattgaaaacataggggcattttcttattcagtcctcaaatcctagtgaaacattatgataagcatagttttcaaaacttggagcacaaaaagtttctcgtaagaaattagtactgtgtaagtttttcatgagatgggaccatacatattagcgctgattaaaggctgcatgtatcattttgtttaaggatatacatgatgtcaatcttattaataatgcagtataatctgttgagttgttttttattataccaactaccaagaagctatctagccacatttgagatgctttatattattattattattattattattattattattattattattattattattaaatcttagcatccaaacaaataaacctaagttttttttaatttttcttatagcctatagcataagctatatgatatctcataagtagaactgcatcttgctggtatgattgagctttatttttctatgccatcatggtttataaatatattacttttaaacctaatcaaaacaaactctggtgtagttatgctgcatttaatttacttctccttgcagccagcagttgtccaaaccaatcgattttatgaacattgatatggcttttgtgtttgttacacagctcctcacattgctacagcacctgtaaaacc

SEQ ID NO: 189387 - DNA, 1623 bp, Cannabis indica
ccccaaacaacattgttgggttcaactttcatacttcttattatatctagtgcttcttcaagcagtccagctttgctaagtagatcaaccatgcacccatagtgttcaactgctggagtgatagaataatcctttgccatgcttgaaaacctcagacggccttcgtcaacaagcccggcatgagtgcaagcgcttagaagactgataaaggtaacaccattcggtttgatattctcctcttccatctttctaaacattgttagagtttcttttgcaaatccatgactggcaagtccttcaattatcgagttccaacagaagaggtttttgttgtgcaatttgaagaaaaccagcaaagacttatctaagtccccacactttgcatacatatcaatcaatgcagatcctaaataaacatcaagttcaaatccattttgcatgacataaagatgtatctcctttcccaattggagagccccaatatgagcacaagaggaaataatagttgccatggtcactccatcaggtctaacaccatgtttcatcatttctttgaacactgccagagcttctctatatttcttgttctgcatatagcaagtaatcaaggttgtccatgaaattaaatcccttaaagacatctgattgaacatcaattctgcagacaacacatcccctaatctagcatatccatctatcatgatattccaagtggccatattgctttcaggtattgtttcaaacagtttccgtgcagaaatcatatcaccagcccgagcgtgcgctgaaatcatggtagtccatgcataagaatctctttcaagcatttcatcaaacacccttctggcttctttgatcttacataaatttgaataaaaatcaatcatggcagtttgaacaaacacatgtgagtcaaacccatttctccaaatatgtgcatgaacagcttccccaaaccccagtgcaaataacaaggtgcaagctctaatgagtgatgaaaatgtatagctagtgggaaaaaccttagctcccaacatattaatataaaactgcaaagctctattgggatatccacaacgcacaaagcctttaatcatggaattatagacgaagacattagcattaggggattccatatggtgaaaggctaaaacagcataatctatacgagagaaggtggaagatgctgcagttataaattgattagtcaagaaagcatcttgacttgttccagtcttcaccatgtaagcatagacatgttctagctcaaccaacctcgaacatttcttgatctgttcagcaagggatccatgattttgattttgattttgagacaaagaaaaagaataggattgctgaagcagaagaggtttccgattaaaaagttggttcaaactcaaacagcttcttcttctcatcttttaacactcattttgctgttgctgttgtctttgttgtttggctcttgtacggacaccaagagagcactgaggagagagagatgcctccatttctttccccaaaaaaggagaaagtcaaaaagatatgattgtttttgataattactatcaaataagagaagcatttacaatctaattttatgaaattccatgcacaatcaaa

SEQ ID NO: 189388 - DNA, 2188 bp, Cannabis indica
gattttagaatatattgattataatagatatttataataataaaaaaatcatgattacacgtatgttagtttttttttcaatttaaatttttattttttaattaattaattacataatactataaacttaataatatataataaagttttttaaaaaaaaaaagatatacaatttaaaaaaaaaataataactacaggtgtgtattttttttcaattcaaatttttattttttaattaattaataacatattattataaatttaataatatatatttatatatattagaagttttttttttaaaaaaaaaaaaacatcctttttaaactaaaaaaaccaaacgtgacaattgatttaaatttagtaattaatatttataaaattaataaaaaattaaaaaatgagagaatcaaggagagaagagatagtgccatttgaagtgattttgtaccgccacatcactgcctcatacttctcctttatatatatatgtatatatatatatagatttatgttaaatttgaagaaaaaaaacgagtttatactctaatttactatttaaaattgtattctaatatataaaatataaaataaataataaataattatattaatagtaatctaatattttattgaaaaaaaatttcacattcctctctcaccctcctctagccacaaatttagaaaactgaagccgtttgtgactccgatcgagtggcttatttagctttacgattgagttttatcgcccttaaaataataaaaatgtagaatttaaaacacaaaggatataaaattttcttttcattgtctatgtcttatatttaatttaagaataaattatttgtcttgacttttgtcatagttggttagtctatatgttttcagtttttctagttatagtttggttttgagattcatggcgtcatctagtaatcccaacaaccctctctacgatattgtcctagatgacgagattgaaggaggcctcgcgttgcaagaactgggcgcaggtagaaaagaggagtttgtattcaattggaggttgtgcttggttggaagatttatcacggcaagagtagttgatttctcgtcgatgcgacagacactggcagcattatggaaacctggtaagggagtgtatataaaagaactggatgctaaccgcttcctctttcagttcttttacgaaatcgacattaaggggggtgtttgaaggcagtctgtggtactttaacaggaaggcgttgattatctcctgtatgaaagaaggttctaacccctggttcattgctatgaacacattgggtttatgggttcggatgcatgaccttcaaacagggttcatgacatccacagttctcaaggttgtgggagattatataagtgtgtttgtcgaatcttgtccttataaatttatgagaatatggagggattacatgagagttatagtcaccgttgatctgtctaaaccattgaaacgacacatgcaactccgtaagataggagaagagtggatatggatcactttcaagtatgagaatgtccctaccttttatttcatctatggactgttagaacactcggagagatactgtgagaagttattcgacactcctatgaatgaaattcgaaaactgtgttgtgaatggatgagagcccgcttcgacgtcgacaaagcttcttggagctcaatggatgaggtctgggcttaagggtggtggagctaattttgctggcggccaggcgacactggttggtggctccaatcaacattcagtgctcctaattttcaagacactaatgttatgtgcatggatcgtgagaagcaattaatgaaatatatgggaattgattatggtattggtcaacttaaccattcattgtaacacgtggtgaatgagttggcaaataacaactgatttctaaaaaaggtactctcaatgtggaatctaaaaaaaaaaggactaattatgacttgggccaaaatgaagctatgtgtgtagaaacaaaattgggccttgagtcaaaatgaagctatgtgtgtaaaaatcgaattgggacttgacccaattttatttttctttgtgagatactatgtcaaaaataaaaagttgatataattaaaaatgctattggatttgagggcatgtttcagtaggatctcaaggacatagtggtggacttg

SEQ ID NO: 189389 - DNA, 1275 bp, Cannabis indica
agttaaatattatcatgctacctacacagcataaaaatgtaaatactttcgatttgacataggaaagaaaatatgagaaggtaaattgaaattgtggctcataaacttatagatgaaagttcaattgacagacatatgatatgaccaagtgttgtaagaaacttatgctgcatgaacatactacaacaggtttcatgcaaaagattatctaagttagaatccaaccttcgcctcaaagtcattatcaagaaggatattagctgctttgatgtccctgtgaattatcttaggttgacctgaagatacatttagctcaaaactgaattcaaaggccaatacttatatccaaaaaatgctccaatgtataattggaacgaaaaagaaaacttacagtcttcatgcagatatgccatccctcttgcagagcctatagctattttcattctagttggccaactcattgttggtctcccttttcctgaaataatagtttgctctcataaaaatactcaagaagacattaacctcccattctcaatctagaatatagaagcttatatatcacatatatagtgccattgtgtaataactacgttatgaaagttgaaaatctacacaattgaaacactgtctatcccatccacatcaacaattataagggtttaccatgcaagtgaaattccaatgtgccgtttggaacaaactcgtagacaagcattctctgaatccctgtgctacagtatccaaccaacgaaacgaggtgtctatgatggacacgaccaataaactcaacctcggccttaaattcacgctccccctgcccactcccagctttcagctgcttaactgcaacaacttttccactaggaaggacacctttatgaacataaccaaatccaccttccccaagaagattagcaggggagaaatcgtctgttgctttggctaattcctcatgagtaaatgtaccttgtgaaagttccgagcccttaacaggaattagtatatggggcggtttctcagagcctgagctactgcttgctgaagctgctggataatttaaaacaacccctgcaggaggggtgggcttgggaaacattactaatttattgttatcaggtgtattaccctgttgcagctgctgacctgggtcacctggaggaggtccatctggaaggattataggaagaaattgaattagagacataaaccttgatttattagcaccttcatattaaatatacacacagagaagataccaagaaccttctaaga

SEQ ID NO: 189390 - DNA, 1075 bp, Cannabis indica
tttcagtatgttgtgtaaataatatgtgttgggtgaggcctttgctcttgaaactgcaactcacttgtgtgttgtgttgggtcatcttccaatgtaacaatatatccaggttgtgggagggttcaacttctctgatatgaaccacatcaacattaatctatcagagcttgtagttttggtatgtgtacttagttcttgagactctttcttggttgtgtctgtgtttggattgttgcttaaaaatataagaatggtggcttctgctcgacaatgtttccttctatatttttgtgtgctatctcttctttgattcgttagcttctagtaaattaaatgaaaataaaaagtttacccatccttgcaattatacatgttgcttgcattgttgatgactttaaataactttaaaagggcaactcattttggtgttcactgtttaggtaaccttgttaacaatccttaaccaattaagatttttttggtgctcaatttaatattcgccacatcatcaccaagtaagtattattagtgtttagcaccctactcagtgtaatataaatattagtataattaactatttggtctcatataatttaaaaaaatagcttttaaaaaatattgctaactaatcgtaagacacaacctataaaaagtattgggcactactggcccaatagcaatgctcgaaaaataaaatctgatgtgcctaaattggtgtgttctctttgttctactaattattttagcacacattatttatacttatttaacatataataaatttgttaacaaactctaaactaaattaatacatataaaataagtatagatgaaacaattagtaaaaacagaaaagacaaaataatttaaggatagcaaattctttttacttaaagaagcctttggacaacctcattggaattggccttagagtatctaaattgcggatgcccgcattgtcaaaaattcaattactactttggagagtagcttatacattgaagaagaatcatgaggcaatttcttaccaggccgaacggtagtatttgttcttttttttcttataaaaaagtta

SEQ ID NO: 189391 - DNA, 1281 bp, Cannabis indica
tcggcctttcccggccatgattcatcggagcaatatcccggagacagcagcttcgacgcaaatgtcgtcatggtcctctcagttctcctctgcgcattaatctgttcactcggactaaactccataattcgctgcgcattaaggtgctccagcttcgtggcctcgtccgattctagatcgagtcctgtttcggctcaattggccaccaacaccggagttaagaaaaaggccttgaagactttcccaaccgtgagctactcttcggatctgaatctcccaggacttgatactgagtgtgccatctgcttatcggacttcgccactggcgagcgtgttcgtcttctacctaaatgcaaccatggatttcacatcaaatgcatcgataaatggctcaattctcactcttcttgccctaaatgtcgacacaatcttctcgagacttgccagaagatagtaggcgtcgttgaaaacccacaagcaaacccttcggaatcgcttccgtcaccgccaccggcggttcaagaagtagtcattagggtttcgccgctagaacccgaaggtcccgttcgtagttactgagttcaaagaaagtaactaaaaaactggaaattctttaagttggtctgttgttcggacaaatttgcccctgagctagctagctttatccttacgtggatgaaaaaacaaaacaaaaaattgtagttcttagttgtgtaaattgtatataattattattctccaaaaatagaatgtgacagcttaattaattgttctttttttgttttaatcgaatattaattttaaaatgagcactagtgtagcaatctgatgaaaaaatctgggttgtgctgtgtatgggttttagtttattatattccacacaaatttattattttttaattggacatggaattctagttgaatgttgttttcttgaaattgtaatattatataatataatggtggtcgactatcataataaataattaattaatgaagaagccagagtggctataatataatgctcataatgttagtaggaaaaccgctgaaaaaaattatagaccaagtattttttaggagagccaattagctaattagtcaaccgacctcttttattacttaatttattttttcaattgcaatttctatggacagttttcatgagtagtgggaaacacttaaaagttcattattaaggcactacaattatgcatatcgtcgaattaaatcaaagcttagttactcattctcattttgattggttattgaatacatgtt

SEQ ID NO: 189392 - DNA, 3283 bp, Cannabis indica
aatctttatatttttaaatatcatgaatgaataaaaatctgttgtctcctttttttttttatcttaactctgtcccaaccaattaataattgacacattattttttttgaatgcataattgacacatcatttaatttaatgagatcatgtttaactaagtttacttctctgttaatactaagtattgtcttttcatcttcttcttgttttttttaatttttttttttcttgtttttatttattttataaagaaaacagagtacacataatatttaaatctttctaccttcatactttatttttttttaaaaaatttagaagaaataatgatcaatgattggtacaaaaacaatggaataggaagaataaataaaattggaagagggaagtggagatggagattgtgtaatgttttctttataaaataaagaaaaacaaacaagagtgataaatgtgaacgaaagtgcaacttcttattactatttgtggtcaaatatataaaacaaaaatttatttggagattttgtgttaataatttttctaaaaatgtgaattctttcttaatttagacaatgttagggaatttggaatcaatatggaaaattggaaactactttttgtacctcagaagattaaaagggtcaaacaagaaaataatgagcatgttataaaaacttaaattaaagaaagtaaaaattacacacaatggtaaaatgttaatggtttataaatttatgacatatttttttaatttatttagattatgaacttttaactatatttatttttttgtggttttatttctgtcacatttttataatatattttaacattcttatattttggactataaacccaaaattatattgccttcaaccatctgtctcatcgccggttagcacctaccatcatctgactgtcgaccaagctctgtcccaatctcgtttcctttgacatacactcagagccaatcttaagggtaggcgagctaggcgtgtgtctcgattctccgaacgcttagagtctcaaaattgtgaagaaaaaaaaataatatataaataaaatatttaataaaaagaaaatataacaaaaattatttggtgtagtgataaattgtcttactctaaataagagattaaaggatcaattacaacctttacttttctgtttttttttttaaatatttaatgtatagttacgaagaattacattaaaacagtataattatcattacactaacccattagaattatcattttgataatagttaaattataataaaggccgaaaaatttgattttgccttagatcctttaacgatattttgatcactttgctaggaaatccatcagagctctgtcattcactgtgggagaagatgatgaagatcaacgtcaactctagctcgaaaagtagaggtcgataatcggattcctcttcactgctactatcgaatcactgagttcgcttttggatttcacttcttcctattcgttttcttttcagttcttttcatgtctgtatttgcaatttggttttcgttgctggattcttatagtactgttttttattagaacaattatgtctttttataatcaagatactatatacggaatccttgtcttcaattttttcttttttttttatgctttagaaaaataatagtacttgtgtgaaaaattcctatcattagtgtggaaattgttcagtctagtttatttttcttttatctttgcagatataattgatagtctgtataaaaagatatatcctgagagccacattctggacaacgaagaagaaaaaaagtggagcaggtatgatggctctgttgcatcatttaaacactgaaaatgcaatatttgttgtggtataggtgggtagataaccggttatgttttagagttttaagaactgattttctctttgttttttaattataaccggtttttgagttattatgtgttatttgtttttacttattttgttgtgaaactaattttattttaatttatgttagaaatatctaacttcggtgacaaatgaaacgacaataacttttccaacgatgatgacaactccagtaacttttttgatagtttttttggcgtaggattcggtgaattttctggagcctgcgtctgttcaacgagttttctaacaatatttgttattaaaaattttatcaactttatttatgatattttctttggtttctcatattttaaactttatttactttttaactccgtacatttttgtattatttattttatgtcatataaaaatatacttaaattttttatcttatatttatgaaaaattcccttaatggaattaagattgcgtttggttggagtaattaatagaatggaaagaagaaaaatttcattctatttattaagttgtattttaaaaatatggaaatatcatttcaataaaaatgattatttattttgaagtaaaagaaaaaattattaagaaaaaaaagtactttaagagagcaaaggaataatcaataagtaataatatttattagggttaataatatggtttaacatcaggtgagttgatcgagttttgggttcgcaggttttgagttcaaaaaattatacccaaactcaacccatgaaataatttcgggttcgctggtttcgggctcacacgtccatggcttcgggttggctggattaacgaattgacccgatcaactcgttaattttttttcttgtttttttttaaaaaaaactcaaattttatgtaattttttctgtacattaaattaagcatataaatttgcataatatttagttttataattttatgcacaataatattattttctaaacaaaaaagatacataaaaatcaatattattcaatgataaagcttgtgataaattgacattaatatgtggttgttttgtttgtcattgtatatgttttctttatatgtattgaccaaaaaatcaagcaactgttttggtcttaaattgaatgatagaatgttagagataatggttgaattgagttgtttttcaatcttagttataaaagttatataatgataattagagtttgttaaaattattatatatctctttctattttcttttttagaaattgtgttcagtatttaatacactttcatacaagattttaattcaactataagtcatatatcatgaatagtcataaatcgcttgtcctcttcattttctctattttaaacataatgtgatccttattacatgcggtttatttcaattttatcaagtgatttc

SEQ ID NO: 189393 - DNA, 5478 bp, Cannabis indica
gggttgactccataaacaacaataaagttatgcaattaaaggcttcaaccaaaggagctctaacccaatcattttcaagttctttaacaaactccttccaaaattactccacactctgcttctcaccctaaaaccatggatattcctgcactttttcgtttggaaccagaaatttcttaatagtttctagtcatagtgcacccagatactttatcatgttacaaccggcaaaagaactctgaatacagttagcaattcaaggcgacacacttgccaagttagctattaactactgatccaatctttcactgatgctgaaagtcatgtctatcaactatgacaagttccctcatgataattacacaaaaggcaaataattcttgataaacgatgcaattcacattcaatattgaagcactggtccataattaactatgatagaagccaattcaattgaacttgcaataatttgcacaagattcttttatgcaattttcaccattagttcagtaagaacacatagaacaaaaggagaataaagtagatttgaactttatggaactgagttgtatgtttccaaagaatagagtcaaaccttgtctagactggcaagagataagaagttaccttcgtggtaactaaagtgttttctcttagcaacattaactaattctatgactgatattaactctgtatttttctgactcactaatatctgcgatgaatctaggttactgtagctttagaatattacaaaattttaaacaaccatgttttccaaattagagaaatgttacgccaatcaatcaatagttttggaaaacttagttcttttaggattagttgcttcagtgacagagtcaatagttctacatctacttggcttaggctcaactacatgttgatgattgatgaaaccaaatttctcagcatcttggcgatataacaagtggacaccacaccttttcacattgcccttgcaggactttacatgatcttgttcccaataatcaaacttcccaaaatagaagtcaaatgatgcctccatggcattaagacagtgattgtaatccttatgctgataccacatgaaaaggtgatccgaactgaaacttggtactgcctcaaatccagactcaaattcattgaagttccaaagaaatttttggttttcgtcatcactggttttcaaacggagttcacaaagaaagtccatattttttatgtcaggataagagtcctccgcaacaacggcacatactacaaagcccacgaagtcagacgtatcacattctagagaaagcctcatactaaatgaaggcccctcgaactgatagttgaaccagtttggaatttcacttcctggacaacacatgttaactgcagagtcccaatcctagtgtgcaaaaacagagaaaagtattatgcattttttttccaagtttaagagaataaatataggcaatattacttttaaagtggataacaaaaaagacatacctcaacttcttcctgaggttcgaatcctatagccatgcgtaaaactctaagctggaattcggctacaatattctcatgtgcattctgatccaattttagacactccaaaaataacaaacattctgtagtttggtcacttatatgatagtcactccaatggcctcctgtgagtttcattagtgaatttgacaccatttccagtgatgtgcatcctcttgcatcaagaaattccaaagccaagggaagctctggtaaatattgaagattctgacaattttttatgtgaagagaatccaatgtagaaagctgtttgatgcttgaagggatttctattatgttagactcactaaggtctagtgaagtcaaagagagggaactgatagagtgaggcaaactttcaagttttggacaattagtgagaatgagttgattaagagaacacaattgaaaaatgttgtccggaatggacttgagattgtcacatgaatccaggtccaatgtcacaagactaatcaaatttccaatagatgatggtaacttttcaatcccagttccccttaagtaaagttctgttaagctttccacaggccacatgatttctgggatgttcttcaaacttgagcaattacaaagataaagattgctaagacacttcaattggaaaatgttcgttgggagatactctaaccttttattgtcagaaagattgatactttggagatcaggaagacagttaattgaagaggcaggaacatcttcaatcattgtcccgcaaaagtctagtatttttatgtttcttggaagatttggaaacttatcaaaagatgagcagtgacgaagctcgaaatattccaaggattcaagctcatgaaaactggttggaagatttctaaggtgattacaatctttgataatcaaagaagaaagatttttgagataacaaattgatgagggtaattcattcacttcaagagagcctaagcctaaagacacaagatttccaattatctccggaaaacttttaattttacagcaaccttcaagattaagagttctgagtgtttttgcatcaattgtgtctggaagactacagagattttcacagtagctcagattgagatccgtaagcttgttaaggttccgcaaactctgcgaaggaacgtcgatcaaacttgtacaggattcaaggtttattctctcaagattcggtgcaccagagagatctggaaattgagttagttgctcggagcaactaagatcaatacttttcaagtttccaagatactgtaacaaaaggttaataaaacagtaagagcatattagtacatgccttttgcaattaatatatttaattgcacattcatacctgaacatcgttgcaaagttgcttcagcttactataaggcatatcgagttcaacaagattctgaagcttaaaagttgatggtagagattgtaaaggatatttgtcccacttgagatatctaagtgaatgaggaaaatattcaagaccatgaggagatgaactttgcgtttcttgatgtcataagagttgaaaattttgagtaatctcaggtcactcatctctttgaaaactgtaggtgccaagtctgcctcttcatacactttagatgagtcaagaaagattccttgaatatttgcagttccctgccattgaaagtaaaagcatggatataacatgagcatagaaagaaaatgtaaacatctcactcagtagcacttacttcattacttttcaggacattatagctatcttgaggaatccataacctactccgctttccaagttgatcttgtgactgttggcgaacaattctccaacccatttcttgcaccaaatcatgcatacaaagctcttcattgaaacaatcaacagttacaagacatctatctataagattatctattcctatacttgcatagaaaccacatttgtttagtatatcctccacaaaatctctacatttccccttgaaaaagcatgcaatatcaagaaagatatcttgttctattctatctagaccatcaaaacttgttcttaacacatgttgaatgtcatctaggggaacttctttaaactgattcaatgtcatctcccattcccttttggtaggagaacgaagtgtgcgaagatgagagcctaagaccttaatagctaatggtatgtttccagcatatctcacagccttttttgatagctctatataatctttcggaggaccatttcctctaaaagttaccaaattgaaaagcctgagagcttcgtcatcttctaaatgcttaagctcgtaggtttcattagcttcaatagctctcaaaacttttgcatctctagttgttactatgattctactcccactaccgaacctgtcattctcactacaatgatcaccaattaagtattccagttgctttgaattacttagatcatcaagaacaatgaggaccttggtagaacgaagtctatctataatgtagtccggtagagatggtgctcctaaatccaggctttcttcttcttctctcaatagttttgaaataagcactcttcttagtttctctaatccgtatctttgggatgcttccctaacatttttgagaaagtaataactttcgaattggtgaaagaaacgattgaatactgcatccgcaagagttgtttttccaatgccaccaattccccaaatgcccaatatactaacatttgatgagccttttgtgtcatttaacagcagcatgatttcctcaatgtgtttttcaattcctattaaccacttgaaaccattgctcgacgataaacgtcccaatttacttataacatcttccacaatttgctttattagtttggcctcatgcctacagcacatgaaggagacagtcacaaaaataaaattaacatacaaattagaatgtaggaaatttgtaagaacattttcattatttcttctaaattggtgcttttttttactaaaatagatagattgcattcataatggaacatataaacttccaaaaacccctctggggtacaaccacaagtcaaataaatagcataacagaacagaaaataaaaaaaaaaaatcaattatttactacgaatatatttaaaagtatacattcaccagaaactaaatgaatcgccaattgaaagtttcattattttatttatatatttatttattttcgtggcttctgtcaaagttttaagattgaaaataaatttgtatacttcaaattgatgataaaaatgaaaaatgtcaactataatttaagcattgcagaatgaaaaaaaaaaaaaaacttccttagaatattgaaaacctggttccttgagaactccacccagatagattagccgccactgtcaaagcagttctccatttggccaccatatccagtctgtcgttgaactcttgctcgtattttcgaaacgcctctgtaaagtctcctccttgttttcgtatatgagatggatccacttcataaaaaatgggcagaacaatctgatttaattctttgtgacatttcattatatgcacaagctcatttaagcaccaggaggaagaagcatagttttttgagaaaatgattatcgaaacttttgcgttttggattgcatcaatcactgtagctgatacatcatctataattccctcgaatcttttttggtgatctatggaaagactaggcttgatcttcttttgatctaaagctgtgtaaagatggctagtgaagtggaaatggttattattactcgcagtatcttcacctctaaagttgagaaaaacatcaaaattcctcatagtaccactttgaaagctcaactttgattagtaatgttaatacacaacacaagattaatgaaattcttacaacttatttcagtagaaatagagagcacaaaactaattaagtccgaacctttccagctaccagaaaagctttgtccgtaacatc

SEQ ID NO: 189394 - DNA, 1287 bp, Cannabis indica
atataatgttttgtttcgttgattgttaggctactaagttttcaccaaaaaaaacacaatagtaggtagtataccttcgatcatcagggtccactgtccaatcaacatcacaatatgcttgaagatgtagagaagacacattgttgagttgtagaccataatttaaagtacctactaagtatcttaatattcattttactgctatccactatgattgaaggaaattttacatgaactgacatactttattgatactgaagcaatgccaaattaagtgatacaagcatattaaagaacccaaactatgaatctgtaaagggtagggtcactgccataatgagagagtatacaagcaagttcattggaaaattttaaatcttgacgccttgcatttgagccttacatagaaggtcttggatgtatttttactgtgaaagcaggatttctttggcatgtagaatagcttgaatgatgagaaagtcatgttagattaccaagattattcaaagttaaagctttactcaaagttgagataagattagagattgaagaagcatcaccacatgatgagtatatcatctacatatactattacatagagagagtgtaggtgcagtcttgacaagcaaagagtgacattttgacctgagagaaagtcaagattcttgaaccaagctctaggaacttgtttaggtgatacgaagctttgttaagcttgtaaacttggtggggcacgattgatttataaaaccaaggagttgtatcatatatattttctattgtaggtctccaatttaagaatgtgttgttttgagttatcatataggtcagccttttgatattgcaatagttagaacatacctaattgtaacatgttttatgacatgactaaaaattttattcaagtcaaaacctacttgttgatgatatcctttagtaactagttgtttcttaattgatatatgatgtcatctgtatttttttctatctttatagactcatttacagtctattggaatcaggtaaatttactagtaccctaattttgataaacattttaatctcttataataataataataataataataataataataataataataataataataataataaacatcactctcaaaaagtaagatgatttttgttggtctaaatttttaattttttcaaactaaattaatattatggtttttttattttttttttaaaaaaaatcaaaatcaaacgagactaattaaatgtttaaactaattctacgtaagagtgaattagttt

SEQ ID NO: 189395 - DNA, 2264 bp, Cannabis indica
aaaaaaaaaaacattacaatatttttatgaggaaaaaaaaacttatcatttttatttacaaagatgaaatctttacattaatatatacagttttatgttagacagaaggtatctccgagttagagacagaacactctgtgagaccttcacgaacatcaccccgacagagtggacataccctgcaaaaaacaaagccaagaaatgttttcaaaagaaatataataatggttaagaaagctaaaaaacacatgacatttcaggaaaaaaatcatttaggggggatgaaacaagcaagcaagttgttgatataaaattatagatcatgacagtacccatgaatctcttttagccacttatccacacatgacatgtggtattcatggtggcatggaaggactcgaacttggtccccttcttcgtactcagcaaggcaaatatagcacctgttgatagtttaaaattagcttgatcaaatacatacaaagttacactgttcgctttcatatttcggtgcataaattggattgggagaaacttactctgaaacatcatctccacccttggccttgttgttctttgagtggattctaagaggaaatgaatcaacaactgattctggggcaggacttgagaccatagatagggaaagtgagacgggctgccggtgaatttcatccaaaacctaaagccaaagattatgatgagattttaagtgaccaagtagtggaggtccatatatgcaagacagcataactatctcaattgttatgatgaataagtcaagaaggaactgtataacaacaagctgtgcaagagttgaaaggagacaattgcttaattaaaagcagaagctaaaacagaagttataaaagattagacaattaatagggatacagattttaccagaaatacaaaatcttgagatttaccatgcatgatacagtacaaaaaaaaaaggaataaaagttacatggcataaatttaaaagaaagatcattttggaagataaggatcagacaagttgttgccattagccccccataaaggataaaaagatttgagattgctttgaagaaaattcatactaaaggataaaacagtttctatgaccatctccatgagcaagaaattaaatgagaacaagataagtggaactcaacattcacagaaaaaaagacagagcagcctgtatgagaagagaaggtacatacctcaaataaagcctcagccagcatgacaattctagatatacttgcacgagtagtagattcttcattcaacaataaagactcacatgagcaagtaccatcaggatgaagtcctgatgggcaaaaagcattccgccgaccattttcgtcaataccaccacgtagtctttccaatgcctgcaagcaattaggctgaagcagttcataaaatattacaaaaattctattttttttaaaaaaaaaatcggtagccagcacaccgagatgggatactagtgtaaaacataaacgggtgacagtgttatcaaatgaaaaaacagattggagtggaattggtaaagctatctttaaaatgttcttaaaatgttgttttcacctcggatcttgcgtaccgatgacgttcacttgaatatggaatcctactacccaggtatccagaatcagctccattcccatcatcaaaaaagtcaccactgaaacccagtaaccacctgtcatgagatcctaggtcctcactatcatccatggaaaatagaatggttggagaatcaatatgccttctagaactgcgtctggaaaatgcatcccaaaatagtcttctactattccttctggcctcacggttacttgtgttaggactactattagacagcatattggaagaaatactcactacatccacttgaagtacaccgctatcggttcgggccctttccctgtttgagacaaggaatcctaaatccgaaggtacttctctaaggggttcatttccaaacgagtgaaaagttgctggcggagaggaaagtcgaacagaactaggactaacttcatcctcatgattctcaaaaggcaaaacatcaaaacgtgcactgccaccaccctgagaagatgaactgcttgcaccacgcataacctcagaataggtccgagatacaccattatgaactgagactgaactatcaattgcattgactgcatttgagttagccgaaacattcacagagagtgtgtctgaagattgttgttctttaaacaaagtactagatgtagtagtag

SEQ ID NO: 189396 - DNA, 1647 bp, Cannabis indica
gaaaaacacacacgcacacacacacacacacacggcgtacttagttcgttgtataccacaaaaagagaagagggaaaaaaaaaatccgcttccggaggtagcattaattgacatataacactaataaattttaaaaaaaaaaaaaaaaaaaaaaagaaactttagctagatgacaatcccaaacaacgttcaatcatattttaaggggaaaaaaacatcaataattacagggatcacgatgatgctaaaatcagggaccaataacaatgatgatgagcttacttgtgaacttcaattctttaggttgaatttccaaaagtttactcatttctccgctttatgaaaactcgagttcaaaaacgattctctctctcagcatccaaaagcacgcactaataaattaatacccagctctccactttacctgcataataacaatattacaagtatgaagtcccaaaaatatccatgcttaaagaaaatggcaaataggattaggtacgttcacacgcgcgcaaatattaataatatccaacgcttttggttaggttgccgtaggaaacgcctagagatcagaagatattaaattatacacaataaatatgtaattataaaaaaataattattattaaattgaaaaataacccaacttaagattaaaaaatcaaattaaaagttttcgtgcagaggatcccaagccaaaaatcacagagtaagagattcagagaatcgattcctttgttctttctgtcgccaaaattttctcaccaaacaaacacacagtccaagaattctaaaactcatcacctctctagtctcaacgatcaaacttatttaccagagctacattcacagttttcaactcgtgatcgatcgggaaaaattagtgaagaaaaaaaatataaacttacttaaatcctgacccgctgtggctgatcagtacgcaaaacgaatccagcaaccgaaaatcgtttccaatccaggacttaactactcaacgcagaagagaaaaacaataatagaagtagtggagaaaaagcaaccctccgccgttcggaatcgtcttcttagggggattttgaatacagttagaagaaggggctgactatggagtcggtcaatttggaggcaaggagacaacaacaacaaaaaaaaaacgtaaaaagaaatcaaactgatgcgtgaaagttccgtttttcggaaccaatatatataatattattataataacaataaggccaatctttggtggggatttaaacaatttgggagcaaaggacaaaccctaggattctagagagagaaaatgataaagagaagagaaaatagagagggagagggattgagagaggtaaaggaaaaaaagaaactgtggtgggtggtctggaacaaaactaatggccaaatattacttactataacaactggtgaaagcgtcagttgaaccagcagtttggagaatcggttcgggttcgggttcggattcgggttatgtatggtatcaggttcggatagaataaaatcacttagttatgtttggcaacaataaagggagaatagggtggattgaggatttatttttaccaaattatgattgagggtaaaagaaaatgatgagagtacattaatttttctttcttttttttt

SEQ ID NO: 189397 - DNA, 3963 bp, Cannabis indica
tccttcttgcacatttgcaagctcatttatctcaaaaagagatttcaattgagttggattggcttcgattcctctttggctcactattcatgccaacaacaatcattaaattaaaatgtataagagcgatattaaatgtaaacattggcattctcatcgataaatgcacaatagtgatatttttacttgtaagttacatccataaataacttcaaccttcatctgctattttaaaattgaggctgttgtgagtccatccttatggtatatggggctttttccaatgaattaaggcgaatgtgaaaatttttagcccaaaaaggaaagaaaaggaaagcaatttatttatatggaaacaaacaaagtaagagcttaaaaagcatcaatggttaattcaaccaactttgcagcacagtcaaatttgtttctgtaacaaaaccattcaacagatgtaccgaaataaataataacaacaactaagtatctcagcacttttgagagttttttcaaagcaacaatttgttcacaaacacatcaaaaatgctggttccaacattatcttcaaaatcagttgccactggtcatcataatctacatcacaaaacaattttaggataaacatcaaaagacaagtcataagctaagcttctttagaagctcttatttacatattcattctactcttaacagccatttgaatgcccattaaaagtgttatggaaaagcggttcagataaagcaaaaccagatatccataagtggctcacctttatttatttttgatagaacactagcaggatttagtcattgtcttctttcccatagttgtatactatctcaatctgcatcgacaaattgtaccagaattagtctgaattatttaaataaacaacccaaaatgctaattcaaatccaggaaccaaaataagtagcataacattgtaaatccatcatgggcaatagaagaactttcttataggttataacgatgaagaaataaagtgaaaataaatcattttacttacatggatctatatagtacataggccaataaaattattgtgtattcaattattactagaaataaaaaaccaatctcttttcctgaagatttctctataatgaacaagtctatccacatgagagagagagagagagagagatgccaggctttttaaatattttcatctaactatgcctttttgtgaagaaaataactttatttttacaaaggatcaaacccagcatgaagttgttttttgtaagttttggccgtagtagttcaaatgggagacctcccagtggccctcagatcactccttaccacaagatcacctcttgaggttaatccagcatcaaattttgacatgcaaagacagtaaattttgaaaagcatatgttgtgaatgaaaatgacaaataatgaattataaaaaatatcttacccctgaaggtggagttgggtttcgagtaaacttactgccaccaggagcccaaggtactgcacagagtagtaaataattgacatcatgagcatggaacaaaagcacgagcatgaataggagcgggcaaaggaacacattgatattattacaaaacattgaaaactcgctagtatagcaatgctctaggtacatgtataaatatatacacacacatgtaatgagaaacagaaagaagaattcaacgaagaacaacatttagggacaataggtccctggcctgaactcagaatacttcacaagaaatggctcaagtccgtcaaaaaatttgacagcaatacattgtaaaactcgttgatattaaccgcccaaagccataaaatatataatgctattccacaaaactcaacatcttcttgcttttcctaaataattattctatttctttccaaccacaaagaccagtagactgctaaacaagctctacttggagcttctaccattagtattagtgcagtaagtccctctggatcataacaacacagcatttaagaaacagaaaacagaaatttaattcaattaacaatttgcaccaaagtcttctggcaaatgtgcagtgtaaatacaattggaattggttaacacgccaactggatgctaatacactttggccatttatgttttgcatcccaacatgtattccaaatcctcagggaaagcaactaattaaatattttcgcttctggaggaaccctacctttccgtatgaaagaaaatggctgaaggaggttcataaataaatactaataaagtgaaaatgtaacagtgtaggatatatatgagaaaaacacaagtcaagcactaaaatgtgaagaagtttaataaagtaacgcgttctgaagttaattttgttgcaccatgacattcatagaaatagtactaccaactacaaccaccgaggttctaatcttgtatgagctcaaagaaatgaacaacagttttgagattcttttgtccttcaaataattataataaaatttccaactagtttttctttttgtaacttataaagaaaccaagcatatcaagtacttgtttgtttgcaggcagacttgctctaattttaaataggactctttgtgttgggtatattgtatacatatgcgggtgggaaatggaaggtaatacatgaagggtcgttatgaactaaaataataattgtgatcgaagtcaaaagaaaatgctgccggcttccaatcatgcgacaactttataaattttaacccaaatctcagtgacaatttaaatccaaatctgtgaatagtagaggcctaacattgcttaaattgtattacaagtcttaccaatataaggatcagggtgtctccacttattataagatgcctccccatcagctattagtctatcaattgtgtcaggatcttcctgtaaataagtgacacagatacattcagcaaatagactaacaaagaaacaataaaagaatacaatcattagcatatatctcaattgacttattacagatgcataccattattaccatcacttaagtatttctctcattgccaccaccatcatacatgaatttgttaagctcaatgaataaagaatgaaagactacatgttctttaatctatattttgaataaacgagtagcagcatcttatttttaataatctaaatcatagaaccaatattttcagatgtttgcctatcccaactaaagttggatgagaaaaatattaatgtctagcaaccaatcaaaataatctttgtccacatatagaaaatttagtgtaggaaggtttgaataacatgttaaactgtgaatagcataaaatttccctataacaaatgcaaaaactgttggcagcaatttataaaatagatagttttcttgagattttcaaaccaaaatcaaacaaactgaaaaggaaaacaggtttacgtatgctgttcagtttcgtctgatgatttaaattttgataagctgcaacactgcaacaaaatttcccccaaattcatattttgatatctccttaaccaacgcactaaaatatgaaaaagttataacagcaatcaatcaaatgcctcattacccagatttcaaaaatccaatttgtattcatttaacacaaatatatatatatatatttatatatacaatgcaacccaaaatcagaaattaaaagagggaaaaggggaaactaaccacattcttgttggcctcgaacctttcacggagctctgaagcctgaaatcacataatattaaaagaaagaaagatgaaacgagaaattgaaaggatcgaagtaaggattttaaaaaaatagaaaaggagaggagtggggttacatcttggtaaaaaaggtggcgatgaacagcccagttgagagtatctttgagggctctccggtagaggatccgaaccctctccttctgagctgctctccgagctacgtatccgccgctactccacagtgcgctcatctctctctctc

SEQ ID NO: 189398 - DNA, 1339 bp, Cannabis indica
aaaaattattattaatcgcaatctaacaaaaaaagaaaacatagctaaggatgtcttatttaaaaaaaaaagtttgattttttttttgaaataagacatccaaattattagacgttaaatgatgatgttaaatgatttgagagatgtttatgttaattttattagacgttctgcaaatagtgttgctcacttcttagctcgagcatcctatttagttgttgatcgtgttatcaagaataatgttactccagattttaatcatataatcactttagattgcaattaataaagatgaattttttttaaaaaaaaataacttaattttaaaaattatcaaaaataaaaataaaagaaatagaggagagagaggcagagaggcaagcacgcaacaaaagagagaattttatgcaagaattaatacaaaactcctgatttgccgctccgtaagagttggcctaaaccaatcacacaatagaagaaaaaaaaacaagttagtgggaccccatcaatcccttgagcaagaaaaaaataaaaataaataaataaataaacaaaaaaaaccgaaataggttgtcggggtggctggtgggagagaaagaaaataaaattaaaataaaacaaaatacgtaaaaatagtgaaagagagagtttcctgaggaaggagacccaaaagatggtcgaagacaacgtgctctgagatcatcctggaaaaggcagtaatagagaagaaattaaaaaaatacattttttgaaaaataatatgaaatcaaatatgatttcatattattttttgtttgctgccttttgagtctcaatctccacttctatccccagaaactttggagttctatttcgatttcaatttcaatttcgttcattttgtttgtttccagcaaataattatatatatattaatcttaataaaataataaaaagtttgtgttgatcaacatcctttttggcccttgtgcatggtaaagttcactattttgtgtctctatctatctttttcaaataaatgtctctcttgttactttacttttttccttaggggatagcttgctgaagagggtattttatagattcttgttctgaattctgtttctatgattacttttcagcgtcatcctagcggtactgtgttctgcatttatcgatgaaaagggtgttgtaaaatcgaatcaaaagtcgtaatgatgagggatccacatgtcattatgattgttcgacgatttgtttataacatagtttttgtttaggtagctttctttgtattttgttaccttgtttgaagagaaagaggacgacaaagaagaaagaagaaacgggtaaaaggaaa

SEQ ID NO: 189399 - DNA, 1355 bp, Cannabis indica
aacccaatcgtaactttgaaaaaaaaaattaaaaaaatagtatatatatatagagtaattcccccaaagtttatatataaatatcaatttaaataaaaaataaatatatctactaatgtgtttcaatatataaatattgtatagtatttctttttaatttattttccctattaaaaaattaaagatatttacaacataaatatttatataattcactttgttgtacttaaattctcatgcaaattaatttagttgaaaaattcttatatagtcattgttttacacttaaatccttatgtaaaagcaaaatctgcaagtaattattaatgaaagataagtactagttacaattcaattataaaactaataatataagaactaaaaaaataatatatacaaatattacaatacatctatacaatatataattatatatacactatatatatatattatttattgtgtctacttttttttttttgataaatttcaaatgcatttatcttattatttattgtgtctcttgctatagtatcggtttattattataaatattacaatacaaaaataattttatgtcctgatcccttaataaattaatagccgaacagattatatatattataatacaaaaataactttaggtcgtgatcgcttaataaattaatagccatcaccaaaatccctagttatagcatggtaggattagaaagtaataaacagatattattgacctaatcattaattacaagatttgtcttactttttgagagttgattctaagttaggctcgtctttatagttgaatgcatcatcaaacccaagcttctccttcaacaatcctacctataataacaataattataacattttagttagattgatttatctatatataaaaaaaaaatgattgttttgttatgtacgtaatgagttacttttctttactattaattactttttctttacttccagcacaaccaacaacatagcaaccagagagtttggcatattggccaaccaagtggcctactgatcctgaagctgcagatacaaacactctctcacccttcttaggtttccccacttcaaatagcccagcataagcgtcaatccactaaaccctaaacccaaatttaaaattaataattaaacaacaaagaattgtgttaggtactctttaaaaatcataattaattaacatgaaaaatgtggctggtgagttatgaaataaaattaccaaatactccaatttgatgtgataatggaaaccccatatcgaaagagtttagtttcctcaacacatattcagatgcttttaacacactatagtctgcccatctagtcgttcccac

SEQ ID NO: 189400 - DNA, 1054 bp, Cannabis indica
tatatatatatatatattggtacctatataagttaaacttgttaatagataattaatatttatatgttacgacgtacattatcaaatattattttacatagctagatgacaaattcatttgatgcgtatatatatctgtagtgttctttttaataattattttactttcaaaaactctctaaaatctaatttacgtatcaatgcaagtacgtcgtatcactaaatacgagtctttctttttttaatttaattttatatcttaaaaatactcgtaacatttatttttaaataatttaaatattaccacaattattggcataccacaatttagataaccatgcatttaccaaacacaagagggtgacatatgtttaacagttaatataataattttaaatactcaaagtacaatctgatcgtatatatacacagtaacacatgcctgcttataagggaataaatttataacattgtacaaatgatgagatattatttatttattttttaaaaaaacatcaaataaactaaggtctaatagatagattcaccaaagaaattaattattataatggaaaatgttgggcgcaacaccaccattaaatcactatatcatactccagctatatatatctgagaaatgctaaagggcactaatggtgcctagcaccctcttatgtgtcaatatcgctattggtccaactaagtgtcgggtcccatataatttaatataatagtttttagggagtatcgctagctaatcgcaacgcgacatgtcgagaaggtgcttccactagtacttaatagcaatatagcaggcaatataataaaatatccattattttcttgatgatcatatatcagaatgtccatatcccaagataaattctcaaaagtccctatacataaatctcataatcatgagttagctccttaattaatttcttacaaattctaaaacccaaaacctcccatattccaaacaaaagggggcaattgagttgtcaaacttttatatctcataataagaagtcaacaataaaaaaaaaaagaaaaa

SEQ ID NO: 189401 - DNA, 1395 bp, Cannabis indica
attgtaagatacacggtattccatctcaaaatcaatctgcaacgacacgagtagactaataattgtaaatgtgaaactctctaacataacctaaccataaccatgattgagcttagcctcaaatgatcacatcaacatgtcactaagcaaaattaatggcaaaaaaactattccatttgcaagaaaattaacattcaagatcattatatcctgatcccaagtagaataattggcaagcaaaagtttcagtcaaaaccctcacaaaaaaactattaaaaattaaaaaaaaaaacccaaacaaactaaaagattcatgcaccaattgctaacaaataagataacccaaacagaaaaacctaaagtaattaaaaagaataacatacaaaagtacccattgctaaatacaagatgaaacaaacaaaattacctctgctagagtgaacacggaacttaatttcccgccttttcttgacacataattatcaaaatttgccatgctgaactgtgtatagtgagatttctcggttgtgggtttttaattcgtcaagaacgatcaactaagctaacgacaataaaaaaactgtgagatttctggtaaatatatttgctatattgtttctcacttggtgtatatatattataacaacaaaaaaaacattatttagagcatataatcagttgatatagaccgagaaactggagttggattcaatgttattaccaagtagggagattaagggttcaactgccttgccggagagaagagtgagcagagtaattgctcccttgccggcggggactgtgacggtgaggaaagagacaactaagaagaggagataggtatttatttgttgggcttagtgggccagtttcggctcaacaatttttgggcccaattcaattttgttaataatttttatattgacaaatataacactaaatttgacaaaagggacagtaaaataactagctttcataaatttttgtgtggatttttttttttttaatataggtttgtccttttaagttgtatatcatttaagaaattatgtttatcaaaaaaaaaaaaaagaaagaaagaaattatgctatatttgcttaactttcttctaatttttgtattttatttttttcttaaagattttttgtatttcatttaattctgaacaaattacttatttcgattaacatttcattaacttattaaagcaaaattgcagcaattctttaatatataattatagctagagatgaatggatgtttgactttataacttgaagaattatttttacttaataaaaataaaaaattacttttaaaaaataataagaggtgtttggccaaatttttttgaaacatatttatgaaatttagagttaaaaaataaacaaaaa

SEQ ID NO: 189402 - DNA, 711 bp, Cannabis indica
tggggacatgaaaagctgtaaaatgtttagctgataatctgaatttgttgacacatattattggtgtcaaaagataagattttctacttaaacaaagagtttagccacttacttgtgagttgtgctgtgcttccattaacagaggccaccagacaatatgtcctcttagctcactaatgtataaattttattggggaatatggctcagccgttttaattaataaacgaagaggacgatagtggactaatttagagttcgttaattcattaactctgcacacagatgacaattaatgcaacactcatttcatctagcaagttctggctagtgactattgctccaagttgtataaaccaaacttagttgtattaagaattttaacttataagaacatttaacatgcatgaaatggacagaagataaagaacaaaataaggatacaagaaacgtgtaaactgccaataattactgataacaattatgcaaagtttcaacaaagtacaagcacatccaagagaattgcaagcctatagacaaagtttcacaagaatcagagttcttaacaaatgtacatagataaatggtgtgcctatatataatcacaggatgcggcgggacaggcttaaaccgttttagaaggatgagccttaattaacatctcccatgaacaaatttacgctgtacaaaacttgagtccaatggagagttac

SEQ ID NO: 189403 - DNA, 4123 bp, Cannabis indica
aataaattcaatgcttatatagaaacaatactcggttctcaaatgatcagttccggatatggccatttacatatcaaactgactaccaatatttcggaatataagacacctactttgctgtcaaatttagacatgacatttgttattcaaacaatatatatacagagcataccccatgaaccccttgatcaactcccacaaagatgaaacacgctttgtctcctgttttgaacgggatccctctttgcctctaactttgtccttcgaaaatctctcctcagtcgtccctagaaaagtgataacaaataaagtttatattgttatacaccaatcaacaaaatatgggcatattatttacatatgtttgcgagaaaccgtggaaccaacctttgctttcagaggaataagaaaagcctttgctagatttctgaaaggaagccaattgttctaggagtggacgttccgagtcactgccaaaaatatagaagctaatgcacatatatcgatcacgatacaccatgagtaaaacagttcataagttattgagttgaaccttatttgttttggtatctgaacatttacagcaaagtaatgatctcctcgtacagaaggtctattgatatcgggaactcctaagcgtgataacttgacggtttctccaggttgagtcccagaaggaatatgaagatctctcattccctcaacagtttcaacctgatattatacaaaataaaaataaatactcgccccaaaaaaaatgtgcgcaaattttattcaaaaaccatacgcatgagaagctagaaaatataaattaaaaaaagtaccataagaatatgccgaataaagtcaagcattccagaagtaaagaaaatattaatgaagattatatgagagtacggtcaactgaaattactactagagatttgaatgcctaaaactctagaattgcagttgcttcttttctaaaagttacaatattactaatattgaatgcttccatcatagtcaggatttcggggtagaatgactaaaaccatacatgcttaacaccatttacaacttcaaattttatttgttggcagcagtgtggaatatagccaatacttgatttatgttttatgcaaatgtatcaataaataaataaatcatagtcacattattatttgattcttaattagaagtgaatagatcagcaatccaagaagtcttacaaaagatatgacatttttggcttctcttaaatcaaaatagaatacaaaaaccataaaagtacctttagagtagtccctagtatggcttcggtataatgcaaattgatctttgagtacagatggagtccttcccttttaattccttgttttgaatttacatggagtactatatagaggttacctgctatgcccctgcaaaaatacaaacaaacatcccaaaaattctgatttgtattgaacaaatgataaaaagttgagttgattacaactaggaaactaatacttcatcttagtgtgcacaccttttactatcaaagttaccttccccctgcatttgcattgtggctccatcactaacaccagctgggatcaccaaatccattgtacgtttagattgtactcgaccgttaccaccacatattcgacaataatcagtgattatcttgccatctccaccacaagttccacatgtggaaacctaattagcatcaaacgcgttgcagaaaatgtcaaagatagtaaaaatcaaaagaagcatacaaacaagggagagagacgatatataaaccaactacgcttagaaacatggcttaactttgggtttagagttagattcctagtaaaatgtaaactataaataagacataaacagagactgaaaaatatggagactcgaaatttcgttatctatttttgaaaaattttattatcttcgatgttctaaaaacatgtcaagtgtgtcaaaattacctgcgacattattccaaacggtgttttttgagttttaatcactcctcctcttcctccacaagtgctacaagattttatgtcatcactagatttcgctcctgttccatcacaaccattgcatgcctcaaagcaagaaatttcaatttctcgccgtccgccaaaaatggattcctcgaagctcaaatgcaggtcatgtctgcaaaagacaaaccaccattcatacagaaacaaggaaaagcttaaaaaaatatgcttatatttatatgtatatatgtgtgtcggcgaatgaaaggagaagggtgattaccctagtgaatagtgaccgtaagaaaattaccgaatgtcaagaccctgattcttcttgcttctcgaattaaaattgaaacctccttcttcgcccatgcctgcaaaaaaacccttctgatcctccaaaaaatgtatcgaaaacatcaaaaggatccacctacaaaattggatgtaaaacattagcaagtactcaaaattaccagctcctctgcccaccgaaaaataaaaaactttagaattatgatacataaaagacgaatagagatagctaagttagtatctataatgaatatagtaatttagaaaatgatcaggagggttgtttaactattaggcagttgaaattggttaaacttaatcatataatcatacccctgatgaaccggatgaaccatctgacactccttgtaaaccttcctcgccaaagcgatcatacatagaccttttctcgtcatctgatagaacctacaaaactgcttgattacaacatgaacggaaagagaaggaaaaacaacagtttatgttagaatatttatatagactgacataattattgctcacacaatgtcattattaatatataaggataactatatgcatagtataatgcctattatgcaattagaaatttaggaccataatgggatggtcggttttattaactgatatcaccctattatatgtagatcatggatgaaaataatgagggatgtatgatattagtggtaagagtttgctctccatgggtttttcttttgcattttactttgatcttgtgtgtttatggtgttttggaccgattggatcaagatggttcaaggagatacaatgcccaatagtaagacattttgttgtgaaattagtgccttgaatatattttgtgtttccataatgctcatacggttaattagaactgaggcgtttggttggaaggaatgagaatggaatataaaataaaatgcacaaaaaaataaataaataaaaattattaaattttttctcatcttgtgttggagtggtctttccttccattttaaattggaatagtcattccaccgaaatggtggaaagaccatcccattagaatgatactctaaatccaatactttgaaatgcatccaattccaatcaagaaatgaaataaaatttattttctttccatttcatttcctccaaccaaacgccaccaaacagtttaaccacaagcacaataatttctcaataaagtagctgctttcatacacctccaaactcatattgatgaataaatttacaaaccaacattaaaaaaggaacaagaattacctcataagcagcacttatctccttgaacttctcctcagctccagggctcttactcacatcaggatggtactgaccccaattaccaaaccaacaaaattttaacccataataactcataactcaaacattaaaacacacaaaatatactctcaagcaaattcaagtaacaatttttttctcatttagatatttaggctatgtttggaaggttgaattttagtagggaaagaaaaaagtgtgaaaaataacaaaaatcaatttctcaagtttaatattgaaagaattgaataaaaaaacagaaagttaattgaacaaaacttttcatatccaacattaaaatttattttttctatcatttttcacacttttttctacttttttctttccccaccaatttatttattttttatcctattaaaatctaactttcaaacatagccttactcaattcgaacaggaaagtaaagattaatgcttttttgtattggttgaaattgaaagaattcattcacattcaaacaacagttaagtaaagatttattcacattcaa

SEQ ID NO: 189404 - DNA, 1227 bp, Cannabis indica
gcttcttataaattatatttcaaaaattaccaaaataagagttcttccggttatatcatttagccaatccatagtaagacattatttcacttctaaacagttatagaagctatagatttcatatctatgattaacgttctcactcaattggactaccgaattcctaagatgtaagtatgggttagtcctatgcgtaagctagtagcgaacaagtctaagaacatgtatagtacaattaagctaaattttaattatcttaggattgagatcaattgatctaagatcaactaagtgatattggcttagaaaagatataatggtaagtttatgatatctttttaattgttaatatcggtctagtctgatgtatagtcgatacatttgatacaagtttacttttctaatgctctaaaaaaattctacttatgtaagtgtaagcaaaccaatatatgtattattacttcaatattaatttagtgcactaataaattataggacttaatagtttgaagcatataatcatgattattttctactatgtagacaacactatattcatgagtaactatatgtgcgggatttaatagaatttatatattaaatatacaatcataaaagtaacatgtgaaccaagcaaaataaaatgatttttgatcttttattaactagtaaataagattatatgtcaatagattttatttagggcataaaaccccaataatgtctcccatgtcttttcttaaggaagggcttggcaaaaagatgggatcaatatagggattacaacaagcactactctgacatcttcagttccccaagcgccaagtggtagcccaagtgtggtcagtcaccatcaatagtatgatcgaacagtgtgtctcaccacccacttttggcattgggcctttacctcaaggaaaaaactcatttcaatacatctcttgtaaattgcccatcagtgggattttattatacattaacctctcgagtctgggtcaacctggtccatgatgcatgacagcctataaataaggcttcatctttaccatttaagagttttacgatttagattttatagagcgaaactctaccaaaaagtgtacaaaaatataattattaatactattgactcatggactaagatttgttaacacttgagccacattaaaaattccttatatttatatttttagctctataatttttctataatattgatttctaaac

SEQ ID NO: 189405 - DNA, 3799 bp, Cannabis indica
tttgtcttctggcttgttagtaagtgcacctatgaacaacggctaaagattctgcagtgaacttattaactcaatttaaatttatatggatatacatggaccactaagtggggtggttttttcttttgtcttgttcggaatttatatttgaacttgtttctattggagttttcatcattaaatttggaccaccatatgggcatgcttctgacacatagcaatacttctatagtatcactatcacaaatcaaaattttagaactagtgctaaaccaatttgttgctctgtagaaatttttcaatggtacaaactaattactgttggttttttttttgcttaatgagcaggttcacattgattatcttgaagctggggcagatattataattacagcatcttatcaggtaagtttctttaatcagatatatttgcttgtttcataatccctggaactgttacattataatgttatatgcacatgtacacaggccacaattcaggggtttgtagccaggggctatacaaaggaagaaggcgaaaccctgctcaagagaagtgttgaaattgcccttgaggctcgagatatttataaggcaaggtgtgaaagcactcctagtgatattgtagaccgtatagttctcaagtatcggccaatcttagttgcagcatctgttggaagctatggtgcttacttggctgatgggtctgagtacaggtatgtgaagttgcttcttaaattcaatgaataagtttttgatattcttgacttttgtttactgcatgagattggcaatgttagaattacaacaaatgacacctttttttttactcctgttgtgcatccctttacagtggaaattatggtgatgctattacgctaaaatttctgaaagattttcatcgaaggagggtccaagtcttagctgaagcatgtcctgacctgattgcttttgaaacaattccaaataaattagaagctcaggtattgatgtttgaaattcattaatattttagtttgaggaacttaatggttttaaggcctaaactttgatcatgatggtttatgctgttgatgcaaccaagtgccaagtattttggcttggaatgatgaaaggaaataagtatatgatcactagctatgaaagaatgttctcatttacctgtatgatgatcttgtgtaggcttttgctgaactcatggaggaagaaagcataaatattcctgcatggttttccttcaactccaaagatggtgtcaacgtggttagtggtgattcatttgtagagtgtgcttcaattgctgaatcatgcaggaaagttgttgccattggaatcaactgtactcctccaagatttattcacggactgatatcatcgattagtaaggtatattcttcagagcacaattaatttttttaataaattgtaaagttaatatctacttgtcacactgtagctaagcttctcccaatctggatagaataagtaaaataaaaaagtgatagcttttctttcatacaacaactgatctacatgcttaatttcatcaaaagaaaaattctttcaatcatttattagtcatcagcattaatgtttccattgtcaatttgacttattttaagaaggatcttaatacagtatccattttctggaattatatgttcctcagtggaaaaggttaaaattgtggactttattatttggaacaaattcatgatgttttttttctcaatttctttgctgtacttaacattggcctctggatttcgtacttatttaattttgttaaaattacttcaggtgactacaaagccaatacttgtatatccaaatagcggtgaaagttatgatccagttataaagcagtgggtggtaagttcatttcctctggttgcacggtcactacatcgaacattatatattgtttcgctaaaaattttttcacataaagttgggcaccaacaaagccaaggactaagtatttcctttgcaaaaccaatcagtaaaaatagcttgattgttctattgcagcaaaatacaggagtttccaatgacgattttgtttcatatgtaaacaaatggatcgatgtaggagcttctcttgtgggaggttgttgcagaacaactccagagactatccgggggatctaccgatctttttctaataaacgagggcttagcctgagcgacaccattctaactttaaataagtagaagagagcagcaaggactttgtgctggaaacaaagctgttgagaagccaaaaatgtcctgtttgggttggaaacttggaagttgtggcaagaaacatgataggagaagctgaggttttaatgaatctgccaaaagctacataaaggcacacccacttgtatcaaattttgtttactttctatgcttttatattactgttgtaaccaataatctcaagtgactaaattttcttttgtagttatatcatcatatgactataatttatcaggattcataactttacgtggtttgttctctctctttttcctactattgccaccttaaacccaaaaacaaaatacaaatatgatatggtaccagaagcaacaccacagtcttagtaatgtagaattatcccaaatttaggtcatggtacactactgtagtgtgtgtttgatttattttttttttaatgaggattaacatctaataatgtgtattcttttttctgttttgtatacttcgtttatgtgaaaaatccttcagtcctagtgagcaggacttttaatactactagttctgaaccccaattgcttccctaattccaattgtaaccatttgaactacagggtgtggtttgtgaaatggaactatcttgcattggtttgttaggaaggtgtgaagccttgggattgattttagtattcatattagcagtgacctggttaatagccttgctgacaagacaacctcatactaaaacaaaccagaagcaggtttgtgatgattctgaaacacacaagggtctctgtgataaagggttcaaacttcccatactggaagccattgccttgtattgctgagagtgaagctttcttggtttgttagctacaaagaacatctcaaaaagcctctgaaatacgctcatctggttcagttgggcaacaagtgagctcaccccaacccagcccagtagtatttcaaaatattagccccaattttaatacatcttgaagttgtggtctgagcttatgccaattatttatgtctgagtttgaagtttaatgtattttattcgaatttcgaaacccttggatggatcgctcgttatacaatacgcatgtgaagctactagcttttgaccttacctctctcacccaaatctcctcaggctcaaattctttctctcgccatgggttcctcctctcgcgcatcgaaacccttggagtcgtaacattttgtgacctcaaaccacgaaaatttctcaaattcattatcgatgacggtactggttgtgtcgattgcatcctttggctaaaccatctgacatctccttacttcgctcgtcaaaacccttcaaatgttcaacaaattgccgactcggccatccgttttgcgtcggaggtgcgactcggtgtcgttgctagagttcgtgggaaaatcaccaagtatagaggtttggttcaggtcaccgtttcagacatcgtcgttgagagggatcctaatgctgagatcttgcactggttggattgcatgaggttggcgcgtcaatgttatgatctttctatcaagtgagtttgttttcgatacgataatgaaaaattat

SEQ ID NO: 189406 - DNA, 3325 bp, Cannabis indica
  modified_base (458)..(458): a, c, t, g, unknown or other
taaaatattctaaaataactaaaacataaaagataataaataaaaaaaaaagaattaacctcttatacttatttttttaaccttcttttcaaatttacggtttggatttcaaaagtggttgtaacgctaattagaataagggtcttatacgattttttgttgcaatttaagttgcagcgctagttacaatacgagtttttatgtagaattttaaaaaaattattttaaaagtgtaaaaataaaaaacccaataaaaaaaatagaacttattttttttttcaaattatcaaaatacatcatcagggaatgtagaattttactaaaattttatttacattaataaaaaattaaattaatatttattattattatttatttttttaatttattgaggtttcgtcttcaagtcaaatccagctccgccatgtatttaaactgattcttacaaaaaaaaaaanaaaaaaaaaaaaaaaataacttggagtgtatatatagatatatatatatatatacatttctccatttttggccacccaaactacctaaattgaattcgtcgtgttcgtctttctccgccataaataacaattgatttccttcgttctttcaagtttttgtcaactgagtactgagatccagtctgagtcgacacttgtagaggttcgaaaatggcgcagaagaagtttatttttgaggttgaaaaggctaaggaagctaaggatggaagaccttccatgggacctgtttatcgaagtatgtacgccaaggatggctttcctcctccgattgatggattggattgttgttgggatgtgtttaggtacttttttgtgattataatttttgtttttttttggtaatttgggttttgtggttgtttttggatcgtaatttgagtttgtgctttggtgttaagctaatggtgtgttactgttatttggttagttaaggtcgttatgggttttgatctaagttagggaaactttgttatgaaaaccttgtttatgctttgattataatgctttatttagctattggaacttaattttacattttgtatagtgcacagtgcaaaatgggggtttgggtttgtattttcggattgaattgtctaacccgtttattaaacgggttgtgtttgggttgatacgactaacacgaaactaaactgatccatatgacttatttaaagttaatttaggattttaagagatcataaacatgttgaataataaatatgtcatataaatatgttaaaaaagttcattagtatattaatggattgaagtgtttaaacaatatctatttataaaagattggttatgcttgaaacatattgctttatttaggtattggagcttgattatacaaggattgagattgattatataactgaaaagtaaagtaatttggttatgaactttgctctttgattagtcatgttaattttcactattgattgttgtataggctttctgtggagagaaatcctggaaacaaaatgcttggtcgccgggaggttgtggatgggaaggtattttttatttatccataaaattctatgaactctttttcattgttaagagttaatggatttgaaaagtggtattttctttgcaggctggaaagtatgtttggcaaacttataaggaggtttatgattgtgtgataaaacttggaaatgccatgcgtagttgtggtttcggagaagtaagtttttgatttttttttttaatatatgtatgtgaaagggaaaatttgttgttcaagtttgttgaacacactaaaaatctgttccttcttcattgcagggagacaaatgtggtatctatggtgccaattgctctgaatggattatgagcatgcaggtacattcttctttacccgatcaattgcctttcgtttactttcttttggtcactgatcgtggcgagtcaaattaaacaagcatgaagagaacctctatctcatgtgtagttttgctgatagtctgtttctcacacaatgttacccttataaaatatcctgaacatattaaagttaatgattcttctatgtttttgaatgcctattgtttttatgaacaaacttcttattagtgtagggaattgataatattttacatgattttctgtgaaacatattatagatacaactacaatacttgcatgtttatccatgtttctaggtatacttttgcctgacataactgcaatactaatgcaggcttgcaatgctcatggactctattgtgttccattgtatgacaccttaggtatgcttttctcttctttagcacttagtcagccaatgtcaaatgcaactaaggttccttgactgtttatttcgaatgtcattttgaatttttttatctaacttgtgagcattttttaggtgctaatgcgattgagttcgtcataaaacatgccgaggttacaattgcttttgcagaagagaaaaaagcttcctgaggtacacttgttgaaatatttatactagaaccaactaaaagtattaatgaagatatgcttatttaggaactgatgaactcaattgcttcataaatggaagcaattcgagagttaaatcctaaaacagcttttggttgccatttcaaattgtctcatgcatatatttgttttcccccttttcagctgttgaaaacacttcctaacaccacagactatttaaaaagtaagtcatatgcattttctagattcctttttctatgaatctttgtgtaagaaagtgccaagtaacattacttatgtctcttgtagcacttgtgagctttgggaaggtcacaccggaacaaagggaatctgttgaaaagtttggattgaagatctattcttgggaagagttcttgcaattggtaggctattttattttgcttacccatttttcatgtatagttagtacttactactaatgattgataaaacaattatgttagaaaaatggaagaaagaactcttttgaccttgctgcatgttatgaatatcgtaggaatcaagattattgatccatttttttatctatttctaacagggtgatggtaaagatttcgatcttccagtgaaaaagaaaactgatatatgcactataatgtatactagtggaactactggtgacccaaaaggagtactgatatccaatgagagcatcatttctcttttggctggggtgaggcgattgcttgagagtgtaaatgaaaaggtaggtccacatttttggctggaaaaaaatggtaaaatgattatgataacaccactttgttttgaagttatactgattttcttttttcaattctatttttttcttt

SEQ ID NO: 189407 - DNA, 3157 bp, Cannabis indica
ttaatccatcctgatatattgaattcccaattccctaggattcaagaacctgcaagtcacacagtatgacaggatcttatggcacacgtgaacaatttcaacataataatatgagcatgaaatattttaaacaacttgcatagcattttgtttccaacttttctaataggagcagcgagtagttagtttgataaattcactaaccattccataatctcctagcaacaactacccaaggatttttaaaaacaattttaggctgcaagggacaagcggccagaggcatcctcgctttactaatgtcaagcaacaactaggagaattcctaaaagcttacttaagtcgctttagtactgcaacatccaaagtaagaaatctaaatgatagcattcagttgacaactcttcaggctggaataacaagacttatcaattgcgggaggcaaaaatctttgtgcgtaaggaagaggcacggagcaggatgaaattgctcaaatccagctcgagagacaaacccaacacaagtactgaaacatcgagtactgtaacaactaaagtaggaaatttgaatcacaatggctcgaatgggaaaaggaaagatgagtcgagagattcgtcaaaggacaagaaaaagcaaaagaagcacgagatatatattctgatatacttagtgtatacagaattaaatgaaacttgtgaaaacatctatcttgcaaatgaaaactgggtcgccttttggagtcccgatcctatgagacatgctaggaataagtaagatcccaacaaatatatccgtttccatcgagatatcgggcataccactgaggaacgctgaccaattaaagatgaaattgaaagtcttatttctcgtggatatctaagatagtatgtaagaaatcaaggaaatgcatagaattttcccaataaccagaataataaccaaggaatacaacctctcccagttgagggtaaggacatcttagttatttttagagggccacacctcgcaagaaataacaataatgcttagaaaagatatataaatgaagtgaagaatcaagaatctacctttcctccagaacccttgaagcaagaaaagcctaaagaacctcccattatctttactgacgagaggcattgcatgtacaatttctgcatacggatcccctagtgattatagttcaactcgtgaataagagagtaaaaagcgttctcgttgataacgagagttctattgatattctctacaaagaagcattaaagaagatgggtctaaaagaggaaaggttgaaaccatgcatggttaacctgtgtggattcacaagtgatagtgttgcaagtttaggcacattcgaagtcccactcactatgggagagccaccactatcgacaacccagatgcaagagtttttagttattaaaatcccttcagtatataacatactcatgggtggtcatgcattgaccaaaatgaggacaataagcttaatcaaacacttgtcctaaaattccccactcaatttggagtagggacggtgagtggagatcaactattggttagacaatgctatagcgttaagttgagaaattgaagggcgaaccatcaattgatggtaattttgatagaagaaagttaggaaaatgagatggaggacttggatcctaggatccattaagaatacaaccaactcaagctaattaaagaattagaagaggtgaatttagacccaaacgacccaaccaagtgtgtcaacattagaaaaagtttggggaagaactaaaatagcaattaatcgcatttttgaaagcaaaccaagattagtttgcttggagacattcagatatggtcaggattgacctgaatatgatatgacatcacatcaacattgatccttcttacccctcaaagcctcagaaacgatgaccattagatcccaagagacaaaatgctttaaagggagaggttgataaactgtcaaccaataacttcataagagaagcattttatccctcgtggatatctaatattgttcttgttcccaaaccaaatgggacatggagaacttgcatagacttctctgacttaaatagggcttttcttaaagactactttccattaccacaaattgaccaattggtagatacgatagcagggcacgagctgatgacttttatggatgcatactctagatagaaccagattaaaatgcacattctagatacgaaacatacaagctttgtcactaacatagggctttaatgttacaaggtcatgccatttagactaaaaaatgttggagcgacatactaatgacttgtgaaagacatgtttgaaaaccagataggttagaatgtggaaatttatgtggacgacatgttggtgaagtttgttaaaagtgaggaccatccagaagacctcgtagaatgcttcgccatactaagaaaatataataagaaactaaacccaaaaaaatgttcatttggggtatcctcagggaaattcctgggttttattataaatggaaaagaaattgaatctaaccacgagaaaataaaggcactgctcaaaatgcccttgccaagtaaaccaaaagaggttcagtccttgatttgaagaatggcagcactgagtagatttatttcaaaatcaactgataatgcctcccatttttcaacattttttgaggcaataacaaattcaaatgaaatgaagagtgtaagcaggcttttcaagaaataaagaagcatctttccacaccactagtgatggccaaaccaatcaatagagagacgtcatacatttagttagccatcttacaaaatgctattagtgctgcattggtgcaagaagagggtaaaaactagcaactagattattatataagcaaaaggttacttggggtagaaccgagataccctccactcaaaaacttgcacttagtctggtacatgcctctagaaaattatgaccttattttcaggttcttcccatcaaatttctcacagaccagccattgaaacaagtgctatcaaaacttactacatcaggaaggttggtaaaattgttgattaagttgggacgatttgaaataacctgtgatacaagggtcttcatcaaagtttaggccttagctaacttcttggtggaaggaataaac

SEQ ID NO: 189408 - DNA, 3169 bp, Cannabis indica
ttttttctaataaaaatggaatcatagcaagaaaaggaaatcacgaattccatgttgactcgtaaattactcgaatacggcccaagagtaaaatctacccgttgacgaaatataataagcccaatcacaatcatttggaggatataacacgcgctgatcgaacggccaaaaaataagaacatcacgatcttagcgcgagtagaggtaatggcgagtacaaaataccaggccaaaattctcccagaaccacaacggtctctccgatttcaaagctcctaaaacgaacccacgctttcccatactccttttttccattgtcatcttccccaagcttcagtattcttctgcaactactgcttcatcagttcactcaaatcgtttcaaaaccaccaaaaatcagtaaacctctgactgagtcctctgcgttttgtttttttccttggggagagaagaattttgaaccctgaaggttattatgcgaagcaatagaggtgaagaagccaggcacatcaatggcggtggtagtagcattgttaaaagtaaaactagaggtcctgctagtactttgaaggttttgatagagaggcggtgtttggctcctctgacattaaacgaagacgttaacggtcacgatgatcgtaatgtgaggagctcttgcagctcgtaccgcaagcttcctcagcttcagtatctcaaactctccgttttgaagctcgatggaactgtgtttggtgatacttttcattccttttcaacctctatttttcgaagaaataagaaaaaatcgtgacgatttaaataatattttggatatatattttgaattaaaatgcaaatttaaactatgattcatgtgaaatttgatctcacagatgtgtttgttgtgaaaaatgctacggtagcagagcttaaaaaaggggtagaagaagtttttagtacatcacctaaagaaggtcaagacaagatttcctggtaagtaaaatccatcaaatgaatattaatggttaattaggtttaaataactaaaatgaatcattgaaaataatttctgtgcctattactttgttactatttattgttaatattataggtcactagtctggggacatttctgcttaagctatcaaggtcggaaactagttaatgacaaagcaccagttcggcattatgggattaaagaaggtgatcaggtagctatagcttggttttcattataatgatctcaaagttttcattataataaattaaatatgactaagttactatgagattacaatgcatatatatggttgctaagtttcaaaaatgacataatcatactcaaataataaggcacatcatctgatttgtactcatcaattgatatagagacataactttgatttcataggctaattagtaaattttttcccttaattttgacatgtactaaatcgtgtctcctgaatttttttggccgttaaaaattcccccgaattattgagatgagattgttaaagttaaaggacttttgtctaattttagtaaaaaaaacaatcattgaaacaataaaattgaatgaaattagacaaaattctttaaatttaacaatctcaatagttcagaggaatttttaacggtcaaaaaagtttagggggcatgatttactagtttaagggaaaaaattactaattagtcttcattttattattcatcgtccatgtacagagtaacagaggtgagtctgagatttctcttgattgtattattggggatgttgggttctttatggttatggatatggtgggtcaacaggtcagaaaaagtttttctcatgttatgattttcatggtgttgttttagcttcaattcgtcaggcacatgaccatcaattatacaccattaaagaaaattagaccaaagaaagaaagtattgcttggaaaaaagaatctcagtaagaagtctcctttattgcttctttatctccttaattcacttttctatttgattatactgtgggctatatatgcttttgcatgaaaagtgttacaacaagactaagaaacttttttgacattattacagattgtcgtctggatcaaacgacatgaagctttgtattaagggccaggaaaatgatcaagataacaatttgatgcatcccattaaagaagaagaagaagatcaagaaaatgctgctcctcagtttaagatggctcatttcttaagaggtttactttcatattccaagttgtggggtttttcgagaacgagatcatcatcatcatcatcatcatcatcagcagtagactgtagtagtaggaccaaccgtcctaccagattctctctgcattttctcaaaacgtagtaaaatgtttaggattttaaggtcactacaagttggagaagttgaaacaaaaatagcttcatctcttattcaacaacgctctgaactttagtcttgtctttggtcccctcgaagaatttgtacattacgttatttagtcttttaaaaaggaaagaaaaaaagcactttcaattggtccaattagattattctttctttttcatttttttgcaatcgattagggactatttgtttcttgaaagaaagtccaagtagcataatgttattaggacaaatgataatccataattaattgtcttaaactcttaaattgtcctttcaaaggaaaagaagagaaaaaactcttaaaatgttgtatttttcctcaattatttatgaaagaagaaaaaagtatagcttaaagaaacaataaaatagactaaccattaccaaggacaaattagaaaaaccccattaagtccctccaaaattatcgataactcctaaaaatattgttattattatttaattaaaaaaaaagagtaaccttgaccgggtgctcaaaggtatataaatctgacacgttgcaccaaataagaactattatagacacgtgtcattctgagaacgttctacgttggagtactggtggcgtggtgttcagataagttagggtgcaccgaaatcccgtactcccttgcgtaaggtcctccattttcggttgcacaactaaaagaaaaactttgaatttctggatcattatttgaacttcgtctacggaatcgaggtattctcttctctgcttagtatgcttttatgtgtttggttactgagaaactgag

SEQ ID NO: 189409 - DNA, 1515 bp, Cannabis indica
aaaagtattaactataacttctttgggagcatcaattctagctttatccgtcacccaagtttggcaaccatgaatctcttatttttatatacaaataagcatataatcttatatatataatggtactaatgaatctcttctccattgatactaatagcaaaaatcacattacaaaatttgaccactgattctgaaaagtcccaaaactggaactcaatggatgctatagccacgacgacgaccttgccagagaacctaatcccagatctcggtagcccagaatggatgagcaaaggcgacaacgcctggcaactgacggcggcgactctggtgggcctacagagcatgccgggcctagtcatcctctacggcagcatagtaaaaaagaaatgggctgtcaactcggccttcatggctttctacgccttcgccgcagtcttagtttgttgggtgggctgggcccacgagatgtctttcggcaaaccactcctaccttttttgggtcagcccaatcctgctctggctactaactaccttcttaaacaagcctttttgggccaaataccgaacgccaccatggtgtatttccagtttgtgtttgcggccttaacattgattttggtgggcggggccttgttgggccggatgagcttcaaagcatggatgatgttcgtgcctctttgggttacgctatcgtacacagtgtgtgcatacagtatatggtgccccactggttggctctcaaagctgggtgttattgattactctggtggctttgtcgttcatttatcttcaggtgtagctggtttcaccgcagcttattgggtatattatattcatttgccattttaccttgttcggtgttgtttttttgaaagagaaatgttaaaagacattgtcaaagattctgtttaatttagtatcgggtcccgtaaagtttaatataatagtttttaggtacgtgtgtcttctagtgcctcataacaatgttcttttttagtttgtggaacaaatgaactaagttgggttacgtggatgcaggtggggcctaggtggactaaagacaggcagaggtttccgccgaacaatctgctattgatgttggcaggagcaggactactgtggatggggtggacaggattcaatggtggagatccttacaccgtgagtgccgatgcatctctagccgtccttaacacccacgtgtgtacagccacaagcctgctgacgtggctgctgcttgatattattttctttggaaaaccttctgtgattggggctactcagggcatgatcacaggccttgtttgcatcacccctgctgcaggtctacctactcgatcatcttctcaaacctatttaaatatgttcacatgacattcttaattttttcgttgtcaactttttataatcacctaacaaattaatcaaatgactccaaaataaaatattaaaattaaaataatgattattactcacctcaatacagggctacaacaaaattatggagctttt

SEQ ID NO: 189410 - DNA, 3597 bp, Cannabis indica
tcttttcggcctgggctttggacaatgcaccttctttcttctggataataacaggagcagcagctgtagtagacccaccgactcctgtctctgataggggaagaatggtggcggcctgatccataccatttcctctggaagcagttgtagaaggggccagtggagatggcaatggcaatggcaatggcagtggcaaagcagcattagcagttgtagttttctggtccgcattaagcattggtgcatttgtttggtcaacgttaagtgcagttgtggactccgaaatagctcctgttttaaacttgggttttggcttagcatgaattccagtataaagcctgggagttaagagtgaaaaattatgttattaaaccagacttgcaaagtttgagcccatttaagcttattctcaagattgtcctaaactcatacaaggtcccagaacaaattgaacttggacattctatcactgtttctcaaggatgtcctaaactcgtagaagaacccagaacaaattgaatttagatattataaggcaaaaggccggatgtcactataacatattataaggcggataaaaacgccagcaaactaacttacctagcaagtctggcatactcgtcataattttcaagaagcatcttcccagcctgctcattcaaggctgattctggaaacggctcaatcaacaaacatctaactacctgttataaaaaaagctcatgtatcaggatattacagataataaaacatcccaagcattttctgagacactcctcaaatgaacaggaatgcatgatctgtcaaaaaaaaactcacgataagaacatgtcgcaatccaaggcttggattccaatctttcttcagtgtgttcacacaaatctcaccattatttgcaatgttcgggtggaaaatcttcgttagaaagtaacctaggtagtgttgtgaaacacaaaaagattgaaagaagcaagttaataaaatgtataagtaaattattcttatttacaatttagaaaagtacgaaaaggtacagctggtaaaagatgatagaaacaaatggtattcagaatcgcttacgttcatactaataactattacagtaacaaacaaagaatattcatgttccgactaaagccagttttcatcctattttcttgatactggctagtcctgtcatgttaatgcatacctttgggaggagaatgcggaaagtcacgagataacaccaacttcattcgaaaaacaccattctcgtaaggtgttccagctgcaaggtgaagagtattaaatatcagaatactctaaattcttaaagaatggttgaagttttaaacataactacatacctgggccttcaatatcagcaaatatagttgaaaaatcatcatcattcaccccaactttaatgccatcgggaggggactcatcaagatttttcaattccttagcaagttgcttaattacatttgggggaagattctcattggtagcctgagaaaccatgggatgaagataaaaaagacaacaaaaaattagtaggtggtagaaaagttcaactagctcaaagaaaatcaaaatacatctgttaaatatgtaatatatacgctcaatatatactaacatatttaattctttttccatagcaaaacccacaacctctattcacaatatgcaaacatatctcaaaggcaataactgcaaaaatattgtactcatgcaacaactgtacatcatggcttgtatatccaatttaagaagaagaagaagaagaagaagataattaccataaccaaaggaacaacggaatccttatgcaaacacccgctggtgaattggtatgaattattcggcaatctttaattttgggccacaaatgtcaactattctgtccaaaagcaagaaaatcaaagctgtcatcagttgcaaatacaaatggatattttaaatcaaaaaccatgaaaagactcccgcttcaataagcgcttcaccaaaaatgaattaaaaacaaaacaaatcaaacaaatagcaggtaagagaagtaaatggctaaatgaatataaacttatttttttcttttaaagcactcaatacatggttaacattatgtaatacaactaatcaaactttcgaaaacacataagagctgctggagagcaagaagcattaatttgttatacagactagaaagttctcattgaaaaaccgtgcagaacacagttgaattttgaaaaatggaactgaataaggaaatgaagctatctgtttgtgggagtgaatgacttgtatgtatctccaattcattcaaacagctcaaccataagtcttccagaatacagcataaacactgataaaacaatctctgacaaactagaaggcattgtctctccctaattctacaagaagatataacagctaatcacatataaaattaacatctctacactatcttgtgcaaaaatgtaactgaagaaaacaacatggatatttcaatggcaaagcttcatatgtttaaagcgagaaagaagaccaagcataaggttatactaaaacaaggtagaaggacatgatgcaaaacaaagggttttaaaagtatcatactgtaggtaaaaaggatccaactacaatagattccagctttccaagtccattttaggggttaatcacatccccaaattaagaccataaaacatcagaaagaacaaaataactcttacatcttcttatattactaattcactatgctatacaaggagcaaaaagactcatctctctaactgccacgattatgcaaaggtttaaaaagaaagttatgactataaataagcttcaggtttgagaacaaaattcttacaaccccaccaccgcccaattaaaagggaaaaagaaaaaagaaaatgcctctaaagcaagaaaagtacctaagtacataaacccatctcagatcaaagcggacgaaaacccctaaatgcccaagaatcccgcattcccatctcaccaagaaagaatcagagatttccagtattatattcaaccatacccaaaactccatacttgaagaacaaatcaaatcgccaacaataattgactcaagcccgaccagaaaatacaaacacattaatggctgacccgaacaaaactaacccaaaaaattgaaagtattgaaaaccctatcaaaactcaccttagccgattcgcggagggaaagatttattagataagagagagaagagagttgggtttttgagagaaggcgatgatgagagagagagaggaaagagactgtattgagttcgtgatgaaccgatctctacttgaaatgattgaatggttgatttgaagatagataaataatttatttatttattaaattttgtttttgatgtaaaaagatacatttgaataatttattaagaaaatacatatacatttaattaatagttaatagaggtggaacgacgtggcgggatcagcatatatagtcgttgaactcttcgaaagtaattttttcccacgcgcactctgtttagagtgtaatgcgtgtcattgaaaaaaaaaattgaagagcgtctccttgagtctttttttttttttttt

SEQ ID NO: 189411 - DNA, 4754 bp, Cannabis indica
gatgaataaactcttcagttattatatcatttaaatttcttctaaacttcaaattgcaagagaagtgatattacaaagactacttgcaagaaaagtgatatttgaaagtttctaataataaagtaacaaaatgtgcaattagttatcatcacttaaaactcaggtctgttgaaatctacttactctcaacatgtgcccgcacatatcctggttggggtccacaattttcatgctccctagagcgaaacaacacaactgcatgataacaaaacaaatattgataattttttttcttgataaattatgcaaagagaaggaacaagaaaaggttcaacacacaatgagtcgatgacaataaatttcctaccataactcccatcatcatttcgacgccaataacggacatagcaaaggtcacgaggccacacagccctgcaatagcatagaaatatctattttaacaaacttttacaaaacatatcagaactacaaccaaatatacatatccaaaggtttgagatgaacttaatacaaaataaaaaataaaaaataatccaacaattcagtaatcaaaatacaaaattgtactgcaaaataaagtttaaaatcaaatatagttacattggaaaccaatccagctgaagtctatgatagagtattgctgtgtgaccatctacctcctccactaagctaccatactggaagctgcagtcccacctggaccgataaaagaacatattggaaaacaaaacacaagatatatcataaagtaactacttagtactaattaggaattgcagctatacaagaacaactaaatactagaaattcagtatgtacgcaagtccaaaggttcaaggttataaagatgaccttaagtgcctgacactttgattcacaatcgatattaaaacaagtcacagcattatggtaaaccatctaattatgcacattttcacaaaccatgctggcaacaagtagatctaactttctaaataatttaattagatttgaaacatttttaattaaatcaaacagtacgtataaaaaaagtaatgagctggaagaagaataagcaatgcatagaataaatgagagacataaccttctctatgacttaattttaataaatcaaccaaatcatattaatagatagcaattacaagggacggaattttgaaaagttctaactgaaacaggaaaacacctactcaaaccgagttccatccatgctcattacaagctcaaatatttgttcacaggaagcctctaccacaccaacggccttcattgctctgctacagctccttggctacatatatatatatatatatatatatctgttaaggatggttgtaatctaaaaaaagtccaatgcacacaaaatctattatgaagaagaaagaaaaaaaaagggaagaaacacatacaaggtattcaacctcaagaagctcctcaaaaattcgaagccctgacaatattgagacacatacgatagtcacatcatcaagtgtctagttcataaagattgcattacttgaactagatagttgcagaatctaatatgatataaagggtagatgagggaaaaggtattcaccattttggcattgaagaagacgccaaagctttctagaaaatgcctgattgttaatattctgatttgacaaatctgaatctatctcccttgtccaatcaaaaatggactctggagggcctgcaatttacaaaaaataaataaaataagaatgaaatttaatactacaagtgttaaaattagaaaaagataaataaatttagaccatttccaattgttgttcttcgtaataaatttggatgagcagcatcatcttcgtcttcttgagcactgaacctaaagaaagtcgaaaaatgttttaactcatcatgatgtcaaaaatgacaggcatttttacaattaaaaccatacaatgaagcataaaactaagaagtaaatgaaacaactttcaaagaaacatggtaggagtcactgagcaacttgggatgtcttatcttattatagatgtttactccaaaagattcttaattaagaaatatttaagccaatacaaagaagtgattctcagactccaaagtcacttatatgctgggaccagaaaagtatataatcagttaaggggggaggacaatgaacaggttcagcaattcaatagcccagaaaatgttaaaaataagaagttccgatcttcatttcacaattacaacagtttgcttggttggtcttttaaaaaatatagaatagctatttgtctctcttcaattttgttaagtgctactaaattgactctctcttctccctctcacaacttttcactctcccttacaaaatttctttcaccattttgtctttccactttctctcctccctctgcacatttcttatatctcttattgttgtattctcttcatttccttaaacttaattatgtattaatacaagaattaagtttttgctgtccaaagaatatttataccattttattccacagctaatctaaaaatttcaacagaagtcaatttttctttattgtcaatctattctcattattgttacttttgccattccccaattggagccacagcttaagcttgtgaataagaaacctcatgataaaacttcggataacttttcctatgaatttgtttgaagtgcaatggggttttaaaaactgtaattatagtttttgtttctccttgcattattttcctgtctttcctttctttattttcccaaaggaagatagcttatcaattatatatttttaaaaggggtttcaattttataacaaaaaatgctgaaggtgcatccaagtggggccaactataccaccagggtagatcccattaccaaacataattcacaaattatagtcggttaaatgtgaattttttaattatacattttaactgatatcatgtagtttaaaaagatgttgcaatatggcgtgataacctgatatatcttacacacaaaaggaaaagaaaagttcctacataccagcataaccagacataaagtgcaaataaagccgacacttactgactttcgtgatcagacgatgaagcagttctcccattgtccattccagatttgtattcaaaagaagtatacctgttaccatttgaaacttctgaaccctgatgctgcataaactagtacacaatcagaccaaactggatcacagaatcgaacccagcaggaaatatgcattacaagaacatacatataaagacaaagaagagaatagggaatcaaacaaacacctacaaaaggaataagttactaactaatatctttactctggaccaacacaaagaaggcaaattttggtgttaggcaaatgaggataaagtaaggctcaaatgggaaaggtctcaagaaaacatacctgatcaattacaagttcaattttttccttccagatcagtgcctcttggatattaaacgctgccatctggaataagatcagaataataaagaaaataaaaaaccaatagcacttgggagttggcattttagagaactaataccatgcataaaaccaatagcataaaattaaaaaacatagaaggttattttgagaaacaaccttctactgatgcaaacaactgaggaaataaagcacagcaagttaacagtagggaacattttctagtattaagattatttgaaattgtgcatgtcaacaatgtaaaaaagagttggagttcgaagtgaatttgcaaaataataattatacaagaaatctctggtcatggtatttagtttaggccttttctattttgggggaatattttctctattacacttcagtttgtaatttctgcagatatttctacaggacatcagtttcttgtgaaataaatgttaaatctaaaattttaaccgaaatcagctcccaatttcatcacaactctatactactgtaaactttatatatactttttcaaaaagagaaaaaaaaagcagtaaaaaggtccatggacaattcaagccaggtgcaagaccattcaattacaggtcgaattcagcattaatccaaaagatcaacataaacatgtgcatgcccaaatgacaagattgtttaactatagtgcagttaaatatatagttgtcgattaaatattcctaattatacagagcataggaaatttcaacatcttgactgagaagaaatcacataccgtaatccgatggtatttttccttcttgttgtatacagacagaacataaaccatctgcacccaaaaataatcaatatcaaacaaatgaaacaaaatacgcagtaaaatcacataatatctaagagtaacactaccatacaaaacttaaagcaagacaatatcaaactttaagaatattgtaagatgtaggcttggatattttgagaatattttactaggctcactaataccatataagtagccattactcaatgcataaatggagtaaaagatgactaatgacaacttacagtcatatgaactgtgtaggacacaaatatgcaacacccaatctatgcccttaagaagtaagtagcccaggaaaaggtttgcaatgtgcaaataaggtacatgaagaatagtggcttaatgttggacatatatacatgaaacaacaactattgtttcaagaagaatctcactttttcttttactccaaacaagagaataaaaaaaattggaaatcattttttgtttctttttctcaaatt

SEQ ID NO: 189412 - DNA, 1743 bp, Cannabis indica
gtctaatctgtctgcttcacaaatcagttcactgaagatttcacttttttcttatatgttcttttatcagctactatcttattcttggctttattgtagattttaactgtcaagtcgggggaagaagattatcttgataccacttacctgttaaggcaagcttctcctctaatgagaataaggtgaggctctaaacctgaatgctccctgagttatttagtttgttttggaattaatctttgcattgttgtataggtttgacaacgttgaagaaccaccaaatgttcccagtaacaagaggcagtttcaggctttgtccaaaaataagaagccaaagagaatgaaattcagtggggctgatacttgtggggtactttattcctcccttgcatgttaaatttttctacactaaacacaaaatttgagtttttttttttgtacggcaaacagaatttgagtttaattactgtgtagaggttgtacaatatcaaaatagtattctttgtggtattaagcgtttcttttccactttacttggctgcatggttttaaattgaacctaatgttgggattccttattgcctttttattgtgtttgcttttagatcgaagaaggaaagactgatgaagatgaccaacacaccactggggaaggttgtggaaaaggtactttgaacctacatggttctgtttttctgtttatgtacttgtagagtttctttttgatcatctttcttttttataacagaggacacaaaaatcttcatatcagaaatatctgatcgtgcaccattagtgtcaagctctgttgacttagagagaaattgtgagatttggcaaaattttgctaaagctttttggaataccttgaagcagtataaagaaaagttgaaggtaatcagttaaggttgtctactatctaatttaggggttgtaatcatatgatatctgaatatggttgcaatttcaactatttaattaaattctattttgccatgattaggtggcagaaaatgaaattcagcatctcaacgaaaaccttaaggttgaaaaggctagatatgttgtgctgaagaagaagctaggaggtgcagagtcatgcagtaactcttccctgcagaagtctgtggaaattgctcttgttgaaacagggactaatgtcaaccacagtgggaagttaaatagacctgatatttgtgattttgacaaggttttacatacttatctctgttctgcatgcttcttcatataaatagttcactcccatatcagtggtgtttggtttggtgaaatggaatagtaattgtaatagcaatgtaatggaataaaaatggtaataggaattgattgttatgtttgattgaacatggaataaatggtaaattgacaaaatgatccctagtttagtgagaaaaagtattaaataaggataagagagtcaatttaagtaatggcaatgaggattcatgaggtatttgagtgtaatcacttttcatataaatgatgcagtagtcattacaatggaatgccattacaagagtttaaaagaaaaaccaaacatgctttccatttatgcagcatctatgatgttggaaggctaacacgtgtactgaatttatttattttcagtcaaatgtggacctttgcccatccgagtgcaacagtactccccgaacttacgactccatgttgacacaggatccggttacaccctctcgggtaaagatagatatttcaacgcag

SEQ ID NO: 189413 - DNA, 4938 bp, Cannabis indica
aattcattttctatttctcaacttggtatcatagctctggttccattttttttcctttctttattcttcgaagattcttgaagctctcatccatggcgtcttcttctgctaccactgatctgaaggctcgactttcactaccactgatattcctaaagttgcagcagaacaagtgattcctcatcaacttgttcccctcaatctacgcctcgatcgaaacaactatgtctactggcgctctcaagttctatctaccgttcgtgcgcatcgccttgaaggattccttactggttctcgccctcgcccccttgccactataccagatctagcagatgccacaagatcggtaccaaatccagcctttgatgactggatatacttagaccaattcctcatgagttggctgtttaattctatctccgaagccatgttaggacatgtagctcgatgtgtatccgctgctgaattgtggaatgtgctaattcagcttctgtctaatacatctcgagcaaggattcttcaacttcgaggcatgcttcaaacaataaagaaaggatctacaccagtcgatgaatatattctgaaaatgaaatgcttggctgatgctcttcttgcagcaggacatcaaatcacagatgatgaactcatcctctacattcttggaggactaggtaatgaatatgattctgttattgttacacttacttcaaaagaattcattactctacacaaactcaagaattgcgacttgagcaacaacactcccctactaccttggatcttcacaatccaacaaccaattatgcctccaagaaaggctctacagcatcctccagtacaaaaaattccactcgtggtagaggtgcttctcgaggcagaggtggtaggacaaacaacaccaataatcgtggtagaaatagaccgatttgtcaagtctgtggcagggctggtcacactgcactaaattgttatcacagatttgatctaagctaccaagcagaaggacaatctactccctctgaaacatctatggaggaacctctggccttgcttgcttctgcaactacagttgccgatcctcaatggtatctagatagtggagcctcgcatcatgttatttctgatggttcaaaactcaatgatgccgtggattacaaaggaaaggaaaattggtagtaggtaatggagcctctctcccaattcttgctgtaggttcttgttcaatctttgcctttaaaccattacatttacataaagtcttgcatgtccgatccatacacaaaaatctgatcagtgtatctcagtttactcttgataatgacattgataatttgttttaatcctctcaatgttttatcttggataaggtcacgaggaaggttcttcttcaaggaacacttaaacagggcctatatcagatcattgaatctgcctcctccctcagctcatttagcacttaataaagcagatgtaaaatttcaattcctttgattcttattctgttcctagctgtaatatcaggactaaatcttgtaaggaatccactcgaattgatgcactttggcacaatcgacttggacatccatctcatgtcattctcaataaagttttacattctatgagtagtaaatgttcaaaatctgatctgcccttttgtgatgcttgtcaatatggtaaaagccatttaatgcatttctcaagtgtccctttaaaaacaaatcaatgtctccaacttatacactctgatgtttgggggaccctcaccccatccaacacctgaaggttacaagtattatatcttgtttgttgatgatttcactaaatacagttggatttatcccatgaaaaacaaaactgaagttgtccctattttttaacctttcaaactttgtagaaaaccaattcagccttaaaataaaagggatgcaaactgattggggaggagaatatcaaaaattgcagccaattttacaaaaattaggtatccttatcagacatccatgtcctcataatcatccacaacaaggaacagtagaaagaaaacataaaatgtcacagaactgggactatctatgcttgctcaagccaaaatgccattaaaattttggtgggatgcatttgtctcgactgtttttcttataaataggctacctacaatagccaatcattacaaatctccttatgaaactatctataatcttgtaccagattaccaatttcttaaaacctttggatgtccatgctttccttttcttagaccttataatacccacaaatttgaattcaagacttccaagtgtgtctttcttggatatagtccatttcataaaggatatagtccatttcataaaagatatagatgccttcattcatcttgtaggatttaaagtgcaaggagtgtgaactttagtgagtctgaattcccttattccactttattttccaacaaatctcaatccacctcctttgtcattcacaagaatttattagcatcaacatttaatatacctatcctacatagtgactcccaaatcagtccaccaattcaatttggtactctaccaacacaaacagatgacatcacccctcattctctcgctccccaaagtctcacaaaaattccatcaacaaatgacaccaaaaatcctactgacagcaaccaaatttcctctgttgcagacaatattgataattctgcagataaatcaaatgaaccatcaaatgccacagtaattccagccataaatataccaccttctccacctcagttgcgtcaaagacaccatatgcaaacaagatccaaatctggtatctttaaaccgaaagcctatatggtcacagcctcacaacaacaaatttatgagacaccatgaactgttaaacaagccctcagcttaccacaatggagaaaagccatggaccatgggaacacaactcttaaaaggaaaaacaacatggattttagtgccttattcagatgacatgaatcttttaagcaacaagtggatctttagaaccaaatacaacaaagatggtagcttagacaaattcaaggctcgacttgtggtgagaagttttcaacaaactcctggccttgattttaaaaatactttcagccccgttattaaagcttcaactataagaattgtgttttgtcttgctgtcacctttgaatgggatattcagcacattgatatcaacaatgctttttttaaatggagatttccaagaaaaggtatatatgaagcaaccaacaagttttgaagatccaacaaagccaaatcatgtttgtctacttcaaaaatctttatacggcttaagacaagctccaagatctttgtttgacaagctcaaggtagcattagttcaatggggttttaaagaatctgtgtcagatacttccttattctatatgaatatcaaaggtacactacttccaatcttggtttatgttgatgatgtcttaattactggaggaaatgcagctgctgtagccaagttaatttctgatttgcacacacagtttgctctaaaatcccttggtttagtaagttactccctaggatttgaagtctacagaaactcctctggattgtatcttactcaatccaaatatgcatgtgatctccttgataaaactcaatttgaagatgcaaaagcttgctccacccacatgattttatgccaatagactgtctcttaatgatagcagctcctttgaaaatccagccatgtacaaaagcatcattggggctctccaatacctaacattgactagaccttatcttgcctataatgtcaacaaattaagtcaatttttaaaagcacctacagacaatcattggaatgcgtgtaaaagggtgcttatatacatcaaaggcacaccgcatctcagattacacttcaggccctcaaccttgctgcaccttgaggcttactctaatgtagattgggcctcaagcttggatgagaaaaaatctacttctggtttttgcctattcttaagaggaagtctagtcaattggagctctaaaaagcagcaagcaatcgctcgatcaagtacggaatccaaatatcgagccttaacatcagcagcaactgaacttgtgtagaccacctctgtactcacagaacttggaatcagtttgcataaacaacctcccacattatggtgtgataaccaaagtgcccaagctcttgctctcaatctttttttccacacaagaacaaaacacattgagctagatatccattacattcgaagtcaaattgcagagaaaaagcttcaagtctgttacattccaactgaagatcaaactgccgatctattcaccaaaccattgtcttctcctaggtttcagtttctgtgtaacaagctgtatcttgaacataccaaatacaacttgagggggggtgttgaaggaaacagttagatatatatagttagttgtggtagttatgccagttgtgcgtttaggttagagtttgttactctttacagctggcatacaattagtgtaacagatctttatcgccttgtattcaatctttactttgcatgtaaatacaattcacatactgagctgagagattcaactcaagctcatttcaattcattttctatttctcaactatagaggtggtcatgaagtctccatacaacgtgatgcttgaaagactagccttgtatgacctttgagctatcttgtcaatataacacttactagtcaaattcccagtggaaactagtatcggttgtctccttggcaagccacgaactgcccgcgagtgttacaatgcttagttaactctcgccaagaagatctcctctattcttttggcaccaaggaagatgggcaaggcctcttcagtaaaaaccaagaaatctggagctgaaaccacagagaagatggatacaacacctaaagccacttgaag

SEQ ID NO: 189414 - DNA, 2825 bp, Cannabis indica
cttttatttttattcttgtgatgcagattctcactcttttgcaatttggaggatatactcttgtgaggaactcaagtgacctgttccggagttttgggtttgatacacagccagtacttattggacttataatatttcaggtacttgcgtagaaaagagtagctactgtagtctgtgaatgaaggaagaaaaaaaaatcctgccttgaaggattatgagttctatgcttaactcattgctttttagtttcttgacttttactgttaatgtgtggtatgtatatatataactaaagtgtagtttttatgtacttgtgtgagaatagatcttacgacgcatttttttaatgccctttaccagaggatgctttgttcatcgaccttttattgatatgccattgccattacatttaatattcatgccatcactgaagtcaaaagtacgaattaagagagtgtagggctgaaccagttacctgttgaaggaaattggtgaaatatacgtgggtttactaaaggttttgcatatgatgcatgcgtaattgtcttggaattcttcattctgcattagcattagaaacagaaattctttggttttttttttttcggctggacgaaaacttctgtgtgatatcataaattttttacatattcaatagcacatgatgtgtttcctttgcttaactcatttccagctatatatagatatatttatatgtatgtatacattgaaaatacaaatttagtgcccacatgctgagctcattatttacttatccttgaaacttgttccattcttcaacacaaccatggatctttcagttaatgaaactgcaatttcaatttacattattcagatataacaaagttatggctgacactgtgcaacttatctttttctggctttgtttctggcagcacactgtaatcccgctccagcatctagttagttttgctcttaacctggtcagccgatcttttgaatttcaggtgagttcttgtgagaagggtacattgtcagtgtggcttttttcttcttcattttgatgattttatatactatcattgttgcaggctgatgcctttgctaagaagcttggctatacctcctcacttcgggctgctcttgtcaaactacaggtattaaatttttttttcccattaataatttaatagattcgtgctctacacttgggtaaattactgtttcaagtagtttaggaagtgttgatgttccaaaagtgggtttgttgcctgcgtgtatgtaaatccagttactttatttgagcacctcaattaatttttgtcattttagacacatggtttcaaagtttagcccatgcaatttgcagcactaaatagatgtcttggttttgcaggaagagaatctgtcagccatgaacactgatccttggtactcagcttaccactattctcatcccccacttgttgaaaggttggctgctcttgacaaaccagataagaagtcagactaatgtgggtaacctttggataacagcagaaacagcttggttattctgaaccctaagaaatcactagctttatctttatggggctcacagttacacatcttgcaagtatcattactataacaacacactgtagttgaaagtgaaccaagcacggataaaatgagcaaaacaagtgagagtaaaagaaataggggaggttatctataggcataaatcattgattatcatgtatgcttgaatgaactaaaattccaactgactttgagcttacttatccttgttctgacagctttctgctatatttattgtagtttcttttcgtggagaattttttttatcatctaaatgctataactgtactttggaaagttgcaagtgttttctcttatgcatagtattagttgttcttttcacctcaattttgtcctgtaataatgtacatattgactgacatgaaagtaattagggaaacacattaagtaaaaactttattgaaaattgtggttggtcgatggtcaccactcttaaaacactaaaagagctaacaaatgtgtgggtcccaaacctggatattttttttttcataaaaaggacgaatagcatttgtggctccaatagaaatgcttgataataatgtaaatatatattatatgttacaaattttatgacagcctttaattagttgtgaaattttgaattacattttcaattttatgtttgtgctcaaatttattttcgggatcatttgtaattggctgataaagttaggtcattagcttgatagtttaaactaattatatttagcaagtaatggtgttgatattattaaagtcaattgaggagtcatgtgaagggaagggattcattgtacattttcagtattattattgaactgaatttatttttattaagaataataaagtatgtgaaatttcaattaaaataatatgcaatattccaaatgaatcattacaaaatctcaaagtcatatgcatacatctttcttgttccttcctacccacagaccaccaaacaagaataatcaactgctttgacaaaaattacaaatgctgctctcacttattattagggaatataatttaattttatataatgactatgctcaacggtcaacactgtgttctttgatcacagtaatcccgtgatgcgaaaacgtaacccattactaatcccagattatgagattaatgtgcgggtggacccgccttcaatctcacgtgtcctcaaaattaatactttatcttaatatattttcatcaacatttatggtaaataacatatgatatagatatactacaattttttttttttt

SEQ ID NO: 189415 - DNA, 2634 bp, Cannabis indica
atctgactcttaatttgttggggttgaataaatgggtttgcttaaaaagacagtaacgtgaataaaaaagaaaaaattagtattaatttgttcgggtggaaataattcttttattaacccatcaatttaagaatgaaatcaaatgttttaaaaattagtgagattgtatgatacaagaccattttgttcttattcatttatttcttaagaaaaatattcaacatcccaccaaacagtcatagatttgtttcttgaccatacaaaaaggaaagtactattataataaaataataataatataaacagtctctctctctctctctctctctcttttggagaaaattgtgaagaaatttgcagcaaagtgttcatatggtttgtttgacaagtgttgagagtggtgactcagatgtgtacgtggtggagatttgggcatagtattaggctagctgcttttttttcatggcttgacaaagctgtatattataacatgatttttactgctggcattttctctttttctttgttctcattctcaagatcattactggcttttaccacttttataatgatggattcacacacacaaaatcactcaagaatgaaagtattaaattatggttagaagtgtcacttaaaaaaaccactcttttattgtaaagtatatgttcaattagggtacatagctacactagcactagtactacttatatatatgtatgtatatagtatatggtcacacttaagtatatgaaacttgcattcaatgcattctcttctacaattgaagagtgggtgtgtttaagatacaggatcattaagttagcccaaaagaaaaaaaaaacaaacaaaccatgtaatgtgttataatatatacatatatatatgtcttaagggtttgaaattatcacccaaatctatgtttaactgattaaaatcacattcttcaatttcagggattgatgccatatcaatggacatgaaggataagaaactcacagtgattgggacagtggatccagtaaatgttgtgagtaaactgagaaagtattggcacacagatataatttcagttgggccagcagtggagcccaagaaggaggagcccaagaaggaagagcccaaaaaagaagaggctaagaaagaagaaggtaaggaagagccaaagaaggaggaggcaaagaaagaggaaccaaagaaagaggaagaaaagaaagaagaaaagaaagaagagaagaaggaagaggaggataagaagaaagaggctgctccggcaccggcaccgccaccaccggaccctgttttggaacttgtgaaggcttatagagcatacaacccccacatgaccacatattactatgtgcagagcatggaagagaatccaaatgcttgtgctattgtttaaaaaaaacaataatcccaagttttttcaagagaggattagttaatcccaaaaatattttgagggattggtgaaaaaatatgttttgtaaggcaaaaagaaaaagccaaactaagagaatataggagctctttgtatatacatggtaatgcccccctcattgaaaaatgttcaaaaacattagtaatgtgttgtgtagagctaaataatataaccaatgtttttgtttttttggtttcagagaatataattgtctggattcatgtagatgtgtttaactcatattattaattcttaagaatgatacaaaatactaattaaaggaaaatgaaaaaattaagaggaagtagaagaatgggatgcttctatttgtgttgtggggcctaaatctagtaaagtgatgtatagtttcacagtgatagaggtcgtggtgggacatataaaattaatatgtatgctttccttttctgatatggagttatatatgctttatataaattaagtgctcatgttgtatacgaaatcgaaggctcataagtcatagccgtcctttgaagatttgtgggtcttattgagttgtctgtgtctttattaacacaagcaatgggaccatgaaattcaatggtcggtgtagtaatcattttttttattttattatctttttctttctttttttcttatttttaaattttggatggattaaacaattttgctgatggaattttctgtttgaaaatcatggcttatttgaatatttatgaatcctttccaagctatatcttcttctcctcaagtttatatgtgacttgggcatctctacttttcatttttggcccctatttctttggtgtacaattaaagcaattatttatgtcatcgaattctataattttgttttatagagtatataagattcccatattatcattttcataaatttcgcttttaaagttgatgggagttaatataaattcacattaagctgcttcatcattaatgttgatttatatatattagtgcttttatttaatatgtaatgatgcatgtgatagctattgtttgccacatttttatatataaagggcatgttcccttccatacatatatattctttcatttaattatgcaagattcagcagccagccagaataaaatacatataaaatgttctctatataaacgaatgcttacaccatatatcaaaacaagcaaaagaaatcaacaaaagaaaa

SEQ ID NO: 189416 - DNA, 4337 bp, Cannabis indica
ttaggaaaaaaaaaagaatattattaattgtaatacacatgcaaagtactatattgttattgtaattatcagcaattacgtactataattaattaatttttttggcaacaaaagtacgtagagagatcagagagagaagttgtgccctaaaatagtgtgtttaataatacagtaattaatatgagtgaagttcgagataaatatatacatatataattgcttattctctctctctttttcattaattagtcaattaaaatataaatgtatagtctttgtagttaggacttaggacttcaattatgcaataattcacagacttaattatagtgagtttattgtacattaatatatatagttatttttttttaaaaaaaaataaacacatactttagttcttaattaattatgctgcaaaatattaattattatttatttataggataacaacccattaatttatgtccaatgcccatgcccacgttgatgtccatttttaatatttctatataatttttatttttaatataaatataattttattgatttagtttaggctaataagtaatttttttccccgaactttaacatgtactaaatcgtgctccctgaacttttttggccgttaaaaattcccgctgaactattgagattgttaaatttaagaatttttgtctaatttcattcaattttactatttcagtgattgtttatgtactaaactaagctttccagactttgatatttaccaaaatttgcacaagaccaatcatgaacaatatgatccgcccacccaagagtggaggatcactggacatgggaccaataaacatctagaaatctctcgaaaaagagtccctcgcaaaagcaacttgagtaaattgataaaacatcaataacccaataaggttcacaaataacctccatcataataacaacttaaccctattaatctaacagggtggtgtaaccataatcaaaatagaaatagaaaaataattgcataaagtaaccaaatgcacatacaagaccatagatcaatagatctacaccccaaatcttcacaaccacatatccaaaccaactcataaccgatctcaaaccctttgattaaaactgcctacaaacacaaaaacactttcaaatctgcaaacacaagaaaagaggaaaaattacatcaaagaccatctcaaatggcgcaacccctccaaacatgaccaacacccaatcaagaaaaggcaagtgagccatggaaggctaggaagcacaaggaatcagacggcgacagatcaaaatcccaattcttcaaattgacaagtatatttaaaaagtgttaatatcatttttaaatgatcgagacttaattaaagttgttgattaattaaaatttatagtactatatatgattatttttttataaatacgaatcaaatataacttagcaaaaatttgacaaaaacgcatgaatcaaaatggcattttagcttacaaaatattatttttcttgatttttttttcatgtatatatataattgattaatattgaaataaataaataaatattatgttttatttcaaaaaaaatcatacaatattgtaaattatatattttggaatggaaagttcatagttttttcccttgtgacactatgtccaaaatttgggagaatcataaaagtacttggccctaattgtcttgttattgtttatttgttttcatatacacagaaaatatagattaaaaatctatgtatgggttcaatttagagttttcctagccacaatatttttttaggttggatgtgacttgagatatgaagcatgtgagttttttgtactattaatccctatccttatataaataataatcctaattaaaaatccatctcactcctcactaacttgatgttcattaatttaaaaccaaaaagtggtcctcacattggccctataattaattaatactacataaaacctttttttagtcccatttcaactcttatgaatcataatggctcattcaagcctttcttttttttttttgtaaaggattattttatgaccattttttttattattcaaattcttaagctatcgatttttttaattaaaattgttaagttgtacgaaatttgagttaagttatagttttactattaattatattttgatacttagtagtttttgctcataaattttattttattttttgtcaaaaaaaaggagaaaatattataatcccatattttgcaaagtgtaaatatataaaagctataaaaattacccttggttttttttttttaaatataattaaaaaataataaatttgccctcctttgtttatgatcttaatcataatatattttatgggccgatttgaaagaatttcacaaaaatgtgttacttgggccttgatatatttcaacagaaaaaacttgggctaaaaagaagggtctttgtcaaaaatacaaaagggtcctttttttattcatttctgtacaattattgtaaatatatacaatagtaacacatattattagataatactatacactataatgatgtaaaatatattccaaaatgtaaaaaaaaaatcactccataatcaattgttttttaaatgaaggtcattattttattagacgattaactactaagcttggtaacaattcaacaagaatattgtgtaatttgaaaaagcgattagggtgagatatggaggctctagcgaaagagtgagccactatatttgttgatcgctttacaaagtgaaaagaaacattacgcaaagcacataatgtaaggccttataatcattaatcactttgccaaacatagaaatcatgaccatagaactacagatggcttgaaccactaaaaagcagtctgtttccaatgtcacatgaggccacagatggtctttgatccagctcaacgcctcacggaccccaacagctttggccacctcaggagatatcgaaccttggaacagctttgtactgccttccacaaagacatcacgggagtctctagccacaaagccaactccatagttagaggtttcgcaaaacaccgccgcatcgacattaactttaatgctattaatacctagagcaatccattgctcaacctcccctgctatgtaaccagtgaacaacaaatcattgcttgatttttgagcaataaaccattgataattaagatagttcattgtgaaaccacaatgctctcaacccccatgtcttgttctgccatactttattattccttgcgttccaaattgccataatcaatgttaataacaaatgaaattgatcatatttgaaaaaaattaagtcttgattatgcaaactgaatctaactaattaatataaaacattaaataaaatattaagtagtctatttcaaaactaaaaatataattaaggcaagctgaccaattaataaaacataatctatccttaaacaacctgaaacataccaatccttaattgtaaggtttttatttccttacacaaatattgttatttatgttgatctacataaaaaaatgttgttttgttttgacaatattatgatcataatatctcgaactcactctatgtgtaatgtgttatacacctcaattaattaagttaaaaatatttattatttataatatacttaatatttacttaaataaaaatttaataagaccttctaatttttattttgaaccccaaaatatgtgggctataaatacgggtctagtctagcccgccatgtgcctagagctgacctgtatataaagtaaatgttattatgaaagctcaaatattccagctcaagaatattcgctgtggcgtttggttagagttaatgaagtggaatggaatagaaatgaaataatcttcattctaatcatttgttttgtttattctaatggaatgacatttctactattttagtagaatgactattctatttagaaagaaagaccattcaaatgcataaagagaaaaaaatttaattattttttatgtattttaaattttattcaattctattccatttctattcctatattctcattcccatttctattcttatgttttcatccctccgaaccaccaccttaaagatacgtttggttggggtaatggaatgaaatagaatcgaattttatattattcttttatttaattagttacattttaaaatacatgattgatttttactatttcagtggaataaatattccatttcgatcgaaataagttgacacacaatttcatttcaatgcaagataatacgtggataatgacgatatttaaccgacggaggttccaaaaatataa

SEQ ID NO: 189417 - DNA, 733 bp, Cannabis indica
gagagagagagaaagacagagaggatagagagagagaaagggttgtagtaatagtataagttatgatattgttgagtatagctcaatcttagctgggtttatgtagaatttcaatatgggaacgtcaagcacatttcgtttttctcatttaataaaataaaaaaggtaataaaataatattatgttagaagagtcaaattaaacttatgtatgactagacattggtgttacagtcgtggcttttattggaagagaataaaaaaaaaaagacccccactcccccactttggctacttttctagtttcggaaagtaggggcaaaactaaaaaatttcttcttaaattattcttacttgcatggtttttatattttataattttttttttgtagcaatttctttttattattattgttattgcaaaaatactctttaaataattactaacatgtttttcaaatacagtcattttattatggttttcttgttttgttttgttttggaattagtatgtattttaatttttaattcattcttatcttttctaaatatatttactaaaaactacagctatactaactatatgactaatattttgaaaaaaaaaagaactgtaagaataaattgttgattttgtatttatcataaggatatatattatagttaattgttaatgtgtgaaagtagaatatcatataagaatgagctattttttctgttgttaatttgttttg

SEQ ID NO: 189418 - DNA, 4622 bp, Cannabis indica
agagagagagagtgagagtggaggagttgacagttttaactttggaaaaagaggcatctgaaactgagtcaaaaaccaggagctgccaaaaaggaggtaaggcgggcccaaacactctcaccattaaccagtcaacggtgtcataatcactatgctctttaaaatttgaatcttttaacacgttcttcttttcatctaatcacaccacatcatccccagaaaacaaaacccatcaaaaaaaaaaaaatccaatctttgttttttcctttttaatccctattgttttcttcttcttcttcaaattggtcttcgtttcatcacccaaaactcaatcaacagcagctgaacaagcatcagaaacagaaagtgaaggaaaaaaaaaaagtgggtttgttatttttttttaaaaaaaagaattaatttttatgttgtagaaattaaaaagatggaattttgagtataagggtttgttcaattgttctggaatggttctttcattgatgggtttcttttataatcttttttattacagtgtacccaaaagtgaaggtgagggaacatacagaccaggatgatgatcaacatgtggttgttgatttttgctcaacaggtttttttttctttcatcttcaacaactatcaatctcttcttttgtcaatttttaaggattcagtttttcttttgtttctttattttcaccaccttaaattgattaataatagataaatagaatcaccaaaaggatcagtctctttggtaagtaattatagttgattgagttatttgagtctttggcaaccatacatatgcttgatctttaacctttttgccattaaacttgggtcaattagctgtttattatattaaaaataaaaataatttgcagcgtaaatacttaattttaatttttagttacggataaatttttatatttctagaattttcgtaattttcgtaaatacttagtgaatgaccacataagagtccttaattggttaaagtaataattaatattttattttttatttaaaaattcatcaaatatagcaagaagaaaatgactcgtgaacttgacaaacttgacaaatagttacggaagtttcagaaatataataagtattattgtcgttaaaattaaacaagtatttatttataattagaagttaaacttaggtatttacaccaacaataatcatccgaatcttttactcaaaaatgcaaaattgatgtttgactatgtcatcattatatggcttatgatttgcagtgaaggagtatgaagaagatatttccccaccctccatagcaaaaattccaaagtcttacatacctagtagtataccattttcttttgatgaagacataatacctaatatagctatgccaaaggtttcagttcttaaaggttagtttttttctactttgtcaccttttattctcataaatcttctcacatcaaaatctacttgattaattaaggacttataaatcttctcatatcaaaatctacttgattaataggagaagagaaatataacaatattgatgaagactgtaagcacaatattagagccagttcaatacctcgtccaagagctgtcttatctagtcctggtaaagtttgtttttttaagcaacatttcattttctttcttaggcagttttatgagtaactatcattttagacttgtattttacaaaaagtatcaatcgaatttttcgacaaatgggaccttttatttatactttgagcttaattttttatcatttttttaaatataactaacctaaaaattagtttctaatacaaatagatgcaacaagaaaaatgtgcaaacacctcaaggttcggttattattaagttttaatttgacaaaaattaaattttaagtactattattttgtatcatttaaaaaatacaaaactcaaatccttatttaatcaaataaggagtaattggtaacttttgcaaaataatttatatgcatttggtggttgacatgataccctttatgggcttcttttttttttttttttttttgagtattcagataatgatttggtgattgggaacaaaaatagatgcaagaaagaaagaacaccagcactgaagaatcctaacttgactcaaaataggcatgcattatgtaagataattccaacaaccactgaagatgttataaactccaaaaagtccagtgaagatttaaatgaaaccaaaggaaagaaaggaaaagtaatgtcaggtccaactcaaagaagacaaattagaactgggaaaccaacttctatgagattttgagagtgtcattttttctgtttctattttccatttgacctgtgtttataaatgaaaggctatactgttatcaatagttcttgaaatgggctatgtttttgttacacattgtaattggcttggctttacacataatgagaaagacaaaaatctctttccagagaagaaacagtaacagactttgaatttttagttttctccatatgaagtaattctaacacagaactaatcctactgaaatctgggtgtgaacaatctcctgaaagaaaacatggctactgttgtttacctcgacccaactgcacccgggttgcttcttgactccggtatctttcattctcatccaaaatgctttggcctcttttcttcttccacaactcaggtacatttcagataaaattaagtacacaccagaatttgctggctctatctcgagaatcttttcaccagcaagcttgccaatctcaatgttgttgtggattctacaagctccgagcaatgctccccaaacgcttgcgggaactttgattccttctgctctcatttgattcacaaaacccattgactcatcaatcagtccaaatctccccagtaaatcaactaagcaagtataatgctcacttgttggctgaatggaatgctcatttctcattatttcgaagtaatgcttaccaagatccaccattccagcatggctacaagcagatagaacaccaacaaaagtaatatggttaggttcaatatgttctgatctcatcttttggaacatctccaatgcattttctccgttcccgtggagagctaatccgcagattatggaattccaagtgatgacatcgcggcttcgcatggaattgaattccatcaaagcaaaaatcacatttccacacctagcatacatggtaacaatggcgttaccaacagctatgaaattattgaatcccgtttttgtcaacatggcatgagtttccatgccgagttgtaatgccggcaagtctgaacagattgtcaaaacgctagtgtatgtagcttcatctggaaacattcccaaatctttcattctaatgaaaagcttcagtccttcttcaccatgatcattttctcctaatccaaatatggttacattgtatgcagttacatctcgaatcggcatcagattaaatacactaacagcagtaccaacatctccaatttggaaataacctacaatgatatttgttcttgacacaacatcactgtaaggtcttttctccaataatgcatgagcttctctactgagcccatttctaatgaactccaacaagattgaattccatgttttctgacatttttctggcatttgcacaaaaagttccatagcatctttaaatcttccacctctcaccagcccattaactaattcattccaagaatcaaaatttctctgtggcattctctgaaaaaaaatctcagccatttcaatttgcccattttctaaatacccaaccatcattgcattccaagcttgagtatctctcaaaggcattttatcaaagagctcacgggcttcaacaatccgtcctaaactcgctaaacccgaaatcattatagtccaagacacaacatcccgagtactcattcttctaaaatattcttcagccaactcaaactctccaccattaacaagcccaccaacaaccaagttccaagaaacaacatctttcacaggcatttcatcaaacactttaacagcttcacaaacaaacccattacggaaatacccagaaaccatcgaattccaagtgataacatctctacaatatcccatcccatcaaagactctcttagcaccatcaacattcccacattgcatcaaccctgtgataaccgtgttatacgagacaacatctctcacgggcatttgatcaaacaagttgacagcattctcaacatgaccattcaagaagtaaccgcggatcatggcattccaagtgacagtgtttcgttgaggcattttgtcaaacaagttctgggcttggtcaacggaaccacgacgcatgtaggtagagatcttggagttgagaggctttaagttgggaagagttttggtgggagtagcatggttttgtggaatgaagtgtgtagtgagcgtagaaaatggcttgaggaggcgtagagaaagaatttggaggagcttgcagccatgatcgagaccagaagtgaagaccattcccccatttgactaatagacgtaagcaaaggaaatggctgttaaatatgtcaacaaaaacgacaagtagtggtttccttttcgggtggtttgatcgggtttcgggtgaaa

SEQ ID NO: 189419 - DNA, 6761 bp, Cannabis indica
aagagagtctctgtttcttattctccaactcgaagaatctatttctcttccacttccgcaagtgagtgtgagtcactgttgtcgttttttttttttttccttttctctctctctctctcttggaatgcccttgattatgccctatggtgtcgtttcatggtgaaactgaaacaggtagtggctccattccttgctcgctcagttctcggactgagaccccctcaaagcccagagaaacgggacaacgagaagtattggaagctttgggagaacttgagtttagaaggcaattcttaatcctcaattacagtgccgggtactaatattttgcaatttgtctcttcattcatgtttgtgtggaatattttataggaattgttgatttatgtttgtatatgtactttgtagaaaggaatttcggacagttataactgacgaagaaatcaggagctttaaaaatgtttccatggtagagtttgaaaagcaaatgtggaaacgttttggaagaaattctttggaaccacaagatcgtctaatggtaatatatcaattattgctctttttaattaatatttctctataaactgtcttgaatgattacttctatttcggtcctcctattctttctgttgtatatatgatctgcagaaaaatgaattacaaaattttcattcaattttcttcttctagctttttttttgaaaaagagtttttcttcttctagctttgctttctccttaggaacactactctgtttaatcaaaaaagggtgaagctattgtttatctcttcttacaaaggcataaataatttgttcgggtatgtttttctcacttttatttggtgttttacagcatcatgattgggattctagaagaacacacctttactactgtcatgtttctcctgaagggagttatagattcaaggttggttctttctaaagctactggaaacatgatacaaataaacaattttttgttaattgcagttgcacacatgatgattaatgtttgtgttatttgattttaggtttactttaaaatcactttggctcgaacaaaagaaaactttagtcttcatcatattgagctttgatttttgttatttctcatttgttgtgtagcatgcaaaggagccaacggcagtgcatatcagaaatgagttctgtattatgacttaccttcttttgtattaaaagtgctaagtgttctttaaaacactgacttagtttgagctatttgtattatttctagagcaatggaactatacgtcgattttttatttgtgaaattcatataattagcttcgtgtagtacttcataatattatgcactaaaatcatacgaggtgattttcttcttcatggtaacataatacactaaattgccatttgctttgatttttaattcagggtccttatctaaacagtaccagaactcacttacagaaggttctaggggatgacaacgttttgacggttaagtttgctgaagagtcgacttcacgtgatccaaactatcctggatttagaaatatatgcaaagaagggattttagttggtttacgtctttactgctatttcggtgaaccctccttgaactgcattaataaagttctgcttactgtcgaaagagaaaacaataacatacatttgcatcattagtggcactttcatacttactctcgatctctcatgctcaaagtttcagttctttcactatatatgtgtactattattgagattccagcaatgttgacaatctttctgatctatgtatttgtaaaatggatcagtttttaaagatggtggtaaggaagagaagaagaaaagtccaacatcatcccctgtaaagtgttttttcattcgcactcactccactgcgcacatcgatcagaatgcatcttatatcttatccaatggatgttataaaacaatgtttgatagaagacttctgtttatgcatgcgcatacagtacccaatgtggccaaatttgatgctaggtatatttcaatgtacacagtttgtttccgaaagcttttccatgcagtttatactgttcaactaatatcgctgttgttaatcaggttttcacttgtattgtccaagacacatagcatggatattgatctatcccaggttcgagttgattttattgatgatctaccctgcaaggtattgcagtcaataattagtctttaaaatttatattggttcttagctatggcttatttttcaagcaaaaagtttcttttattaattgtagaatgaatttggtgaaattgtcaaaagagatggagaagctctaatacacacagatggcactgggtacatttctgaggatttagctttgttatgtccacagaatgtacataaaggacaatataacaacaataagttttctgaggttttttcatataacttatgatactatttcatttcatcttatctgttaaattgcacttggaagtaaatttgcagacaaggacaatcgttctggccaagttatatgtttctagagacattcaaaatttaagtttcggagttgtatagtttcttcttaaaaaatttggcacatcccggtatctgcatattttttaaatatttcgaagtatatattttggagttttatttatgaaattatagcaaccaaattcacttgcatcaataactagtttagtatctggaatactgtttagtatctgcttgcagtgccacctcctcaaataactgcttaatttgctagtcactgttaatttaatagcctttgccattcacattttcattttttgacacattcaaattttcaatatgagttgctcatttcttatgctgtcagataatccaaaatcatgatgaacatgatgacaaagtggaggatggtgcaaaaatagaacggcaaggaactgggacacgggagcctgtatgtacttaaaaatcaaaattatgaccattgtggctctctttctctctatttcaacttatatctttactgatattattgttgagccgatttagtcttttctccagctaaattctttcactttttgtttttcttttccctctgtagcctatgttgatacagttccgtatgttttacaatggctatgcagttaaaggaacctttcttgtgaacaagaaggtatgtctttttcccttcatgttggttgaaaacagggaattttcttattattcaatttctttatttattttgggtaattatcacgattatcctccaattctaaaactcatgacaaattggtgctctcttgaagttaaacacactttttgagcactggtgagccaaattacccttctaaaattaaacacataggtgaagagaaatatgccattttttttttcttgacaaaagagaaataagctctaaattgaatgagaaaattagaaactaaaacttagattttagattccattccgttccgttaataatatatttttcatcaaaaaataatatatacatatggttaatggtcaaaagtagcgtttggtacatagtttaataataaccaaatgtcaagtataaattggacaatcacaaagaggtcaaactaaacataagtataaaaatattattgacccattattttctctctgttctttgtttataagtttttataaatgctggcttatgttaggccctagaattagtatggtgagctaaaatgtattaaataaaaagggtatttgagtcattgtttgagggagggtttgtgagtgagaatgggttctatatataggcgagtaaggggagaattgggtatgcaatgtattgagtagtcactatttgcatcaaaggggcctaagggctcccaccaattgtagttgcttcactcatacatatatcaatcttctataatttcctactattttcttgtctggtttgttgtttggctactgtgctattagttcttgttactattctgctactggtttgagcagggttctaccagcttaacgcacctgtggaattttaaataaatggccgaatctagttggtggatgtttttctttagagatttcaaacttataaaaacccttctttgtctagttcaggttgaggtgacataagatatcatttagtgacaattttcagtcacaccaaggatttttatgactaaaattatttttggacactacaaaaaaattacttataactaaaatgtaatgttgaatcacaaattgccactagtttttagtcacaattcaatataaatttattgggactaataatatatgtagtcacaacaaattgtaatgtttgtgactaatttttagtcactaactttttagtcacgaaatttgttgtgagatgtaagatcttttgtaatgacactcactatcgtgattcacttcaagtaatttagcacttatatgtttaagtttcataatgcaaaatgtgcgatttattatttgtttttggggtatgggttttctctactttgtttcattctatctgatgtaaatttattgttcacttttaaagaaaaataattattgaaataattgtagcttcagggcaaaacaattcagattcgaaattcaatggttaaagttaagccggatccagcaattttggatattaagacagtgaattcattggaagtagttggaacaaggtatgtctagcatcatcttttgtgtttgcatttgctaaatttggtacgattttctgtttgtgtcaagtaagattttctttatcaattaatttttaaggtgtataccaggtcgtaagttttgtcatattgctgcattcccttttccagaaaaaaaaaaggaagtaatgatttagttcctaaaccaaggaactaagttatgctgtaagatattgtaaattttctactctgttttccacttttgaattttaaacaatatgagacaactgtcacattcccatatgttcaacaaaagttagttggtttgtcaatgctcactagtaaaaggttattgagcgtttgaaattgtgaaatctaagcagaggctcggttttaaactattaaaatgatgggccttatataactgcctcacaaaataattgaagaccatcaaagcaacaaaattaaaatttcttcattttacaggaaacagtagacaaattgcttttgctctgtgtcttttactctttttttggtctttagtaaaactatattatggtatgttttaacaatggaataaaaaaaatcagatggaagcaaaatctataacgttttaagttgttgtccagcaatccacctaatagaacttacacatcaagaaatttaatttatctcctaagctttggaggggtgccacacaaatatttcgaggaattacttgataatgcattgagagaagcttatgctgcatccagcagcaagcgcattgcgcttaaaggtgattttagccatattataattttcttatagtccattcctcggactgtatccatacacggtaatgtatttattttttcaattaattattattgttttaatttgtccggtttcattttatttgtttgcagttggtattaattatggaaacatggataatgattttactattgcaagaatgatcttggctggtattccacttgaagagccctacttgcaataccgtctttctatactaatgaaggaagaaaagaagagtctaaaaggaggaaagctttacatacctgagtgctgttatttaatgggaacagctgatcccactggaaaacttgaaagtgatgaagtttgcgttgtcctgtatgtacaagtatagtattattggcttatatttccctttcaatatgataagtgcatacataatctcaagtgtttgaactgtattgtgcagatcatttaattttccttaacattaaagtgtctctctttttttttttccttttttttttttttggggtacaatgatgttttcagtggcaacggacaaatttcaggaaaggttttagtttatcgcaatccaggtattcacttcggtgacattcatcttctaaaggctacctatatagaagaacttgaatcattcgtcggaaatgccaagtatgctatattcttctccataaaaggtccaaggtcagtagctgatgagattgccgggggagattttgatggagatatgtactgggtctcaagaaaccctgaggtttggcatttacctttgttgtatgttagtctactttgaccattttaacttgttttagtttcttttccttacatgcatagttgaaaaagaaaaaggttatttctcttacagtaatatttttatttcccagttttcttcaattcttcgttctcatatttgttgaacttagacgagttctgagttcctttttttctccatgttgcattatgaagaatgatagtgacatcaaaattttaagcttttttacctttaccttgaattattccgaatgacgctatcttgaacagtgctacctcttttaaattgagttgttctgttgtatctatgctagtcttttgtaccatatggattagcaatgcatgattatgggatgagaatatatgcatgatgtgcttgtttggcatttgatatataaaagttatgtagcatgaaatggatgtggaattattttgaatgacatttttcacaagggcacaaggacccaatttggatagttaaatttgttcatttgtagacttaagcacatgtattaaaacaccaaaactttatgcatactgtattacttttataggtaatttaatattttaaggctgttcttaccaattacttctt

SEQ ID NO: 189420 - DNA, 2722 bp, Cannabis indica
gttctccttgcacggttttgctatattcagagcttaaaatccctaggtacaatatttttagttccgactttgagaactacaattgaacactttttgatcaccaaaagtggattgaaactaaattttctaatgagaagtgttagatcgaaacttaactccagcagggaagcaccgcgaaaccaactgtcgtcctaactcttgtagatcatcatcgtaaagtggttgatcttcatttggattgaagatcaagctcgtatgttcatttgacgattgtggatgataaaatggatccaattgcattgacattgagaagttagagttcaaaacaacgtcattgtatgatggtgacaagttctgaggttgaggctgtgtcgggggaaggcgttgcatggtcgaaagcttggcctgaacatacgccaactctgcctgcaagtttactacctataaccacaaagggcaattaatattaaactttgattgagcctaataatactcttgtcatattacacaggcagaagagaaagaggtctagttataaattataataaacagccactatagcctttccacaataaaggtaaccgagaatttgatttacaaattcattatcttttttttcaaaaagcgtctttcataattaaattagtatgtatagatgctcgatcattataagtagggaaagttaaaatattatttagtggtactcccttatccacaacccaaagagcaaaatgcgaatatctctttctctaaatctctatggactgatcataataaactactgtatacttttcccaatcatcaatcatgggcttatggaattgtgcctaattattataaaggtgttgcttattctccattcctctaacattaatgagatgtccaaatcaaagatgacactttaatcatcttcgtgatcttaattgaaatctctctagctagatctataggcatactacaaagaataatcgaaataccatgctacggcataggtatataaatgtactaatcatatatactacattttgttaagttctctttgcaaaaagtcactgaggatagtaaaaggtttttattataaaatcaagcaaaagattttgtgatcgacctcaatgatgaagctgaaaataacgtttttgtgtttatgtacattcaataaacactacaaaacaagacaagactaaatatatatatatataaattatatatttcaataaatattcttacaagaagctactccatgtgactaaacttaagtagtgtaagtaagattttggacatcataaattcatcacacgattatcaacataagtaggacccttttttatccatgaaaggaagcaattatctaaagtcaaatgtcaaaggttaataaatgcataatgagataaatatatataaatgttactaaatatgccaacgatgcgtgacatggttaattaagtcaaaactaggagatttgaatattgtaagagcttttcaactattttagcttggtagatccggcaagcaacaaaattcatccatagtcatatcatattcatggctgccacaccaaccccaccttctcaaaataaaattatataatgaagttttgaagggccaagttagcataaacttcataaaaatctcatgggaaaacgaagaatagtaattatttagctagcaataggaaaaaccctaataaattttctctagaaagttcaagtttttgcatggatttcaagcaagcacttaattaattaaaaagcttttaatatataacaaacattaattataatatacccccggaagttgaaatatttgaaagtactaaaccctttttgcctgaaacttgaccaagagtattttatagctttatatattatataaggccaggtaataagtaatttatattttataggaactacataaaaatagaactgtcttatctctcaaatgaaagaagaagaaaatgcactcctgacaaacttaatcgagctagggtttcatctacagtactcttttttgttaaatttaaaaatgataagaccattaataacataataacaacttcatgtcataattaattaatttccaaattactcaaaaagaaaccaagagatatatattatatatacaatacatacaagtacttatttaagagctaagtaaatgagtgtgtttgagagtagtagcacatagcaagttattaaataaaagaaaataattaataattagagaaattattattattattaattaacctggtgttgtaaagtgaagatgtgagaaacacagccataaacaggatctcgaagccgagcaagggcctcgtaacagagcgaaacgacggcgtctcggcgtttatgcggcggaatgcggaggagcaacttggaggcgttgctggctccgaacaccttatgtacggcagcgaagtgagccgtaccttgctccgagtcaaagtacggagcgaatatgcaccccttcacgcacttccgcctcagaaacttgcacgcaccacaaggcccaccaccaccgctgcctccgctacttcctccattgctactcatcgtgtgtttatatatatatatcactctactctctacttagagtagagaaagttgctaactgttgttattctctgaatatcgattaattctttcaatgatcggtttttgaagtttgtggggtctgaatatatgttatatatatagatggggatattatgttatatgtgtct

SEQ ID NO: 189421 - DNA, 851 bp, Cannabis indica
gataatctcaactattgataagcaaacatcacatttacattagactcgagacaacaaccttcttcctatttgcaggtgacataacagaggatttcttgcggtgcttcatctttgaagggctgcttagtgattttgggcgctttctctgagacagcttcttattctttacaacatgaaccacagtttctgttgaggtattgtctgacataacaagatctggagcttctttcatcatattttcaaatcttggatgattaggtaatccaggagtcaaagtgtgaacctgtttgactccctctgcctgaacatggaaaaccaatataccgtcaggtacctcaacaaggatagtgtttaacaaaaaggtaaggtgattagatcaaagctaccattttgctcttcaaaacagaaaaataataataattacaggctacaaataacaaaactgaagataagttatatagagttgcaaaactaacagaacagtaagaggtgagtagcagatttgcgtaatagaatatggtcaccaacttaccttccttgttttcaaagctaaataacgagcatttttgaaccatttgctaacctgaaattgtcattttaaagagtcaatatgtgaaatctaaaaagtacaaagcctagccattagagcttctccaagggtgctgtgtatttttcaccaaaaatggctaaaatgctattttaacttttgtcaactttgttacaaccatgctccttatcttatctagcataagttattttgatccataattaaaaaaaaaaaaataaaaaaaaataaaatctcttttttttaattaaaaaattcatacaaaaagtagctttgttaaaaaaaa

SEQ ID NO: 189422 - DNA, 720 bp, Cannabis indica
atatatatatgtaagcattgagtttttcgaagaatttgtttcaagaactgccttatcatgattcataatggttctgcaataaaatttgcacgaagtgtcgaaatctatttgtctatatatcaatagtttgattataaagttctagaacgaacttgacccatcaaaactgctagagctttacagatgccattctacacactcatcacataacacttttttttaattattttatttttataatctatcctttattattaaattaattttgttttgcaaaactgggtttaactcccgaatatactaaaaataggatgtaaagcccaaaatttacagcatacagagcactattatcttatctaaagaaaagcactattatgggaaatttatattgattaccaatagccgcatacgttcatggaagactcaaatttgatacatcatgtagtttgttaccccatctttcattggggatctaacacaaatctgcgtaagtaaagtcatgtacatttctccagcaaccaacaagaaattcaacaagacaaattatgctcccaattcagcaattggcttaacttttcttggcgttaatcgcagcctgcacaaaatcctcacactgggtaaagccgccacataatacatctgcaagcattccaatgatgtcaaaagcctcctgcaaatcgcaggcagagtttatctcgtctaaccatgacagcagctcct

SEQ ID NO: 189423 - DNA, 1855 bp, Cannabis indica
aaaaaaaaaattaatcaaaattaggctaaaatatagactaaaggaccctaacaataataccctatgataaggtgtactttaaactaaaactagtaaattcaatttttttaaaaaaatccctttattgaaactttaattactatctaagcaaaaaaaaaaaaagcacaatcataatagaattccaaggtatgtttcttatctcattagtttaaactttaaattaattttaatctgtttcattgggatttgcatagttaaaaaaaactagattaaaagtcttgaaagaatgtttaatgtaaagtaacaacactacatatagttaagttactctataaactagattataggtacctaagtagtagcttagctataatataagacaaagtgtttgtgaaaatgtttgtgagagaaagaaatagagatgtattatattatgacactcactcactcactcatgttgaccatgatatatatatatatatagaagtattatataacttcactgaatgagtggtgagaaagaacacattctcctcccatgtttaatgtcggagaagcttccaataagtccaaagcttccccgtcattacttgcagattaatagctgttacagtacccaagatctcacgagaccccataatattattattattattacaattacaactaatcccaccaattaatttaataacataactagtttattattatatttatatttataacaacaccataacataacatgtcatatatactaaaacacttgagttgagacttggttagtatcagagagtttcttttttttggcaatggtggaaaggggtgagatttatatgagagaattataaacacaaaaccccaatatgcagctgaaaactcagttgttgttgttatacttcttttgttgttgttgttttttcattggttgtttctgtcataatgatgatgaagtgtctgctttggtttcaatcagagctggtcttattgatccattgaatagcttaaaggattggaagaatggtggagctcattgttattggagtggggtttcttgcaacaatgaaggacatgttcaaaaacttgatctttcccacaagaatcttagtgggattgtctctgatgaaatcttaaaactgaagagtttgattactcttaacttatgcaataatgtgttttcttcttcattgcctaaatctatagctaatctcactactctgcagagtcttgatgtgagtcagaatttcttcattggtagttttcctgttggtcttgggagagcagctgggcttacttatttgaatgcttcaagcaatgatttcacaggattgattcctgaggatcttgggaatgctactttgttggaaagtttggatctaagagggagtttctttagtggggtgattcctaaatctttcaagaacttgaaaaagttgaagtttcttggtctttctgggaataatctcactggtttaatcccacctgagttgggagagctttcttcattggagagtatcattctcgggtataatgaattcgaaggcggtataccagctgagtttgggaatcttacaagtctaaggtatcttgatttgtcagtcggtaatcttggtaatgagattccaactgagattgggagactgaagagtttggagactgttttcttgtacaaaaacagttttgaagggagaattccacccgaaattggcagcattgtttcactcaagttgttagatctttctgataacatgttatcagggaaaatcccagatgaaataacagaattgaagaatctgcagcttctgaatctgatgtgcaacagtttaacaggttcagtccctagtggagttggtagctt

SEQ ID NO: 189424 - DNA, 3387 bp, Cannabis indica
ccatccatgctgtcataaatcatgtcatatcgtcatcagaaatgaaaaaaatactgtctacaaaggaaaagaacaacagagatatgcgctaaactcaactctgggatgtaaataataataattataaaattgaatatccaaaacgttacacacctccaagcacaacataagagcgcaccataataacttttgccaccacatacaagttgctctttagagtagtcaaaaacacgtaaataacctgagtacagaaattaaaccaatgctcatgtgtatttgaagttgtaattgaacaaacaaacaaagtacaatattaacatagtaccatctcttccaacagttgctaagtatgttccatcagtagagaaagtgatgctattaatggaaccttggcatatatgccatctggcaattgggttactctgcaaacataatgctgtagtcaatggacaataacaaaagggagcataaaaggtatgttattaatatacaccatcaaacaacattaattttaacaaagtacaactttactgtgtttataataaggtaaactgcttagaagatctggaatgatcattgcatatttatcaaaatgatatagaatcatctaacttctccttggttgttttagatagtagaaatcttgtccgagagtctaccagaatctaaaaaatatactaacagacatatacagcccaaactaacaccagaagtaacacagtaatatcaaaacaattgcacacactaaaagttctaaagtaccttattatagcgagcatgcgaaacagaaaattgagtttgatctttgatgacagggaatgaagaatcacctgcaccatctttgttctagagggggaaaaacaacaaaactaaacatcatatttcagacattactagacaaaaccattgaaagtatatgacattagaacattaatgcttgccttctcatacacatacaagttcccatcagcatgagcaactacaaaagcaccatcaccgccaggcacccatgcaatactagtacagcggctgttggaaattcgtgtcaaataaactagtctccaaaattagacttcagacttctcatacattacacacaaagaaaatccaacccgtacccaaaatattttattaaaatctaaaaggactcgattttaaaaataaatataaaaaaggaataagtataagcagctaagtattttgtctttttacccccaatacttgttttactatggtcatgttacagagaccaagattaaatgtacccatttcaaaaaacaaagatcaaatgtcgaacaattttaactgttcaagaatcagatttttcagtatcattaaacttgagtgaatgttcaaattgtccagtagactaccctctacagctgccaagtcctaccaatatgaatacagaagtaaaagcatgcaatttaagaatatatacatatcttgcttttccaccaaagctatgaatatttctttctattttaaaggcccatgataccttgacaacacttatgtctatgaacttcaatttttctagtaataaatataagagatatctatcaaacataattaacaaacactctctttacatcatatctcaatttcagggacactgaatctaacccaagtgtgacatcagaattaccaagtgtacacatcagattctggatatgaacaatgaccttctcaaaaaaaaaatacaataacactttagtcttacctgctattaaccgaaccatctttgttatagtgttgggccccaacaagcttctttccaacatcttgtaattgttgtctcagtgagacagaatatactgcagtaatacacataacagctaaaactgaaatttctaactctcaaaaacaagattataacttagtttcaagaaataaagtttaccatctcctgaattcagcccaataatcaaatcatgaccatcccttgcgtcttggtcaaatgcgtgacaaatggggtttgaattactaaaatgtattgattttattggatcctacatacagacataaacctctcatacaccaaacacttatcttcaaactaactaaaatctaaaattattataataccttgtcttgggaattcaagtcgcttataaaaattgcatcccccacattaaagatcaaataagtccctttgccatcaaaatttgatgtagaggccaaattggtagagcttgaagcccccaatgacccaactctacttgcactgacactcttactcccaccattgccgccaacaaagctaagtgcccgactcccatttccaccacctagcaacctagctgcagctgatctcacacctccactggtagtgaagcttgattgtgaggatgtaggggttgatggggaaggtttatctttgagatatgctagagtcacctgattaatgaacaaacaaaaacaccactgaagttttagtatttaggtcaaaatgccataaattctataaacttgtaaagatcatgtcttggtgttaacttcagtaagtggtccttgataagaatatgattatatctaatcgaaatttcttccacaatatgaaaatttgaaggaaaatcataagaacttagattgaaatatatgaacataataacgtaccttcacaatatcaataatcaatttataataaatttcaaataattcaaattacaatcctaaaaaacggcagccatgaacataaaaggaaaggaaaaccctagaaccaaataaattcaacaaacccaacagcgaacatttgattttacgaaatgagcagctaaaaatttcttaagaaaacactattcaaatagtaaattgagagagaaaggaaaggaaaagaagttgattaatgaaaaaccaaggaacctgggtaacggttttgccatgggtgtagtggagaaaacccgaagggtgagtcttttcgtaatgaagcttatatcgaccttctggtgttttgaaataggtcttcagaccaggcgattgggcgttccccgatgaagaagccgttgacatcataccgttggcagtgttgatcatggtgaagaagctggttactacgatagagccgagagcaaacgatcatgacattagggttattcaatgctaatttttctgagtccccaaaaacgaagaagacgaagatattttgctagcctgggttttgtattgttttgctctcttttttttttttttttttttttttttctttccttttattctatttttcctcctttgtttggtctccacttcatggcttccggatcatggggctttggatcctctgcttcgcggttcatgagaaatctttgtaggtgtaatttgactttgaatggctcattagtcaatgatatggacggctatgatttacaacttctttttttccgtctt

SEQ ID NO: 189425 - DNA, 2154 bp, Cannabis indica
tttcacaggcatacggtcacaaaatattaacaggaagacgatcaagaatgaaaacaattcgacaagttttggacttgcagggttcccaaaaagggatgagagtgagcatgatgcatttggagttggacatagctccactagtatttctgcagctcttggtaatttcttttcatctataaataatcacttgattaaatacaacaaaaatattttaactaaataaggacacaaataatttttttctcaccaactatccattttgtttttacaaatatgaccttaactgcatcttcaatccaaatggcacaaaattttacccattatcttttttcccactccaaagcatgaattaatacacattctattatggggttagtgagtgacattaggatagaataaaaatggtataaattagcatgcattaatataacactataccattattttaatactctaatgcccttttgagtcaatcatgcatgtgtacatacataacttcatgaataacacactttataaattactatcattattattcatggtgtatgccgaccttgagttgaattggactttagaaaaaataaaggataaatattattttaaactttgtattttgtaaaagctactaattgaactttctgttttgttaaataacaaaatgaaccttgtatttttcaaaattgtacaaataggaccctgatttaattttttatcaaattaaaacttaataataatccgatctagagatgttatgaaaaaactaattaaatttcctgtatatattcatgttagaaattgtctttaaattggttattttaaaaaagtggtcgaaaattgagctcgagatctcatttttaccattttgaaaaatataggatcaattttatcattaaacaaaacagaatgtccaattagtaatttttacaaaatataaggtctaaaataatatttacccaaaaataaatttacaagggccttgaataaatagcatttttaaaaattatatatattaaaagatcttttttatcatttgggcccttaggttaagtagatcctaggcgcgggtctaatctaccttaacctagggtcagtcctaaatgtgtgatattatatatattagagcattgttataagataccagtgcattttacgaagagttagcaatattttataaaaactatattattttaaactataaagaacccattacttaattgtactaataacaataacacatattagaaaatactagacactactggtactttttagcatttatcattatattaataagaagaaacaacatcaacaaattctaaacaactaagatattagtgtgatttgattccatgaatgaattaataattgttaggtatggcaatagcaagagacttagtagggaaagagaatcatcatgtgattgcagtgattggagatggtgggatgagtggtggacaagcctatgaagcaatgaacaatgcaggttaccttgataccaatctcatcatcatcttaaatgacaacaaacaactctctcttcctactgccactctccatgcccctgcttctcctgttggtgccctaaccaaagccctagctaagcttaactccactacaaagtttcgccagttacgagaagctgctaaggtaaccaaaacttttacaaaaataccattttctttttaactcttaattttacaaattaagaggatattacaatatttgtgggcttttatacaatgtgtgcaaaaatatggattggcaaaaggaattaagagtaactagttaccttatgctattttcgtgtatatatatttaatttttcccataaaaacaactattttgaaagaaaaaataccatatttcaacaaacttttacctaaaaaccataaaaataaaaatctcctccatataaagcaaagattaaatgaaatgctaattttattttcatatttttgaatatacgagaattctacttcttaacaaatatatcttaacccaacaaaaaaagtgaaaattacaccaaattatacaaaattatgagattaagaaatcccataaattcattagaaagtaaagaaaaatcatggaaaactactcccaagtttgaaagaaagggtttttacaacatatactgaaattttaaattttttt

SEQ ID NO: 189426 - DNA, 784 bp, Cannabis indica
ttttttttttttttaagttattgggaacttgtttgttttggccttttgtacatttgtgaatgtgtttgtgcgtggcattggtggaggaatttaaaaataagaagaggtattttttaatgtatttctttactaggggaaaaagatatatttttgaaaagcgggaaacatatttgaaatttagtatattattattagttttggattattgtacaattttgttttgtttgtttgtctataacagtttgtactataaaaataaaatagggaccgagtcaagttgagacaaagcagaggacatgtatttaaactcagttgagacaattgccttattcttttttctttttgagaaaatatatctatatgtttttttttgtttgtttgctaactctataatcagtagatatataggaacaattacaaaacaaaatcttttatattatacacataaaataactggattaaagtaatactcaccggatacaatgttcttcttcttctatggttgactatgccacttgctagttgtaaagcttcattggatactctgctacccatgccaccatgtatgttgtataaagccactttcaaatgatcttaattttcagtcaattcatgtcaaaaaagaaaaaagacagattttttgtggttgtacattgaactcaactcgtcgataacagtgataaagcttattggtgggtggcaattagtgtttatggtcgtaattccgttatgttgagacccatatatatttcatatgtttattaatcatgccaaaaactaaacg

SEQ ID NO: 189427 - DNA, 1016 bp, Cannabis indica
atatatacatatgtatggaacactaagatggcatcttatatgaatgatatgatccataattccttcggttgaccaactatctggtatcttttgtagaaaagattagtgggccttatcccaaatattcatgtggcccatataagtctcaacccagcttcaatttatgccttgcctagccattaacagtggatggtgacccacaaataataaaggaagtgctgttaggtcattccactcataacttttcagactcaatgatcaactgctaattaatctcatcatagtgcatttggttaataagcaaaaatattcctttgtctccatcattccaatactcctcagcttccttctccagcacttaaaccaactaacaccctagcaagagcaccaaacctacttcgcaatctcttgtcttagctagctaatatatttggtctttcacttaaaagaaaaggaaagagtaaaagaaaaatacaaatattatattatatgaaggcattgggaccaaaagcaatcatttcaagtttgatcagtttgtatagctaaagtgggcaatagctgttaggttattaaaactcaccttccctagccctattgcccaatcttctttcatatatatgcttcaaatgatgttctcttttcttatttatagaaatatataccattagattcagaatagctataacaagcaaataaggccttgaagaaaatgagtacagcaagatttatcaaatgtgttacggtgggagatggggctgtgggaaagacatgtatgctcatttcttatacaagcaatacatttccaacggtacaattacaaatttatctatttgtttttatatcaatttattctatcacatatgtatatatagtaaatcctagaaaagataaaccaagtaataatatattaattcttcaagagaattactcttctaaatcatggaaattattgttgtacaattaagaagaatttgtatccaatatatagatatatatatgtatataatctagtgtat

SEQ ID NO: 189428 - DNA, 2001 bp, Cannabis indica
aaatgggtagaagcagcaacaactactattaatgacagtaaaattgtacttaatttcctctacaagaatattttctctcaatttggaactccctaagcaatcattagtgatgaagggaataaatcattcaatgttctttttgcttggtatggggttcatcatcgtcaagctttggcttatcatcctcaaactaacagtcaagttgaagtatctaatagagagattaagagcatccttgaaaaaactataaacacttcaaggaaagattggtccaaatgactcgatgattcactatgggcttatcgaacaactttcaagactctgattggaatgtcactatatcggttggtttttagaaaggtttgtcatttaccggtagtaagaatagacttatgaaattgaataaaattgataagtttcgaaatgaagcatatgagaatgcaaagatttataaagagaagtccaaagactttcatgacaaacgaattctttagaaagacttttaaccaggggataaagtactattatttgattcaaggttaaaaaaaaattgagaaaattaaaatcaagatggttatgaccattcacaatggttgcatctcttccttatgctgcagtccaagctcatagtgataaaataggccatttcaaagtcaatgggcaatggttatagcattatcttgaaggacatattgatcaagttaattctgttattctcttgaaaccaatttaaagaggagctcaaccttcagcttaatgacattagatacaacgctcttaagaggcaacctaattttacttttagtaaaaaaaaaaacctccttaccttggatccttagatccaccttgtatgaaatttatgtctacttaaaatattgtccactttaaatttttttttccaaaatttcacatcaaagcgccaccgccaccaccattttgatatgtttggcgggagtgtcagataagttttatttcttgtagtttattttgcacattggggacaatgtgtttaataagtttagggggggctttcttattttttgttttatgtttagttttctttatgtttgttatatttgtcatgtgtttagttgtatttgtatttttatgtccagtaaagagtaggttagttggtttttatgagttatattttcactttatgagccgatgatacattaatactaggagtatgtagcatgattggaagaaaattttggctattgttggatctaattaattggtaagattgcattgtgatttaactttaaagtctccataaaaatgaatacggtaccatacttggtaaatttcgattatttgagtgtagtttatacttgttaaatagaaaagtagaatgatggaggaattaattctagaactatcttgcttgctattttaggcaaaatcataaatgatgcatgtttaaataatattgatgatgaatgtatgtgttatctttaagagcaagatatacacttcatcagtttaaacccacttcttcattttctatttttccgttcatcatcttcttgcttttttattttttattttcatatggttattgtgttagtggtgtagttttagtttgtttttcaaatttattcatttttttgttttgctttaatttcaagttttcctctagtgtttcccccttttgttgttgttcttctcctataattactgttcttcttcatttattatggttgttacccaatcaaactcttcttctccaattgtaaaaaatcccccaaaaaaactccagaaaaaaaaacctcgatcatcaatgggtaagaagaatttaaaagatcatcctcctagccctacatctcctattccttctaaaagaaaatatgattattcgttttttggttgtccttttatgatttgggtgcgcatttattatcatcgatatccctaatttacaataaaatgaagattataagccaagaacgactatagaacaacattaaattttgtaatattcattaataatcgtttctc

SEQ ID NO: 189429 - DNA, 3206 bp, Cannabis indica
tgtaatggaggtagaggagaggacgaaaccaatcgccatttttatggcgttcggtaccaaaggagatgtttatcctattgctgtaagttcctttgcttcctcctcatctagaatgtgaaaactctgtataaaagagaaaaaatggttgtcttgtatataattgctgggttcctctaacagaatttggaattttatttcattatatataatgaaattgtacatatatatgtatgtgtgtcagtgtgtgtgttatatattaaacaagtcgaattatctttgacttaatctgcagtgttcatacacttattattatcaatgtcaagatattggaaatcattattaggagctgaattttagacaatggccaaaaagaaagtagaaattttcttgagtttatctcaatgaaaatgatctcccaaaatatcttcttaaacttttgttgatatattaagaaggccatgtctaaatattagcagtggattgttgtgggaatggaaatcatgtaacttttttcttttctatttcgttatgtgtttacttatccatttttgatacaaattttgaagaatgttgtacataaccaattatatggagaagaaatgagttttggtttcttccaccctcctcctcctcttaaatctctttcccttcaagattgttccatttcggtttagtaaacatgcccaagaagctaaagttactgagtagaaaaagatcaacagaaaaaaaaggtttttgaaaatagtcattgtgaaatttagacctcactacatattattttctagttggactttgaaaggattgatatctaattcttgtttcctaatattattttatttttaaaattctgtttgcaggccattgcggcaggttttgcttttgatcaaagacagtaccatgtgattcttataacacattcagcccatgaggtttgcccttttgaatagatgcctttggagtagtgttgattgaccctgttattcacaatttgcatgtagaggataattatgacaaaagggaagaactgtttgtagaaataatatagataaaacaagaagaaaaatacaccacctctataagcattttgtcttattggttaaaaaagggtattcttgtttttcaatcatcagtcaagcatcccactgactagtgtttgtaagatcgaatttttgcgtagctagggggttcaacaaagtaattttatatctgattttttattcctaggtattgctacttacttattgttgtgttccgcatagctagtgaaaagtaatatttggaatttataaggagttttttttctcctcatttttagaaacgttcaggaaaaccatgaagttgatgtaggtgcacacagccaatctcaaagttatgcgagcaacgatgttaggtcctgaaataagatgaaagtagattcctctttgtttggagagggtgtttggcacttatagatggggatgtcatgtcgcatacttgaatttaatgcagttttggggtaaattgtgaggccaatggccaacacatgtaaaataaacagttagcaacactagaagcaggtcttgtcaatttatattaaatttcctaggtattttaacattctatctatatgaaaagaatcatttatttgcaacacaaggatcggtatacatatagcaagatagatgttgatgcttagaaactagttcctgttgaacacttaattaaagctatactactatgttgtaggcttgtacagatttaacttgggtgacccaatttacttttgttttataagttgatcatgtatggtgaacaaaaattaacctcttatgatattctgctttccatgagtttcttataaaaaaagttgagcttttatcttaaatgcttttgaaacccattcattatcattatattttattttatttattttatttagaaccttttgggttgttgaaaatttatttttaaatattgcaatgtgttgcctgcgatgcagtctttacgatcccacttggctgaaagaaatgttgcttattatccaatttcctcacccccttttatttctaccgatcacattcaaaacactacaggtttggacagctttgtttctttataccatatgctagctttgaaatctcttagtagttcttgctgttgctattgtgataggatctctttgttttataatgcagaatcgtcaatttcacagcaaaaagagatgcttattagagaccatagaagagaatgctattctattgttgaaaagacatttggacagcgcccaaccatggaggatgattgtattgtgataaactttttcgcactggtatctatctgaaaaatcaaactccttattttccttttcaattggttgaatgccttcatgaaatatattttaggtttggaattacattccagtaagacaattagaatcatatgatgcagtttcttagatgggttccaactatatgaattataaagagggagtagattggctgctagtaagtagatgtctgtgcactgtatgacttacaaaacatttgtggctttagagttgtgggcctgaacctgtaactacttttaagaacctgagttgattggcgttgctctagaggtgtcatacaatattcatgattatgtgatccttgaaaagattccttgttggtctaggaaggatggagtctcgctgaactgttccgagttcgttgcatagttgctgctccatatgttgttccatacaggtagcaatgttttattcttacacttatgtgaacctttgttaagtgactattcttattcttattcttattagggaatttctcttccttaatcgatatttattatccatttctgatgccaatagattttgaaatgacacaaaggaagttttcacaagtgttagatgtcatcttttgcaacatgtattgatagtgtctaaataactttagatttcttatcagttcacgctgttcacattaggaaactaatttctcaagaataagaatactgatagaacctgttcaaaatctgtgtgtttctctcttaccgccttcagtttatttgtgtaaagcatgcttctgagcatgcctgaatatggtttacttgagtttgtgtatgcattaaattccaattgcttgtttcagcaagaccgattgattgaacactgatttttatttctaataggagaaccagtgttagaggtcttaacattttgtagataatat

SEQ ID NO: 189430 - DNA, 1508 bp, Cannabis indica
gttgcaaaaataaatcacagccaaaaatataaaaaagatggcttagaaagtacctattacccgaaggaggaacagagcatacaagtactgcaccaccaagctcaggatacaaattttccttcccttcaatcagattcaaatcaatgtagagtatacatacacagggaaaaaacatacaaataaacccaaaagatattaacctaacatcatcatttaacacatttctttacaggttgttgtttgacagaaagtgtaaataccgtgtcttaaggctttatgaatgttaatctcgaattttccctactacattgattatgaaaatttgtgacgtgcatccatgtttctatatgagaactgtagtaatataaattgagtttcttttttgttttgtctgagaatgacaacctgagcagaaatgtattattccttgaaagtgtgagctatttttcagtttttagccatactcaaaagaactaacttcaactctattctgaattttttttcctttgctctgtagacagttaaagaaatggttagtacttgatataatagtaccttgatattagtttcaattaagctgaaaagattaactttgaaagaaaggaaagagtgaaaggttttggtatgagagcatgtgaaataagtgagattgtgaactagtactgagaatagtgagaaatttgtgtgcaaacaactaaaagcttgaagccttgtactcttgattgttggtggattttgactacctcccatagacatagttcaatcatgattgagcctcaatatctattgtgttggtttatttatttgctttggtgttcttttggtttgcaatttcttgtcttggtattttgttctgtgtaattgtgaattcataatttgtggagtggtgtcctctgttggaaataattttcataacatttctttaagtaattttaattaacaagtggtattgtgagtaggaaataatcatggcagtggtcacaacaaaattcaacactgagaaatgctatgataagaatgacttaggttgatggagtataaaatgaagagttatattgctgtagcaggaatggttgatgctttaaggttgaaagtgatatgccttcaatactttctcgaaagaatataagggtccaaaaggaaacatattaagggcttatccttctcgttcaaaatgagtgaaaaataggctctctcataccacagattgatgagtttaacaaaagaatagatgtcttgagaacattgatgttaagctggataatgaaggccaatcatagatctcagtgaatgctcactacaagcatataagcacttaagagatgccaagttatatggtggggaacatgccataactttgggagaagtacagtttgcagttcgtgcaaaagaactcaatagaataatacaagcaaaagaagatcacactggttcaaaaggaagaatagaaaataagggtccaaaagaaaactctattttttggaatggtgtatagtagactatatttg

SEQ ID NO: 189431 - DNA, 3524 bp, Cannabis indica
gtttttaaaaaaactagtttaaaaaaattttaaaagtaatttttttaaaaaaaatattttaaaaagtaaaaataattttataaaacatattttaattaaaatcaaaaaattaattaaaaaaaagtattaaaaaaaagactaacaaaactaccataataaatttgttgtttttgcttttttttttaaaaaaaaacccttatcaactaaactctgtcagccgcctcttacctcgcgttcagtgctcgctctcattctctatctggttcgtcgtgctccacagtcccctcgcctcccacgctgcttctccgctccgccattcccacacttcactctctcaatcaggtaaccgcccactgtagcctctcagccacgctcactcttttcgaagaggagtttatctacaacaacataaaacataacaagcttttatatgttaaatcaaatttagtaaggtttcagccatgggtgcgcttgcttccatctctccttggattcctgaggatgaccttttactcaagaacgccgttgaggtaattccataatccctactgactcactgttgtcaactatgtctttcacttctccattgttactagcttggttcatactcttgtagctttctgctgcttctattctataatttcttcgcccattttaattgtctacgtctataattttccttcttgcccttaagctttttatttatttattattatttaaaatagataaagtacttctacaagttgatgatgtattcgggtttgtttgtttgtttgtttgtttgaataaatgtatttggggtttgaatgtggttcttcttaagatgtttttcaactatgctttgtaataatccaaaattgaggcttttgaatcaaaggatttgacctatgaacgtgtatgtatcctcttacctgttaaatatattgattggagtagaatggaacgatgctcttgcaaaaatcttaggcttagaatctctgtagtggatgtttccaattaggtatgtcttccattgaatgagggtaatgttctagaaacttgaaattctgcttttacattttgatgctgtaaagtgaaaaccggtgccccacttaaccattcttacgagtgcaagtcattctatgcattgactccccacattgttcccaatggcattttttatgtgtttggttgagtttaacgttttttaattgtccgactaagtcatgccatagatgttttctgtatcttcttcagttccttgtaaacattttctttgttttggattggtattagggtaagattgttggatctcctgctaagatgttaatgtgacacggccaagaattatggaattcttaagttcttctgtatggaactttgattttacaagagaaagtaaacgaatttttctcgtgtaaatttaaacaggaaaaaatgagatttctttttatagaaaatgtttataagaagagagtgatttaaatttacttaagtacgcagcattcaaactttagtaaataattaaacaaaattaacatgtaaattgagaaggagaaagttccagaagaagattttatggatatttaggataacaacttcctttgtttttaatcgtctttcctttcacatttttttttactttagccatctagggaaatacacaactcaaactttcagtattaaagctattaagtatgaaatttgttctccttgaaaaataaataagcacttgagtggctgagtgggcgagtgtgtgtatgtgtgtgagtgtgagtagttccaggttcaagtccccatgattgtgcatgaatacgaagatcggtaatgaacataatcagtggattaatatgttactttttcatggttatatatcatggagttagtcattcaatttcaaaataagaaaatgataataactatgggttgaaattgggaaaattgttgctagaggtgggtgaaccaacttcattaggggtttgaaagttgatgtaaggtttgtactggttaattatgagatgatgatggaaaaactttagcattatgggtgcacaagatggcactgtaaaagactatttcacgagaaccaggaaaagaaacttgaaagcatgatatggtaattttggataattttgtgcagccattttgatctttctggaagaagactaaaaacagatagggaaggcggctgggagattagtttggaaagatctaacatgtttattcgtaaaatttatagcttacacaatttatacttgcgtatatatgttacagataatatttcatattatattgtattttattgtgcatatatccataacaaaagttcagatggcttggatggttcagtctaatataaatatatatttttctcctgagctgttttttttttttgaatcacgttgctttgagtattgctatcatttgttacatgaaacatcttagtttgctctaggaatttcatctcgatttatttatttatattctttattattttcctaggctggtgcgtctttggagtcacttgctaagggtgcagtgcaattctctcgaaaatttactgttcgagaactgcaagatcgatggcttactcttctttatgatccaattatttctgctcaagcatctgctcaaatgattgagtttgagcgttctatttcaatgcttccatcgaagttcaatagatttggaaatttaaaagagaacaagtgtgttgctgggaagagaaaagcagaaagtattcgtagttgctactatgctttgcgtaaaagattctgtaatgaaccgtttgattccatggatctcactcttcttgtttgccctactaataacacttacgttggaaatggagatgagcctttatcctcaaattgcatgcttggagaagcagtctcaaacccttttgggcttgaggtttcagaaatggataatatgacttgtgcttttccaaatgatctgatggatgatggtactatccatgctttccatgcaggtcttgaaaacccatctgaagaaaatttttgtattgagcaaaataacatgcttgaagaaattcctcatgttcccgaagaaaatatgccttctaccagaaatgtctctggggtcgaggagatgggagaaccagcagatttggtagacagcctctttgaaggggttgaaatagaagtgaaaacctctccccctttcaatcaagttgatgatggtcagttgaacatttgttctgaatttgaaggaaataaggcctttaattcctctggcgcaggatctgttacaccgtttaacagcatggagtatttatctccacttacaatgatgccagtggataattgtcttggagacagagatctatgcgctggagattcttttcaccttcctgatgattatgatgctaggagtagaagaacttctggctttgatgttcactcagaagtcaaggtgaaaatggaatcggcctatgataattttcaagttcatggtggcactgacaattatttagctgaactatccaattctcttttacacttcaatgatgaagagctcctgtg

SEQ ID NO: 189432 - DNA, 5638 bp, Cannabis indica
attcaatatccttatctgactggtatacaatccctatcttcatatcataaaattcctttagacaaaatcaaaaagtcctttgtcgaaccggtcccaaatctttctttgtaccctagtaattcaaagtcaccctgctgggccattttaattcttcctaataaatcttgcaaataataaaatatttgaggctcccataatttgtataaacttcgcacttttgccaaacaggtaaaagcatcaaactcccaagacggaagctactgctatcaattcaataactgaaatactattactcacacttcttcaatcgtttaaaagcacaggtaataactctcctggactatatcaaaatataatcaaattcttgttagaagggtcactctaaatcacaaatttatcctcattgtctgacaatgttaacattggtacaatagttaacctctgtttcaattctttcaacttaattccactaagagtgtaaacatccctcaacaaatattctgtagcattctgttaattccagaaaacctctaacctcagttgtaaacatggattgaagtcaactctgaactggtttaatccttgtcgaatctatcaagatactatctatatccatttcatactctaagaaacctacttagagtcagaaaatttgcatttcctgtaattagcgtgaagcttaggctcccaatcattacaacaccatccaaaaatttcctctcaaatgccttcttgacttagatgaaatcagaatatcattaatgaaatcatcacgaagtcatcgggtatgaaaaacttctttagaaatacccttttcttgaatcttcaattggtaataaccagatcgaagaccaatctcagagaagacggttctttcctaaaattaatcatcataacttctatctttgataaaagaatacttactcttcatcatgtatttaattaatttccaacgatcaatacacacttgtaaagtttcattcttgtccttcacaacaaaactgacgtattccagaagaaaatactcaaagtagcaatttcaagcctaacattttttttcctacaacaaaatatttaccctcttcaattatacaattatcatccaattcagaactttagatacaggttttacccccaatatcaattcaattcaaaattaatttcccactttatcaataaccctggtggctcttctgaaaaggcatctactccataacaaacctcttactttacttagtaaaattaataggattcgggacccttgaaccatgcccacgagcacaaaatgggtcttccccttctgattcaaaggttaccatttttttcctttacaatttatagttacattacaccttgcaaactagttcaatcctagtataatatcaaatttctctaaattcagcacagctgaaacaaccaactatttccttctcctcacaggttgggaagggtttagaccacatactggaaaaataaccagttctctagtaggctgaaaggtaccaaaactactcagtaacacaccattaaattttaacacatactttcaatcatccttccactctcgctactgtaactgtgggcagtttctttttaacacattaaattttagctttcttttcccatcgtttcttttgtactatttcataatttgttagagagtataaaaatgggcttaacttaaaaaaaccctttgagggttcgttggaggtgatggattcagagaggggtttcgtcagttgtggaggggttcagggtggaatttcacgtggttgtgggatcgtcgaaggtagcgatggcaattttgcgcaggggttggacagtgtactcatatacactttacatatatatttgtagagtaatcacttgtgattctccctcccatttctctctagcacgaacacactgcccagtccgttagggcaattctgatcaccgctccttaaaacatagctattcaaccttagccagttgacgatagtacggtgtttgggtgtaactgccctactataaaattagcctttagaggcggttattttagttgaattataaaaaagggaagctaaatccttttagccttgctgaagagtttttaaacccttttggcattggttgttatgtaataactgatgccataggggtcacacgattttgtgactcctatggcgacggttactacataataaccgatgtcgaaggggctcaaaaacacttcagcgaggccaaatgccacatttcgtattctttaccaaaccctttagcttagtaaacctagccgaaaccctctcaaccaccaccccttcaacctataaatcacattttcccacaatttttattcatttttttttttgcaaaatttctcattttttatacctaaaaatacattgtcgatattggaccatttttttagtattttggtgtaaaccagagctttaaggtggcagttgtggtggttgtatgtaacgccctaattaaaggaacaccacgtgtcgtgattacattgtgttaatcccgttgaccgagatctaataagccaagtgaattaaaacataataattcataattaaaaacaacttgtaataacttctaatttaaaccaaaatattaatacaatcttagatcccataaaatcttttataaaatattaaagttgtttacatgaaagctaatttaagtgacagtgagatttttatacaatcttcctattggacccaatcctcgtagtttagtttggctaaaatatgtacaattcatcaacaaaatcctcaaattcatgactagcctaatattgctttacctttatctgtacaatagaacacccgtgagccaaggctcaacaagaaagcataatcaaactcaaatataacatataatatatatcacatttaatacgctaatgtgtagataactatgctcctacactaatataacacgccattgcacttatgataatgccaccacatcctaagtctatattgtataaacaccatgtgttacgctcacacgactatttactatataaggccttatcaggatttctgttagttttggttaccgagtataacctagttatgctttgatagcacaactcttatcatatatgtataattcatatattatgctctcacaagggtctattctgctagtgtttatcttacacacataactcttgatatatatacatataattcatttaacacttgctcaaatatagaaactttaggaaaataatcccaactcacatttttatcaaattctccacataatatataagtgtgccaccgcgctatactctaagtgtagggttcgctttcatacctggattccaaagtatgaggagacttctaatccataggtgatctcgaacaagtcccggtaaccgtagtcacaattccaagtttaaaacataatagggttaatcttcaatatcataagataattattcatatttaggactccaactatataacaaataatagagcttgtaacgaactttttaacgatataaagaacatctaaaacggagttcggagtcaaaagttataaccaaagcaaaatgaaaaaaaaaattgaattgtcgcctcgtggtcgccacgatcaaactaggaaagggctatcccctattttgggtaaagccttgctgcaactaccataaatttgatcgtggagactgggcctaaaaacccagaaaacccaaatttaacaacttacaacatgcacaaaatcacattaaactttacacatattatgccattggtttctaagaccaaaacagagcgtatgcaagtataatatatctcataataattcatgcctaaatcacacaaagatttagctcaaaaaacacataatttcacacattaaagcttaggaaaactaatggttctcaagctcaaacttcaaattcagctcctatatgcataactccaaaataaccacaaaacaacatcaactagaatcatgaatagatttcatgcttaaactccatattcaccacaaaattaatacacaaaactttggttgtcatccaaggaagtaacacaatacacttcacgaacaccaaacaaaacaaaatcctaggatgagatttcaaaaattaaaacttaaaaaaaaatgaaataaatacctcaattagcttccaaacttaaaccagtaattacacaccaatatctgacacaaatcttgcttcaattctctcaaaatcaagaacaatgaaaaagagaaagaggagaagaaggggttggtgggagtttcttcttaggctgagaatgaattatttttttctcaattttcacaaataaaatatcatagtcctatttaaccaagttatggtcaaatgactagtttgccctataactttaatttactttaaaagagcaccaatagcacaaatgtcagctcaaattcacacaaccacatattaaattagatactatcatttaatggaaacaaatacacttttaatttagactctgaaccaggtctgagccaaaatactcgattgtgacaatactgcgcaaacttattgaaattcacctataatacaataaagcaaacatactatataataatgtagctcattagcacaagagatattaaaattataatttcacccttctcaagttaaaattatgaaaatgcccctatcacataaatggggtcttatattcaaatattctcaaataatatcatacaattgattatattataatataatcctttatttattcttaattaagttaattagggttgttaatccacttctaaatttttaggatattacaattattccctccttacagaaattttgtcccgaaatttacttcaacaacttaggatatttttgtttcatatctgattccaattctcaggtcacctttttgaccttgttatttatccataatactttcaccaatgttagtgtcctgtttctcaagaatttctctcttctaataagcatctcaactagttgttcttcatatgagaggtctggttgaagttccaaggctttgtaactcaaaatacgagatgagtctgacacatattgaaacatgaaacacattatataaagctatcagcactgggggcacagccaacttgtgcaccacttgtcttatccttttcaggattttaaaaggttcaacaaaaccttgggcttaactttcctcttttaccaaaacatttcacacctttcataggtaaaatccagagaaatactatatctccaacttaaaagtcaacattctgacactttgaatttttataactcttctacctactctgagcatggagcgttcgagctctaattttatcaattgccttgctcattctctgaacagctttgggacctaaaaactttttctcacctaacttatcccactgcataagtagtctacattttttttgctataaagtagttcataaggagccatcccgatagttgattggtagatgttgttataaaaaacttggtcaagggaatgtactttatccaatatccttcaaagtccaacacacatgcccgtaacatgtcttctaaaatctgaatagtcctttcgaactatccatttgttcgaggatgaatgttgtactgaactttcactgtgtacccataactcaatgtagactctcccagaat

SEQ ID NO: 189433 - DNA, 2259 bp, Cannabis indica
aaaatcaaaggaaaaaatgaaaataacagaagaaagtgattgatggttggttgaagagggatgggggagatgcacgtgtcatatgcatgggggagtgtgcatgtggtatatatgtaataaaataaagagaaaaggtaaaaatgttgaggtaaccgtgtgtaagtatttatgtaataaaaattccattttgtatttttggtgtaaaaatttcttatatattttctaagccccttattaaaaaagtatatatctttataagaataattttatcttaataaaatatatgtactttataaatttatttatgtaaaattaataattttattataaattgtgatacatgtatatatggggctttttcatttttacacttcaaaacaattttttttttgtcatttttacagaattctacgtagaaacccctattgcaactagcgctgcaacctaaattgcaacaaaaaatcgtatagaaatccctattgcaactaacgttgcaaccactttagaaatccaaaccataaatttaaaaaaaaaaaaaaaaaagttaaaaaaacaacatatggagtaattcccctagatatatttactcaaaaataattttactataatataggagtaaaaataatttattgttatgattgtaacatttgatattttttagtgttttgatttttgttttgatacatttgatttttgttaatttgtgtatttttagatatatcgtgtactgtatatggcttcaattatgtgtaacatggcaccaattatctaatttcttaagacgggaggtttgagatgatggtcagaccgatggagaaggttagacagaggcggacgatggtggagctttgacgttggaactgctttagggttggcaagaggactcctctttcttttgtttatggtatttgaaaaaattataataaaaaaaaagtgtaatcccataataggtggataaacaaaaaaatgccaactttgtcaaattttgttcatattcccacattgtgtgtaatttctactccattgaagtggtaaattccgattcaaatgataaatgagattcaatatcacctataagattttatcagatacttttattttaccatataacatattgtccaacataataatattatgtaacttgtgacttgcaacaagtaaaataagaaagtcgagttattaaaacaggctataagataaacacaaacaaatccagacatggcataatataaatagttttacaacagtttaaaattgaagcatggcaaaaagaaatatcaaaaaagattagttctgaaatgtctgttctttttcaaccagattcagattattttccaacaaagctggatcaaatttctacaaacacccaatagatgaagaaaagaaacaaagataaattactttttaaaaaagagaaaaagccacagaagaatattaacttgccattggatggttagagatgtactcaatggctagattacaggagtcaatcttatcagcttccttatctggaatctccaacttgaactcctcttccaaagccattacaatctccacattgtccaagctatccaatcctaaatccttctgaaaatgtacctcaggagatacctattcattcagtaagacaaaatgttatcagtgagttaaattagaaaaatgttctgttcttgttcttaatgcttctaacaaacattttactagcacacaactctacatcacatattaaatctacatccacattcttaggtttctagactggaaagagttataaaagatgtgtaatgcacagtgaaatcacagacaaaattagataccaaaacaaaacaaaatgataccataatcccaacttccagaatagcctccctaagaaaacatacaaactcaatccaaatacccaacttcatagtatcttgtaaaacagtttctaagccaattcattatgaacataactcaaacaaaagaagacaaatgggtcaaaaatctcagtctgcgtcgattttactatgaacttctctagcaactaagcagttcggcacttcccatgctagattttggaaatgaaaccaaaaaccacacagttactcaaagcaacacaaaaactagatcatagatcctatctactaccaatgttcccaaatctgagctccttttttttctccaaagaatggtgcttttctcaattaacaaagctattagacacccccaaatcattgtgaaatgtcaatgttaaaaaattagaaaaaaaaaaaactactc

SEQ ID NO: 189434 - DNA, 1123 bp, Cannabis indica
tgcggattggattggattagatagtgcagattgaattggatcgattatttatgaacacccctaaaagaaaacgaatttttttttaaaaaaaaaaaaaactgtgacttaatatccaatatctcgagctaacttctttatcatttaattatatattacatactaattaacttcttttagctatagtattatatataagtatcattatatataaactgatattatgatttaattttttaattattagcatgttggatttgaatatatataaaccaacaataataataatgtggatttttcatgaaattaaagggaaataattttcaaaatggcggtgagataatattttcaattatatagtttctatgctaagtagtatagttggtaaattttaaaagagcaatcaattaattagggtttttttataaatgtactcaattatattcgaaagaaaataaataatctgaaaatacatatgtacatgtaataagtttttgggtaattttaaaatacaatacttaaaaaaaatatgtaccgatataaactttatcggtattaaaaaataatttaattttttttaataatatgaagtatttatgtatacaatctattataacattcaagtttaatttaaatctgatattaacttacattttaaaaacatatatactctccaataattatcatcatttatttattatcatatcatgtaaaaacaagacatgtgattattattattttaggaagcatgtgcttaaattttatttctttttgagtaattaattaatgtagagtatatatgctagctagagatgagatttttcttttaatattaaccactaaaactctcatcactataataatttttttctacttttttatataatgtaaatatatatagaacaagttagtgtttgaattgatgctaataaaagggggcataaccctagagaaatggatcacttgcaattgtggtgggtccaatattagctttcattgaaaatgaagttccaatgctagtaataataataatataaatgaaaactaatttataataaatattaaagtaaaaatatgtactacacttctaaaggccgttttggtaattttttaatttaattttttt

SEQ ID NO: 189435 - DNA, 4300 bp, Cannabis indica
actattactttctctctctaaaaccaagttcttccctcctctctctctctctctctcggtttttgtggatcaaagagaggaaaagaaatgagaggttccaccgtttttcagagagtttctaaagctttcaatgacaatccatcgctctcgaaactgcttgtggtcgtcactgtcaggtattctacgatttgtcttacttgttctgtttaatatttgtatttttcttcaggatactctgttcggtttaagtttattttttctccttgatgctgaaggtgttagtatagatttgattttgggaattttaaaagttatttttatttgttattttgatttggttataagaattatatatttatatatgtatatttgttgttggtattagattttcttattatttatgagagctgttgaaatctaatgaaattaaacgtacgtaggttttgttgattatacagtaactgcactatggtattagtagttattatttaccaccctccagaaaaatgggacttttctctatgagcatatattcgattcaaattcgttggttactattacatttgcttttgagtcctgtaatttaaaccatatgtggattttttattttctatctttgtttatattatgcatgcgtaaagagattattatttatttgtgagatttgaaacaatggaatgattataatttgttgtttcttatattaattctttacttggcttgtgttttttgatatttgtttgcagtggtggagggcttgtggcatatgccgaggcaaaccaagttaatagcccccaaatcacaaatgtatctgaggtggatagtaagaaaaagaaagtcgttgtacttggcactggctgggctggaacaagtttcctgaggaatctgagtaatccctcctatgaggttcaggttgtatcgcctcgcaattattttgctttcacccctttgcttccaagtgtgacatgtggtacagtggaagctcgcagcattgtggaacctgttcgcaacattgtcaggaaggtagtggacttacctatgtgtttcaactgtttagaattacataattgctgtcttgaaaaggagtagcttttgtcctaattttaggaatgcaaaatttgatttattatcattgatatctttttctgccgctcagaatgttataattttgtattgttgtgagatagtagttagctgagttactgagcaaaagttggattttttcctgaatcagaaaaatgtagatgttcaattctgtgaagctgaatgtatcaaaattgatgcaaaaaacaagaaaatctattgccgatctaatcaaaacaacaatttgaatggacaagaagaattcgttttggactatgacgtgcttgtaataggtattggagccaatgtgaatacttttaacacccctggcgtgatggagcactgtcacttcttgaaggtattctttgtgattttgccaaacgaaaaatgtttggtttctgtctttttggacatttggcagagcaaacactttaatatgatatgttttgcgtactaagggacagtcattactatatgcatattatgaaaattctcatgcaggaagttgaggatgctcaaaagatcagaagaactgttattgactgttttgaaagggcctgtctaccaactgtgagcaatgaagagaagaagaggattcttcattttgctattgttggcggcggcccaaccggtgtggagtttgctgcagagcttcatgattatgttaatgaggatttggtcaaactatatcccggggtgaaagatcttgtaaaaataactctactagaggcaggaggtcatattcttggaatgtaagtaaaattttaaattttaaatttgctgaggaactactgtcactgagatgatcaatttctaagtagctatattgtagaatgcctttcaaggcttttatatcgtttcctacctagatgattctatttaagcagcacaaacaaacttattctaatgtttcgatttagtcagtggggtgacggaagcataaattgatttatattgtagaagttgaaattaaaatacttttaaagtgaagcatgtgatatgaattcttggatctgactattgatctcatgtacttgtaggtttgataaaagaattacagcttttgctgaacaaaagtttcaaagagaaggcattgatgtgaaaacaggatcaatggttatcaaagtatctgataaagagatatctaccaaagaaatgaaaacaggggaaatttctaccataccttatggaatggttctatggtcaactggtattggaacgcgccctgtgataaaagattttatgatgcaagttggtcaggtgagtgtcgttctacaaatatgctaaattttttgctgttttgtttgaattttttctgctaaacaagtattgttgaattgcatacaggctaataggcgagccctggcaactgatgaatggctacgagttgagggatgtgacaatgtatatgcccttggtgattgtgctaccatcaatcaacgaaaagtcatggtacgtgcccttatttttgtcttatagatcaatcttgctggttgatgaattttttccttgaagtgttccctgtcaatgtcatataagtatagtcttccatacacaattgtcttctccttttccaattactgaactctgttgttttcttctatgatgggaaaaagtagtatcctttgccaattttcctcaagaaattgagtatgactgtacttatccttttaccggaagaaataagtttgtccataaaagaaatatagatgtgatgattagataatgttaaaactgttccatctgttgattcggcatgtgttgagggagagttaattgtgttcattctaaatgcatcacaggaagatatttcagccatattttccaaggcggacaaggacaactcaggaacacttactgcgaaagaatttcaagaagtccttgctgacatctgtgaaagatatcctcaggtggatctttatctgaagagcaagcagatgcgtgatattgttgaccttttgaaggaatcaaagggggatgtttcaaaagaatccatagaactgaatattgaagaatttaaagcagctctttctcaagtggattcccagatgaaatttcttccagctacagctcaggtactaatatagttatcatttcctccctttacttgtagattccagcattgattattgaataagtgtgaacttaccgtttatcatccgccatttcaggttgcagctcagcaaggtgtttacctagctaaatgtctcaaccgtttggaagagtgtgaaaaaaatccagaaggtcctctcaggttcaggggatcaggtcgtcacagattccgccccttcaggtaccaactgaacccatttaattttttgctgtgtatggtcatttatactagtggtgaaattatcatgctgacagtgatgtactgaagatgaaagaacaattctctgaactaaacaaattgtagtgaatatcctttttccccacttcacaccatattcagtatagtcattcatttttattgtgtctgatcctttctaaaaggtacaaacatcttgggcaatttgctccactggggggagagcaaacagcagcccaacttcctggagattgggtttctattgggaagagctctcagtggctctggtattctgtgtatgcaaggtaagtttcgcttttgggttagtaattattattattttaaattttggaagaaaatgcatagtttttatgcatccttttgtgtttcaatggttcagcaaacaagtcagctggcgtaacagagcactcgtggtttcggactggacaaggcgtttcatttatggaagagactctagccgcatatgagcttgttgacatgaataaacctttccaagattgctttgcgaaaaagcatgtttgcaatttttgacaataataataagaaaaaagttttggttttcttaaattagattctcattactatattcaaaaacagtagtgagctgctgttgcaataatgtttcaatctctatattttgattttgacctttgtaaaatttacttatcaagaatcaaaagacgacaaactcccattcttttatttataaattttgtagtaagttcaaaatttccgttttatgtagaagttttggctttagaattttatactttttgttgtgctgtattctttttgtttcaataatatttgagctgtctaataggatccccaacatttctatttaagactttagtatcagctaatttatttaaatgtaattgttttatt

SEQ ID NO: 189436 - DNA, 1047 bp, Cannabis indica
ggcgtcgacgtaacgcctgagaagctaggaagaaagtacgccgagatctacatggcgttggacattgttctcaggggagttagcaatatccgactcgcggccatgctcgcttcgttgcacggcgatagcattgcgaagatggtacattcggcgctcgattctgagaacaagatccgcggtgctgataattggaccagtgtggaggtgaattccgttaaacactcggcgaacattgaggtattttcccacgcttcgtttgaaatgccgccggagactattgctgccggagacgagatcgctgctactatcgctccggcgttaccgactgagcagttgcaagatcagaaggaggagatagaagagattgaagctgaaaaggatccttttgctgctagtgataagattaacgaaccggcggagcttgttgggggtttcaagaagaacagagacccttctgctactgatttgactaaagctttagctgggcttgaggtaactacgttgcctcctgcggaggcaacacaatcgactcatattgctgttgaagggtttgaaggtgagtatggtggaattgagtttgggaatgaacaagcttctcttggtgaaacttttgaagggtttagtgatgcttggggtggaggattggatccatcggaatttgttggaccaactaaaggtcctaagacacaaggtcttggaggactcgaattgcttcagactggtcctgataatgctcctaaagtggataatgctgcagccaccgggggtacaggtacgccgcttgatgaacttgttaagtctactgaaatgaaaggaccagagatgtatatatctgaacagattaatgttgagtttagagaatcattacttgctagagtaggattaatgggtactgtctatttgaaaactttgcctactaaaacatctggtgataaagaaactgaattttcattccgagttgagggcacaacggctgttaagagatttgttattcagagttctcgtgttagtagtttaggcaatggaatgttccatgttaggactgcc

SEQ ID NO: 189437 - DNA, 4353 bp, Cannabis indica
aaaagagatgaaattcagctttttattttacccaaattacactagaaaaactcgtaatataaaaagtgagttaaatcttcatttctatggtactaaccatcagagcttcatacacccttccaagcaagctcaaatgactatagatggacatattatcaaatttttttgctcagtcaaaaaacgttaatacttgattagtaagaagaaatttatctggttggtgaaacatcataaaaggagacaaattgcaggggtaaatcggaaaagtcatcgtttctatcaagcgccaactaggaactgatgtgctgcgagttttaaacttgtagtgattcaacagccataaaatttcacaagagccaacgaacgaatagcacattgaacttaaaacttatatactagttgggcatagaatttaaacttgtactctagttgacacaattttcatgttcaattaccccatctgaattcagataacgaactctagaaagatgttcagccacacatctaccatgatccttcagcacccgctgttggattgaggaaggcggagaatccccagaaagtcttcaacgagtaaggctgagagattgttacaccttcgtcggtgatcttagctatctgcaattgcatatgggaaatgtgtcaattcatatatagtatatgccaaatccaaaatgcttcaaatcagaaattgacattgatattacaaacagttatgtcagttgaagaaaaatatgagaactaaagggagaagaagagaattatcagccactgggagttgcagagtgaaaaatacacattgcaagaaaaactgacctgaagcttgttgatagcagacctatcacgataaaggagaacacgcatgcatttctccagtatcttcacaccatcctcaaaactcaaattttcatgccactcctcacgaagaattggccgtgcaagatgatttccaaatccagttgccacatgattatcctcaaaatgaacaccaatcatgcttacctaaaaagtgcagcttagtacatgcacatagtttgcaactgaacatgaaagaaaaagtactcaatagaagcttaccgtgccaaggtacttttgtccatttttcactccaccaaggacaagtgaattccaaagaggattgaacttattgcgtcggttgtacatgactctggtcagatagttatgaacctctttaggtcccaatgagtttccatcatcccacatgttgtcatataggctacaatcagaaccagaaatgaaaaacttactaagacagcaataatactagcaagaaaattagcttcaggaaataaagaaaaacaaaactcaattagaagagaaacaagttttaagcttgtaactaaattatttattattgctctattattcaaaaaactaaagcttacacgagttcatcaagagtacgcattagctcctgaaaatcacttatttctccactagccccaagtagagaatgctttccaataggcttgattcgctccacgctcttgtatcgcagtgtagacccatatgaacctgtccgaaacaatgacaaaatgaacccaaccacaactgacttataatatgcttgcatgactataaacagacttagcatcaacattcgatccttactaatgctcctcaaacttgaagacagaatatttcaatattaaaaaaagaaagaagaaataaattaactattaccaataacaaaaagttaaatttaacaatatttgaactcctatctcaagcgaagaccataaacataaatataacaagaaacttatataaaatatggaagaaagatcaaactaacctcccatatcagaagccattaaaataccatctttgtatttgagagcaaccacagatgtgcctgtcacgtatggatacctaaaacataacaagtacgaattaaaataaaacactttaagccctaagatacatttgtacacacatactaaaatatatacaaccaaggtagattcaagtgaaaagaaaaattactgtgtcctctgagaatcagagctcaaaaggttggcatggttcaattccacagactgcatacataagcacaatgaggtcaaggagctaatacaaaggatcacattgacaataccagctatgaaacactattgattgaaaatataaacttacactcatttttccaaaatctcaggtgaaacccaaaataaaacagcttcagcaaatgactagcttcccactgcaaaaggcaattcaaattttgtaaacaaataagcataaattcatctccacaactcccaacgaaaacaaaaataatcaaatggtgagaaatagtcaggaacccaaatccgcctatgcctaaatcttttcgatcaaaaacttgaaacccatttatagaattcaagaaaagaataaaactttctcagatgatctcaaataatacacacagagtccctaccccagaagagaagctgcgaaactcggagaaataccaagaggattaattccgagtagcaatgggggtttggggctcaaagtgcaaaagttaggaaatgagtccaggtgaaaaaatattaaggctcagaagtctagagctcttttccctttgctcaacagaacctaacactcaccattgacaaatatccctctttatatataattgaaccttttggatttcaaataaataacacattttgaactctcaatgcaaatcagatctaagtgattcggcgtttacaataacaaaagcaaattcccagttcatcaatttattatctttcatggaaaatagatagttgattataatttctgagatataaacgaaagaacaaaaaatcacagaaaaccctaataaaagtgtaatggtgtatagattatgatatagaatatagatgaaagagaaaagcagagtaagagatccatacctcgagagatgaagaaagaacaatttttgggtgagaacgaagaagtgagggaagaatcgactcttttaagtgtgggtagttgttttccctttgcacaagaaaactcaaatcactccaatttcttttcttccatttcttctactcttcatttttagggtttgtggcaataaagtgtcaaaatgtttgcattttagtccttaatgtttttctttcacattaatggcccattcactaaaataaaatggaaattagaataatttcaaaaaaaaaatattaaattaaattatgtaagacctcatctaagctctttaaaaacgttagtggaactttgattcaccttagaaacttcatattgcttgagaaaatctcatcctaatgcttcatcacaacttgaggaaatcctctttttactatgttattagttgtgttacattttttctacttgttatgtttttaagaacattgagtatattttgggtgattggctttacgaagacaaccttgggtgcttgatatcatagtacctttctcaatggagttggcttgaagttggagcacttattgatgcccttgttaactagccacatgtattatctataggtttaggtttcggaacacactattgaatgcttgattttatatatgctattagatgtttatttttgttttttggttttgttaaaaattggaattttcattgtatagtatttggtgactgaaaaactataacaattattatgtaagtactcagaaagaactggaatctcaaatttttgaagagcaaactatttgtttgactatttgagctacccctcttaagtattacacatgttcagcaagtgctcaacttctgtagtacccttttaggtatcgctaagttcactctcaagtacactctaaggttctcaaatttaaaaacatgcttctaatgctcaagttttgctctcttttgtcttactcattatggcttctacacatgtccccgaatatcttcgtgtagtcatcaacttccttactcgcatttccttctttgcttcctcaaagttgcttgaagctttttggaagaactctcagtggatccttgcctccactttgtgcggttgtttccatcttttggaagtgtccaagttacattttttcctcaagcataaaataaagttacaaagtttcatgatataagtcgttcaaccatatgaaaacatataataaacaagtaataagcatccaccctttggtttcacacattgaaattgcattactcaaattttttgcattggcctagaatacttcaagctttggcttatgtttctggtaatcatttctcgtcataattttctgtctacttttgatgaacggttttgcgggtgggtcccaccgattatattgtttgtttattgattgcaactggttgtgctaggtaatacaaataggaaatttaaaaata

SEQ ID NO: 189438 - DNA, 684 bp, Cannabis indica
attctttacaattaaaaataattgtatggggttttggtctggaggtatttgcatctttcaataatcgatcataattcatttataagttttacttttcgaatcgagcaccaaatgtccatttaagttttttgtttttttggtctcttctccaagtagattgtttgagaagtctaatctttctatctctcatttgggttgcagtatgtcactgcaaatggttgcaggaatttgaccaatgtcccccggaaaataccggagatagaagctgtaatggcagggggatcgtggccatagtacaatgcctctgtttattgacaaagtggagaagaaaacaagtttgtgtgcttgtcgtgaggcattgatgtgctttcgagtatttttcttttagtttctctgatttttaaagaggttaagtgtatgcttttgttgaattctagagatatatgctcttttgattgttggattgtgaaattgtggattattgtgaagattgataattatgggaagtgccaaaagtaaggggaggtgttgaccaaatttttgtggcagtatattttaatttttggtgagattttgtccaatggggcctaaaaggagtaggcttagtgattcgggtacatcatcatcaagccctcctcgtgcttcgaaaagggtggattatgatacaactcgatttgttagtaa

SEQ ID NO: 189439 - DNA, 1020 bp, Cannabis indica
ttttttccctataaaaaattcaaaacatcatttaatacctatcaaaatttatgagtaaatatatatataaattcttttaagactcgtccctttatgacattgacattttttttttaccgtaagtttttaattaattagttacatatttttaggaggtggggtagtatattttagtttctttggtaaataattttacatgaggatctgaggcagaaaggagaaaagtctatctattgctttaccactgatgagaatatatatctttacgagttatgatatccaaccaaccaggtgtgttaggagaggaccatctaatgatgtgggccttaattactcattacaatatcaatcattataatttgcctttctttccgggggtgaattttatagattaattaagtttctagttacttattttcgcttatccaagggaaaggaaatagaaattaaaaggtacatactacatatatagtccattgccacaacaagtagaagatattcccaacacagattgtgtggaagacattaagccataagcaaagtatatgtgatcagaaatgttattggtgtgacatcaaccatatgtattgtttttagggtgtaccttctgagagcttgatgggcaagctagttatgactctcagcctgtggttgttcttgagacctgaatatttatttatttatttatttttgaagtggcttctcattgtctgaaaagctctttttgggtccatttttgaaagtattatactatatatatattattattatattccgctatattgtatatttcatcagttgcaactttgaatgtatgcttaatgcataatcatttttaatgttactcttttacaacttttcattttgtctacaaagttctctgtgagacatactttttcttgatgataaattatagatgatgtccgacatatgcgttggtgcttcaaaacctctagaataggatccaatagttatgcttccaaatagatatttacataaattggctgtctgatataaaaa

SEQ ID NO: 189440 - DNA, 2852 bp, Cannabis indica
tctctctctctcctccaatggattttgaaccgagggctttgctgttgttgctattgttatcgtctctataaattccctgtctttgttttggtttggtttcgttttgtcttatccttcatctgagatcgcagtcggaatttcaatttcaaggaatagggatttcctttttcgcttttggatttgaggtatgatgaatgttccagttttgggattatttaattagggaaatgtatattttgatgctgctgattcgattaggatttagatttagacatccaaatatttggattgctaaagctttgaactttgatgttgtcacatatttatcaaattaagtgtttgtgcttatatggattttgtgtttaattataattaatgatctaaacttgtatatcgattttaattgttttaattttctatttttagcacaagttcttattgggtggattttgattttattctaaatttatttgcaggcttcattatatattaattgaagtgtttaatgtcttacacccttgcaaattaatggtgtctgcattcattgtcaatgagtatttgattcctcaaacttgtgaaccagttttcccacttgtgaagaaattagagcgaaagataagtttagatatattagattgtttatgtttgaataatcccattgctggttcatttggttgagtgagaatatgtaagggatgatatctgctacaatattgaagattgtgtcaccctgttttaaaccttcggttgaaggggatagagatagttcaggtaaagccggagatgcaaatggcagggttgatggtttactatggtataaagactcaggacgacatgttaatggagacttctcaatggcagtggttcaagcaaataatttgttggaggatcaaagccaacttgaatcaggaccgatgagctcgttcgagtctggccctcaaggaacatttgttggaatttatgatgggcatggtggtcctgaagcgtctcggtttgtaaatgaacacctgtttaaacatatcaaaagtatgttcttttgtatcacacactgttagtttctctcatgttttggttctctcttatttagatacctaattcattatttttactgacttcacagctattcatggtgcagaattcacatcagagaatcaaggaatgtctgctgatgttattagcaaagcatttttggcaactgaagaggattttctctctctagttaagaagcagtggcaaatcaaaccactgcttgcttccgttggctcatgttgttggtaggcataatatgtagtgggaagctatacattgcaaatgcaggagattccagagtggtgttaggaaaaactgaaaaaagctgttaagcaagtcaaagctattcagctttcagttgagcacaatgcaagttatgaatctgtgagagatgaattgcatttgttgcatcccaatgatccgcagattgtggttttgaagcacaaggtttggcgagtgaagggtataattcaggtaaattcgatatgtgcaagccttgctttattcgatatgcattgcttaagcccccttgacaaagatgacaccttagcttgattttatatttgcagatttcaagatccattggtgatgcatatctgaaaaaagcagagttcaatagagaacctctactgtcaaagtttagactgtccgaaactttccacaagccaatccttcaagctgaaccggcaatatcagtgcaaaagcttttccctgaagacaagtttcttatatttgcttcagatggtctatgggagcacttgagcaatcaagaggcagttgacattgtccatagttgtccgcgaaatgtatgaacaatcaatcccttttctagtttttttttctagatagccatattttcacatgaatgatgtttgaaacttcacaactatgcagggcattgcaaagaaactcattaaaaccgcccttcgggaagcagctaagaaacgagaaatgagatactcggacttgaagaagattgacagaggggtgaggagacattttcacgacgacattactgtaatagtgttgtttcttgattcgcatctggttagtcgcagcgtctggcgtggacctttaatctcagtaaaagctggtggctgaaacaatcattcatcatcttgtatcaaatcaaagacaattttacaggaatatttcttttcttttttattatttgtttttctttgatcttttaaatgtatagccatgattctttaatttgtttctgcatcttatcttgtgaaaacaagacattatatggtgattaccaccacataaatctatcattgaatttaccttcgctcctttgtttgtgtttacttgattatatattattatacaaaagttaggttaatatatgcaataacaatacttaattttataaataaacatattatatgagtctataactatagatttgaagaatacttttgttgattcaaacagaagaagctaaatagcggaagcgtaccttaatctatagatagtaataatcttaatccatcctaagacgagaatagaaaattggctcttgtttcttggggaccactactaatttttaatctcagttagttaggttattaattttaagtatttttaatttagcccctcaatacattagaaatattgcttaaggtatctacacatttagctcaacaactttaatatccaatgtcctacaattactaaaataatcactttattttaggtcgaacttcaaatagcaatacactaatatacatatgagttcatatttaggattttaatccaaaaacagactctaagcaattgcagttgataaatgtttttatttatataaataaaat

SEQ ID NO: 189441 - DNA, 3903 bp, Cannabis indica
aaatagactcgtagagtcagtacattttttaaagcacaattttctattaaattcaattagtctacccacatttcgctttccccatcagacgatgcggagaaatcttctagttgttttactttttttcagtataccctttcaagctgcttcattgcctctagagtgcaatttttcctattggatttttcctcatttgtttgattgaaatacttaaataattttattattatgtaattaaaaatactgcattttgtatcccaccaataatattcacctaaaagtcctcacaggtagtggctaaagtaaatgccctaccccagaaaaattctatcaatgaaactatgaaaagattacattacccttcaccttgtcatagacaaagatctagcctagtgtaacagtaacatgcagaggacaatgattcacagaatcaaagaaaattcatgcatcgatacaataaaaggcaacacaaataacaagaaatgaaatttagccaaaattattgcaaaattggtaatgtacactttccgttaggatacacaggttctcttcaatgtatgttgcatgcatcagatgagtaacgagtaatcctttccttaactttcactatacaagtaaacatattaaaactgaactcatcttcagaaaaaaagaaaaaaaataatagaagggggaaaaatggaagcaagactcctcgagtgttgcttgtggcaactggcaaggactttggctcttttattcagccacttggctccgatggttgtgttataaaagaatgcacatccttgtctggacaatgttcggtcacaaaataccgtacgtatctgcaaaattttattcccatggttgaaaaaaatctcccgagaatatgtcaatcacttaggcggttgatgcaactaggtaagcgcttttgtcaaactactttactctcatgcctactgaacacctgatgagaaaccttgttttgggctattccagtttgacgcatcctatagggcctgtcattaccgctacgtctattttcaaatggcgctgccccaagaatccccaatgagctggggtctgatattcgggtcccattactcaaagatctttgaggtggggcctgaacttggatatgactctcggtttctgctcttctccttcgtttccatgcttcaaatttggctgtgtctatacctttcagaaagggctctgaccctgggaagttttccatacttctgtaacctctttgcctgaaaggatttgaatccccattggcattagcatgggaaggacctgcctcctcaccacgctctaattttagtttagaataaatttgatgcagtctctccccagacaaatttgaaaaggtagacacatagttccacaatcgcattgtcatccctacacataacccaattacaaaatgaaacttaacaacaaatttgcttttatgcaagatcaacaagacaaagcatgagagaaaacatactgtcttgtctgtatggctcctcctcatgctcaataacaatttgatctatcttccgtccaagaagttgtaaataatttctaatttttgaaagcacctgacaaaaacaaaaaaaaaacgaagaaacattctattagttgcagtatccagcgggggtaagaaaacaagaaatgcagaagtaatacgtaccttatcctttggaagattagcactggtagtttgcaatcgctgaagacgccccaaagttttcatttgatcaaccattacatcttcacaccattccatccatttttcttccttaaacttctcatatacctcttcattatctgacatttcaccctcctctttcactagtggttcaactttttgggatcttgcagatcggtccttgttcattttaccagcaatcagaacagaccccgcttttcctttcttggctcggctttgagatataggtacattaagaatatttcctctatctttcttagaacctttccgacctattttagcactggaatttttccctccaaaagctgcgagttcctgatccacatgcacccaaaatgagttcacgcaatccaaagaccaaaccaactaatatgtaaccaataaagaaaagcctagtcaacaaatactagcaatataaaagcaaaagaaaagagtcataacagcatgaaggacttcaacttaaacatagcagctagaaccagtaataaaatcatccataaagaacatagcacatgatggtgctggtctagagaaaacccattcatgacacagacaagttagtgcaaaaatttcagaccatatctaatgcagtcagcattgatgaaggccaaattagaaaatcataagtgcaagttcacacatacatagattccaaaaacacaactttgatagactttaaactttatcaatactggactaaaataataattgctttgagtgccccactccaatcgattactagcttaaacgagaagacattatgatggtaagggaaacattaccatttcaagtagagcattagcacggtctcttaaattaggagcacgaggtagaaaagtttcgtgatgttgaagttccactggagcaatcttcttcataaggccaagcctttcgtctaatcttatcttttcccaattgccaaatccatggtaatggattcccaaaagtaatcttgcatcatcaactataataaacatagtaaaacacctcttttatcaaataaaataaatgaatttcaagaaaataatcaacacatactttgattccaaccgcatccttttgaccagtttgaaggtttcaggtaagtcaaggcacggaattgtgcaattgggtcttcataacgactgatgcgcttagctaaaagttgaagttcttgaacacgtgagaatacatcattagccttcacaggaactccaaaaaagtccaacaaggggccctagagatagatgaattccacataaactttttacataatgaaagctatataatgctcaagaacatacaaaatccgatagttgaagtcaatagatatcataagtgaaaaaagaaaacaaaaaatcaaacaaacctttgggtccaaacttcctacttctacagcctctttactgccgtctatcaatatattgaaaagctcaatttgtgcagcagtttgagctgctgcaactgcacctccaacctcctctgctatcaagctgatttggctctcatttccgaatttcaggacctaaattccaatcaaggtagtatgaactgacttataacgcaagaaatctaggacaaacataaattccaattgacaaagtatgaaccattgatttaccggctccattggtttaatccgtagaatcaaaaacttaaagttatgtcaagttttcaatgatcgaagaatatgaagggtaaccccttagaaaccttttcttgtaaatcagcttttaacatgatagtgggagaagtatattagggaagacttcccttgggtaaacatcttgaaaagtcctatgcctcctaagctgaaggtatttattctaaatgttcatggctagcaagaaaaaaaactactgtgtgcttatccccacggtggcgtgttatgtggaataagagcagggaagacaacaatcacctatttctacaatgtcccttttctctcagactatggtttagacgtctaaagaaactcaaaattatgtagtgcaataccaacgaatagaatagacctccttaattaccattgaattggaaaccaagctaaaaagttgttttaagttccctttctctgatctaagcaaagattggcataattcttcgcaattttgtttaattttttttttaagtaagatcttctacaacttttttttttggaatatagttcttctacattaatataagcctgaggtttgcttcaaatgaagagagagagagagaga

SEQ ID NO: 189442 - DNA, 4596 bp, Cannabis indica
tttttcttttatttttttgtttgtagttgttttcaattgttgtttttgacattaattatttatatgatgacgatcgaatttactggttttgctctatctcgctagaattaatggttatttttcgggtgtgtttgtgttgctgtagttgttctatgcgtgggtgtagaagatggagatattgttcttgatattgtataaaagtaagccgtgtgacagtaaaattgtaaatatttgtacaaaactcagtatttttgtaaaacccccatatttctatttgtaatgcaattagttgggcctagttgagcccattgagaacaaggcaagtaagcccaataacgagttttagggttagatatatcaagaaggaaaaagagagcgacgtcagcttgataattcttcagttcagatctaagggaaagatcgcttacctcaaaacaactcactctcccgttgacgtacgtcgtcgcacaggtaatattttctgtttttatgtatatattttgatccgacgaaatttcacgtttggttactgagaaaatcgcatgagaagaacaaatcgaaacaaaagatctagtccttggaattttcaccgactgccactcttcattccaacattggcttttgatcccaaaaattacatttttattctccttttaattttacagtttttttcccctcttttgagctgagattttatggagttttaacgatacacctgtatctttttggcgagaaaacgattaaagatgaaataaacggtcttttatctagtacaaaatcatgtagtagcttgaatgaaaaatttttgatacttgtttcaagtacaattttgataaaggcttaaaatgcatatagtgttctgatatctgttctggacttggttgcttaagttcttttaagagaatttatagggattgttaatcatactaactttttaggcagtaggatgaggagatacagtccacagtactatagtcctccaaggagagactcgagagactatggtggtcgaggaagaagcccccctagaaggggttatggtggtggtggtggtggtggaggcggtggaggtggtggcggtggcggtggcggttatggaaggcgcaaagatcagaatggaagccttttagtccgcaatattcctcttgattgcaggtttttgtctatactatgccattgtttaatttaattgtgtagctaaaatgtttcatgacaacttttaatacctttctgcagaccagaagagttacgggcaccatttgagagatttggagttgttagggatgtctatatcccaaaggactattacacagggtgagtctctttgcataaattgccaaaaacattgtgaatgctgtggctagatttgctttacattttttgtgcttccttgattgtacagtattgatattaaaattgtagcaatagagttgagattctgcgctagtgcatgtggaaggcctcttaaccagatttcatgctatgacttatcttatctgggcttgtagataagttacataaggatgccgacttccttgaagttaactgcaattagcagtttaaaccctttttttggttttgttttatccatttttgcgtagccttaggactgaagttcttgggattgataagacaaatatattgaattgttagtcgttgcagatgccatatcacattcgcctactacctagggattgcgacagtagggcatttccttttaaattttctaaactactcataaaggctttattttcttcttttatagtggatttctgaactggtttgtcaggggtgtgttggtttgaactttgaagttaaaacaagcccaagccctacatttgatgaaggccttctgtttatctttgcctaacatagtggtatatgaagcttgttagagtaatgctcaaatgaagcatgttccatttatgaagagatattttttaagtacactatcattagaagtttgatgaggaagaaggttgatacttggcattttgaagcctacatttgaagattttttagtttcgagacacgttggtttcaagtgcttcttataattacaagattttgaagactttccaagtcatttggatcttttgaagttacctttcatacttgactgtaaagaaaaggtcagctactaagcctcaatatacctgctttgtataaatacagtatccacttatgtggaagtgctccaaggctaatgtgagatgtgtacgactgtaagttataatccataatgataatgtgggtaaaattgtatgctgaaatttggccattctgtgtcagtatctactaatattgtgctttactttgaatgaagtttgttcctttttgtctgcagggaacctcgaggatttgcatttgtccagtttgtagattcttatgaggcttcagaggctcagtaccacatgaatgggaaaatttttgctggaagggagatatcagttgttgttgctgcagagaccaggaaaaggccagaggagatgcgtcaaagaaccagggttaggtaatttgttctcttctctcataagaagataaaaagaaaaaaaaatcatacttttttccttgtatatatgttttgaaattctaaacattttgtctctttcagccgagggcctccatcaagttatggcgaaaggcgttcctcttattatggtgagtgtctacttaatattcttgtatcatccttcatgtagtgttgattttttttttatttagtttttatgttttcttaattttaatccattacccaaatcattcggggacgtccaattcactgctaaattattggtcgcaaagacaaaatgctggactaacaactatttttacttctcaatagttacatggctatctataaatcattacaactttgtatttgataaatatatttttattgccttttgaataagctaagtaaaagtctattctcttttttaatgcaacctcagggcgttcgcgatctcgttctgtatcccattcgcgctctcctcctcgttatccgtcaggttctagaggtcgataccgttcaaggtaagtagtctttgttgcatgtgtcaacttacttttgttagtagtgaagtgtcaactcaactggtttttatttaaaccctggcaggtctcgctctcctgctccaaagcgcagggctgactactctgtttccccggggagagatgctgagcccccacgatcaccaagaggtccaccccgggagcgagatggtgataacaatcgcaggtcatattctcctggttatgacagtggtgctgagaaaaatccaactaacgatgggtaaggataggactataagagtatctcgctggcacttagacctttatagtgaagcaatatgattctcactctctaccgtattatacttcgtagatgttgaagagcagttggtttgtgttttaatttaatccatacgatttgtgcttattatcataggtttataatttcatgttcttgttatataggaaatctgcatatgaagctgaggaacctcaaggtgagtgggttagaacatccatatcaccacctggatcgaggcgtagtcgataattgggtcgcagagagtccatttggttgttaatgttggccagatgatcattctataggttaaaacatgttctttcgtgagatgcatgttggaaaagtaacctctggtgagatttgctaattgtgattctggatgaagacaactatatcatataaatatatatagtatgctctgctctgcggttgtgagaaactatagttagtggtagtagtggctttgtttgttgtaatgaatgttgaaacatcaactatttacttgaatggtttttcagttaattaaacttccaacttcgttatgtcaaggtacccacaaaaatagtggtaggaaatttgttgaacgagataaaatacagtttgaaattcaaactttgatcttgacatagaattgaagctgaaaattcctaagtttgaaagctaaaatattacaattgctgcagttcacaagcgaaagacgtggcaagactagagtagatggtgtgaactaatgaagtttgtgacgtgagtacttgtaacttttagatctgaaagtcaacccaataataaactattattcaatcttaagttatcttcctagctatataaattatcgaatcggtaaatattataacataaaggacggtaaaatttgaatccaaattaacaagtttttaactttttatttaaacaaaataaaatagaaaatttttgaaaatgaaagagtacaaatacaaagccaatacttggcctaaacccgacctgcatgaagctgtcctatgtctaacaaccagtgaaatttgagactacattggacaaaatcggtagtcatattttacaacttttttttttttactttttaccgtaaacccctatttacaagagagatgttatggcgtaagtactaagtttaagtttgtaagcggcataaattaatattttttaactagcataagtatataatattagtaaactataatttttgttctagttctatcagtgcggactttgttagtgtcttaaatttgtaagcagtattagttttgtaatgttgaaacttg

SEQ ID NO: 189443 - DNA, 1278 bp, Cannabis indica
tttttggtgggattttcatggaccaaatatgcttccaccaatccttaaaagcaactggattagaagaagatggagatgacgaaaaatcgaaagctttagaaacatggtaggcagagttgacagttaaattgctcgagggatgacatccccaaatgaaagtgtcatccatagcaggactaattgaaaccttcaggatttcatcaataatgttctcaaggaaatagaggctaaggctttcaacattccacttaccattatcatgaataaagtatgagacaaaaggattaggaggggaaataccatgtttaaaatacagaggcctaacattgggaacccaacatgagccgatagtaggaatacaagtgccattctaacttttcaaatcaaaccctttaggagcacgtctttttcctgcagaatacttctccaagtggtagaagagtactggcctttggaagcatgaatgaagtcattttatattaacaaaaaggataattttattcaaaacagagcaaaatacaaccaaaccaagactaagccgaagcaacagccacaaaacatcaccaactgctgattacattcattacatatttatcactagcttttgtgtttttacaagtgatacccatcaccttaaacttgaccagcctttttatttctctattaataaaagcagtagaaaaacacatcaaattaaacacacaactaatcctatttttccacacccaatacaacatactagccattacagcattggtgacttgctgctttaaatcaaacgcagtgttcaaattctaactctagagctcaatgatgtctctcgaccatctatacaatccaaaccagctgttaatttctcttaacaacatctttgtgaaatagcagctcataaaaaagatgattatgtgtttccatatcctgttcacagaccgggcaaaggttggagggtataggcaaatttttttccaatttatccctggtaagaagttgacaattacaaacttgccaatatataaatctatgcttgggaataataaacctatgtcaaacagccttgggcataaacaacctcctggttatcaataagagaagcatagaacagtttagcccgaagcttcccatgcttaacaaacttgcgacagctttgtctcattagtgtaattccttatctccaattttttttttaagttacaagctcatattttgatttatcgggacagtccatatactaaaatccttgaggtagatagaattcacccactactacaaagttggctt

SEQ ID NO: 189444 - DNA, 4572 bp, Cannabis indica
atattattttggaattgttaattttaatttagtgcataactgtgcatgtgttttagccatcaagttatgattgcttgtaataaaaatgatacagacataaagtgggagagagagatttgtgaccctggactggagagaggcaggctagctaggatgtttatatttaattttaattctttttttttttaaataaaatatcttcttacattacgagcctaactatgaaaacacaaaacattctggcatgaaatgatgacacgtattgtatgagggcctatggaattatacatggtcgctcactcgtccactctgtctctcttgcttggcctttttgtcttacttcctctcttttcatccacagcagaaaaggaaaccgcagtactctttctctctacacatgaatattttattttttattttaaataataactatttcatattgaggtagccttccttttaagtcgtatattctttaggctctctctatatattggggctgtcctttactacttagtaccaaagccatttccacaaagtataattcactaccttgtattctttagacatggaggggaagctgttaatatcaaggtttaagtctgtttgtgtattttgtgggagtagtactgggaagagagattgttatagagatgcagccattgaactgggggaagagctggtactgttttttttcctcttcttttttctttatactgatatttcaactcttttgacgattggggtttgactgtttttgttataggtatcaaaaaggttggaccttgtctatggtggaggcagtattggtctaatgggtttggtttctcaggttgttcatcgtgcaggaggaagtgttctcgggtatatacatatatatatattgttactatattcaagtatgactctttttgagtattttgtgactccatcttatttgttctctttttgtcacaggatcattcccagaactcttatgtgtaaagaggtcagtactcagctgggttttccattttttttttgtaatttgtgggttttcatttcttttagagtgtagttagaaaagcttgttacttcttttattatgggtaaaaatgtgtttatgtatttggagcctcagataacaggcgagacagttggtgaagttaggccagtagccgacatgcatcaaaggaaagcagaaatggcccgccattctgattgttttattgccttgccaggtcccatctttctctctttctctcattttttccttttattaattctaatggagttgtaataatctttgtttttcttttttttccttcaggtgggtatggaacactagaagagttgctcgaagtgatcacctgggctcaacttggcatccatgacaagccagtaagatcagcaaaatattagtttttttccttttcacttttgtaaaactgttaaggttttatatgtgtgaaatattcaggtaggtctgctcaatgtggatggctactacgactctcttctcacttttattgacaaagcagtggatgatggttttcattaagccttcacagcgccacatcatagtctctgcccccaatgccaaagagcttgttcagaaactggaggtgggtcatcctctttttggccattattttaagatatcccgttctttattttttttaattatttgggggtttttgtatttgatgagattgctctgctgttgttgtggtcaggagtacgtgcctgtgcatgatggagtcatagccaaggcaaggtgggaaggtgaacaacagcagcagcagcagcagataggtttcaagcccgcttctttgcagactgagatcgcactatgaaagatcaaaactatataaacaaaaacaaaagaaagttcgggaaaaaggttgtttaggctatttgcttttcgtctaatattttgggtcatagagatcaaccaaccaataccataatggtatgtggtaaaagcacaatagttgacacatggctaatcttttgatatttgttaatataaattataatatatatgatatgggcctacaactctttatgttgaatcttttcatctttttcttttgaaccctttcaattattatcatgtacaaagattatatagtcataaagaaaacaagaagaaggatccaaaaaagaaaaatcagtaaaaagcagctttattctctccatttaattgctctagggtatgcatgctctactgttagtgttataatttctactgtctctctctatcttatcttttctgccagtttttaaggtactgtgatgatttatgaattacatcacatttagggtcattggaatggtgggggaatgagtttaaaaggatataccccacatgagggtgaggcttttatgagaatgatagtgtaataccagtaccattaccattgccatactcagctcagctcagctgcagggactgatgatttttcttttgtattcaacactgttaataaagccattgtactgtagagttagacaggaaaagttggaaaagtgagggcagaaggcatgatgatgggactggaaaaaaaaaaaaagaaaaagaaaaaacaaataaaattgagccaatccgcaacctaactaaaaatgtacacactatgcttttttctggatttgtcaccttccaacggtcagcttcaagtgtttatatcaatttgtagcaatcaaaactttgaaatttcttttgggttctattcctaatttgttcatgatttttgttttagaaactaaaccaaatatcataattgttcaatgttcgcatcgcttaatgataaattgatttgcaaagatctctaagtttgaaatataaattaacaaaacaaataataaatacataaagtcttaaaaggtttctaatataaaaatttgctttttaaaaggagaaaaaaaaaaatcaaataggactcgttttttacaaaaatggatgtgtagttttgtgttttggtctaattttgataatattttgcaaaataataatagttttatgggactagttgtcgagagtcagcaaaaactcttgagtgactagttccataaagtcatttggcttgagatgactacttaaaacaaccaacaatactcatttttcataccatttaaaattttggaattctaaattttttaagaaaactagtcaaatttttcggaacctaaagtacaaaatatacttaaaaaaatgatttatttttgttagttaccttttcaaaatatgatgttataaagagaggtatacacaaaaagtaaataattgatgggcaattgggtcattgtgttgtgatatttattttattttattgttatgtttagttgcatgattttaatgtgcctggtccaagaaagctaaggaatggttttggcatgggataccaaaacagggaaaagacaatatgtctctagccattattatgtgttgtaggacagtgtggtagtaagcacacaacagttgggggacccttttcttaagttggctcagtttgttggctgctttttgttgtgtgtgttgatgtttagtgtttgtttggtccatttctcatggcaattggcatttacaaacattaagcccccatatggtgtggtgtggatggataaccacatcaatattcctacctcaaataggtagtggttctaacagaacaacaggatcatagtggtcagtattcgcaagtaatccattctaccatgtttaatggcccatttcacccctctctaccagttgaaatttcccatggcctaacttcaattcagcctcatggtccacttgacattgacacacagcacaaaaataattgagcaattttatattattattattatttgcaaaaataaaaagtcatatatatatacttttctttaaatatacgttctctctcaaatctagttccattctttttgtttagtcacataaacaatagtttataatagttaagacgaggggtaaggaggactgttggttttgaactacaataaaaagaaataaagttggtttcaaactacaataaaaagtaagtggtactactgtccatatattcacctgacttgcttttattatcttccttactcattttattcattaaattaaataattcagaaattaataaataatataagatgataggatgattttagtgttgaggtggaatggtgtatattatagtcaaaattaggattcaaatacttaaataatcttttcaatacttaaatactctaaattattcattaattttttttaagtattatttagttgaaggtaataaaataaaatagagtgacaaaaaaataatttctatgtcaattttttatttggttacatattaaaatattagaatataattctaattgaataatctttttacgattttgatagaataattatttcattttaaaataataacaaaaaccattacaatcatgataagaaaaaatttaagtattttttttatacattctaaatttttttttcattttattcttattcttatatttttattccctctaactaaatgccactaaattagctagaacgacaaatataatatttgaacggaaattattcaaaca

SEQ ID NO: 189445 - DNA, 746 bp, Cannabis indica
gcaatggtggctcttttgttggtagtagttattctgttcttcgtatcattgttactctatttgggggttcactagactaacaatgacaagaagaacaaattaactaccaccatccaattgctttgattgtttacttttttttttctttttgggtgctatcttgggctttaaaatagtggtaattttatcacttactattgagatttggtctgtacaattaggctctatttgtatttatgtgttttttgggtttgtcgcgcttaattatatatgttttgtgacgtgttgtgttgtgtcaatttataacattttatcgtattttatcgaagcttacattttctttgtacctaattttgttcgtgccagtttgatcattctagagcactgtccactaatcataatattttattttttaaaaaaaacaaattattttcatggtggtatatttgctccatttcaattgtttgtgcatgtttgtcctagttagagttggagatgcatttgtttgtttttttttttggcatgattgactgaatattgtttatgtcatttcatttataaaatccacgtggctctgtgaattaaagcctgacttataaaatcatttgtcctctcttccttttataaaattattattaacttcctgaaaagaaaagagagagagaaaaaaaacattccatttgccttaggaaataaaacgacacgtcgtttctgcacttagataaaacgacaaaaagaaaagaaaa

SEQ ID NO: 189446 - DNA, 5090 bp, Cannabis indica
tatgaggcctcacatttgagttgcgttggggaagatttactaaatgaagccttgtcttttacgaccagacacctaattgagtttttggcaaataataaaaaagaacaatgcgatgatgatgatgatcttttatcgaaagaaatatctcgagccctggagagacccttaagaaaaaccctaaacaggctccaagctaggcatttcatttcaatatatgaaaaagtggccttacataaccaagcattgctacaacttgcaaaattagatttcaatttattacaatccatgcacaaaaaggagcttagcgaaaactccaggtactatataaatatatataattcacagttgtatatactataataaatgtaaattaataaaattatatattaattatgaaataatcataactttcttcattatgcatattttagagatgttttttttcttcacaccacgaaattaaaatatttataacctaatatttttatattaatgatgttttttttggtaagtaagatgaattttattaatgatgtttaatagaagtgtggcacaccctaaaagatcaatttagatgatagaggatcaattatttttttggagggttttccaaacctaacgtcactacaatattgagaaaataaaacagaaaaattaattaacagcaattagtacagtatttctgatgattcatcaggtctttctctagatgattcatcagttaccaacctcacacatagcctctcaagggaaaaaaagctcttttccaatgagagtttttcgatttactagggttactggggtttcttcttcttttgtgtatgtggagggatgtgcatgagtctatgtgtttctgatcatagttctctcaagtgaggttgttttctattttccatttcttttcttttgcttttcctgcgctcccgtgtgtgagcttctgggctttttccaggttttcgtgtgggattctatttcccctgttttcttcttcgttctctgttgtgtcttctctgtttcctccttcctctccttgtagtttggatggaggactctgaagctaattagggaatgatgagtgctgatggcaaccctggctctgaagaaaatgttgaactgctgagacaaaagttcttggatgaagttaccctagaattggaacctgactttgagattagtgaggaagttgctaagattggagtccttgctaaaatctttggaaataagttaatctccaaaggaagggttaaacatatattaggtggtattcggtctctgaaagggaaatggcgtttgaaaacgatggaggcgggtctttggggtattttctttaaatgtcatgaagacaaacttgagattctgaaaaaaccccttggatcatttccaaccagttattgaatgtccgagacttgcctgttgacggtcattggcaaaacgtgaacatgtctaaggcaactttttgggtcgaaatgcatggtctgcctcctccttatctggcagcccaaaactcggtcgttattggtgctaaggtgggtacattcattaaatctgatggtgcaacaaatggagttatagcccgacgtggttttttgaaacttagagtcgatatcctgattgatcagcagctccttgctggtttctttttcagtattgacaggggccgccgtgaatggatccaatttaaattcaagaagcttcccactttctgttttaattgtggcttccttggccatgaaagaagcagttgtaggaagccaaaagtcttcgcctatctgcccatcggagacgcagtgcctctgtatggaccttggttgaaggctatgggtcctactaggagttattttgactctcgccacccgatgcttctcaaaaaccggtggtgatggaacgaccggatgacttgttggcgaggtcgggtacgaatgttagaaaaggtacgaatgtaccagtggacatgggcagcattccctctctgggtactacggcagacaacaataccaccacgatgcatggtgaacgtactgagaggaataagcaagtgataagtggcaaaaccctgagggtgtctggcaccaataaacttaaatccgcacgttttaatccctttgaggtagtctctaaccatcctattgcccagctggaaattttttttaatgatgaccgtattattctttctttaattcctaatgtgggtcctactgcggagtaaatggtagatttgccccatgaatctatttgtaagtccaagaaaacctcatcagcatcctgagcccattatactgccccaggcccatttcgaataaggtagaaaaattagctgagactttactgggctcatctatatctacagggttggcctctccctctgtgaagtttggggcccaggcctcccttaatgactatctgaactgctcaattagtagtagaaaaaggaaagcttgcgggagtgtgactcttattatgtttatcccgttggtggatccttcatcatcgactctaagtttggatgtcgataacttgacattcatcgaaggaaaaacgataacaacattgggactaccagcactgagaagaagaaaagaggcaggaagaaaggcaattctctccctaggaaaaactagagacgattgacaagagcgagtcctcttaaccttagtgtttcctctggagataaggacagtgtagaagctgagaatggaaaggaattatgtacccatggaagtatggtcattgagatccaagtggagaaattttcaattgggcgaggaggtggcccttatcaagtcccctcctacccaatgagagccctatcctggaatcgtcgagagtttgaaagaccctcggcattgcaagccctggtggcttgggtgaggagatttaaggttgattgtgttttttctgatggagactaaattgggtggagatcaagtggactccatatgtcgtgctctaattttgactttggggaattcctttcttcgactgggagatctggtggttttggttttctacggaacaagcaagcgagtatcactttggtttcgaaactcaagactggttttgaatgtaaagtttgggatcctgacgagtctctttcctggactctctttgctatttatggtactccttacgaagaggagaaacaattgttttaggactgcctttcacgagatattaatctctgttctaagccgtgggctattctaggggatttaaatgttattttttcgagtgaagacaagtcagggggaagggattttgctcctagagatggttcaattttgaaaaaaattccgtttgaaacagggggaattgatctaggattctttggttgcaagttcacctggaaaaataagagatgttctgggggcctcatcagagaaagattggatagagctattgttaatactggatggattaactcctttcctagaggggggtgtgaaaaatttgcccattctttcctcaaatcacgaccccatcttatttgactctgtgatgaacatgtctcgggggtctgtgctgttcaaattctatgaagcttggtttaaagagggtagttgtcttgaaaccatccaacattcttgggacgcctctgaatcgaatggtgtaaatgggaatattcccaggaggtttgacacgattcggatggctctctaaaggtggaacaaaaaggtttttggtgactgtaacaagaaacttatagccttagaagcaaaactgcagctacttcagtcgagagatgcaaattaaagttgtttaaaggaggaggaagaagtggagaaggaaatctctgagctttgggagaagcaagagctcatttggcgtcaaaggtctagagagatttggttgacccaaggggatcgtaattctaagttttttcaggcttcaactgtggttagaaagaagcgaaaccacatttggtctctcaaaaatgatcatggcactctgatctttagagaaaaagataaaggtgaaatcctcaatacttattttaaaaatttggacccatgctggtgccttattagcatttttcttagtaaatatctcataagcactccaagctttcatgatcacaggtttctattattataaaatttttgtattagagaatttaattgctgtaacaccaagaattttcgccacagatctagttttaatagtctgatcttctaaaataggacctcacttctttgcagtcgcatctcccttcttataagttccttgggtaatcttgcgtggacggtctcgacctgccatagccacagctcagagctaagagttaaaccttagcaaagcaaattttttagagaaagttattttatacaaagttttctcttatctcttcctatattaatgatgttgtatattacatttacagtagtaataatttatgagaaattcataaataatttacatatctgatcaagagttcaaacatctattttccaccagttaaaaaacaaaactagaaaatgtacgagcgcaactaactgcttggattctaactctgatatcgtaaattattcaaaatttattaaatattgatgaaaactataacgtttcttaacaaatatataattgggaatttcttttgttatcgagacaaaaacataaatattttcatatacatatatatcgacaaattatttggtgtttaattttgatatagcatgattgctttaattactaaaactctattacatctttgtatcatatgttattataattaggtggtggaaagaatcagacttcgtacacaaattccctttttcaagagacaggagtgtggaactatacctttggatattagcagtctattatgaaccccaatactatttggcaagaataattttattcaaaattatttcctttgccacaatagctgatgacatttatgattcatatggtacttttgaagaacttaaactcctaactgatgcagttaaaaggtttgatgcatatttattttatcataagagtgtttcctattttttatgcatgacattattgtttattgcagtttacaataggtgtcatgtttgttttcaagaaattctgaatattttacaatgtagaaaataatgtttaat

SEQ ID NO: 189447 - DNA, 2807 bp, Cannabis indica
aatattgaattataagagtatctttatagcaatggctaatccttcaatatatatatttaaaaagttaaaaaaaaaaaaaaaaaaaaaagaatccccacactcaggaacatttaattaaaagccatttgcttagtacatactctagggcgtggatctgtctcaacactgaataacaacagaatttaccttttgattttgaggactctcagagcactcgtgatcaatgtgacttgtctgggtgttcttagacaaattatcctgcaaaatagtattttgcacaaactcatttaaaattcatttaaaaaaatcttattctttttagcttgaaataaaaataaaaataagttccatgatgtcctgtacacaattagtgatacccaacggcatagaatcataacatattgaataaggagaaaactagaaataacaggatcacataaaagtactcttttgaaacataagatatagatctagaatttcaagcaagtcaatgatcccaaataataaaaatatgttttactgtcaaagatttcaggacacaatattcatatctgctttaaaatgtacataatggaaagtattaaactagcaatctaacctcttttggttcagattcttcagccatttttggtggtttcatcagctgataaagctcatgaaaaacctaactttacacaaaaacctacagccattaaaaacaaaagaaaacatgaatcaaccaataaatcaaaaggtaataaatctcattacttgtaaaaacaaccctaatctaacaaaattacaataaattgaatccataacaatccattatccatagaaacaaaattaaagaaatcaacaaaagcaaaagccccttctttttctttaccactaaatgaatcaatcaaaacgaaaaaaaaaacaatcaaatccaatagcataaactactgaataaaaattaagactttgaattgcattactgttattaagagaattaaaaaaacaaacaaacatccaatgccttacaatacagaaaaataaaattccacacgccaaagagacaatttccactcgaaaccgtttttctttttattttttgttaatgttcaaaaataaaaacaagaatttgactgagtaaacaaaccttattgggataaaaaaaaaaaggaatagatagttgtaatcggcaatgagaatgaaagcaatagcaaaaaaaacgtagttttcaatgaaaagtaggagagaaaaaaaaaacataccaaaaaaaaaaggaaaaggaaaaggaaaaggaaggaaagggtaccttacgaatacgtgtaggtgtaagtttggagcaaaagcttaacctctcttctcttctgtttctcttcctcaaaaataacaaaacaaaaccttatattacaaactcttttatattattccctaaaaaaaatcttttatgttattattattatcatttattatgtatggtttagaaataataaatcaatattggtgtttgattagaatataattactggaaaaggttggatctaattataaaaaccaaaagatttcctaggtggcctatttattgtggtttgataatttttgcaaaatgatccctaattttgacaactaattataaatttgatacatatttgaaatgattaaataacttattaaatttttaaacttatgtcattttataaattattaagactaagcaaaaatacaaaatagtataaaaggaaattatttttaaattaaaatttattagtattagtgtaattggatattaaatggagagatattagtttgtgatgatcttatttaataaagatgcatttttttagatgctactttgccgaaaaaaaaaagatattaaatgttatttattttatttaataattatttatgattggtgcaaaatagaatagcactactcaatcaaaatggataatattcattaattattaattagaaaacaaatgtttccaatgaggttttggcatatagtattaaaatattaaagagagagagagagagagttggtagtgtgtgtgatagtcataaataaaaaaaacgtatgccgcacgcagtattaacggaaggaaaaacagagaagaagaaatagaagaagagaaaggcaataaaaaaaacaaaagatgtaaacttcccaaactaacaaacaaataaacaaaaataaataaataaaataaataaagttattccaagccaaaatgccatatgatatggtcttacttacttatggatggtcaggaatttatttctctttttctatcttcctttttctatacacgttttcgttttggggtttggactttggccttgggcttagattcgggttgtaacttagatcatatatagacagatattagatgataatatagttaaaactatcttataaagtgcacgtttttctctatataaataagtcgaatggttggaagcatgtatatggaggaagtatgtctttttttaaaaaaataaaaataaaaaatcactaccttttctttcttaaatattaactataataatggtgtttaagaaaataaatagtaataataatatttttatatgctaaaagaaaaggatatttaatagaaaaatatatttctctttgttaaattagagagatattgggaatgagaattatcctaaatttttttcatttataaaatatgactatgtaacagaatttttggtttaaccatttatttaatattttttaaaaataaaaactaacagagaatttttggatcaaaattgcccggaaaagacctaattgttggattcgatctttatacaaagaagaagggtttgcg

SEQ ID NO: 189448 - DNA, 2026 bp, Cannabis indica
ttggttcttttatgctatatgtaactgtagcaacatgaattgataatcctctatattaattatggcttcaatttgacaggcaatatctgtgatggctaaaagtgggtttgcagagcttattgatttcaaccctatccgtgctacggatgtgcaattacccgctggtggaacttttgttattgcgcattctttggcagaatctcaaaaggcagtcactgctgcaacaaattacaacaacagggttgttgaatgtcgcttagcggctgtaagtttaatataatattacacaagtaaaatgctattgttttttttaaaaaaaaatctcaaaatattaaaattgctgattgttctgtttcacacatctcttgaagattgtgcttgggataaagcttgggttgaaaccacaagaagcaatatcaaatgtcaaaaccctttctgatgttgaaggattgtgtttggaatttgctggtactcatggttcatcagatcctctcctggccctcaaggtactattgaatttgtcatttattgattgggttatccttatattaataaggatttatttaaaaaccacaatgttatttacaaattaattaattaaatccctattgttaagattattattttatatatattatgataaaacaagaatataaggattatatttagtggttagtatatactaattatgttcaaacatgttgattaatgatgaagtttttttcttaatgaaaatatgcaaaaatatatattttaatgtaagaatacaacatcggccataaatttggtgatgccttaggcaatgtgaccttttgagctacttctattaaaatatttgagttttgtaatttgttgtctcatttcttttaatttgtttttcaattatttgaaggaatatctgaaagaggagccttacacaacccaagaaatagaacaaattattgaagagaatctttcatcgatttttaaagattccccatcttcattagatgtgttaaaggctgcaacacacttcaaattatatcaggtgaataatcgtaaacatatataaaataaatttgttcttgtctagcatatatatgttctccatgacatcataacaaacaaactcactcacttgttttttattagagagcatctcatgtgtactctgaagccaaacgagtccatgctttcaaggacactgtatattcaaatttaaggtacatcatatcatttatagctgttatttatgaatttttagatgccaatcttccccattaatatttttttatatgataaactgttgtttcagtgaagaggacatattgaaaaaacttggggatctaatgaacgagagccactatagctgcagtgttaaatacgagtgcaggtaccaatagaatactgttaatactatttgatcatatcatgtacctaaatttaaatacagtgttgatataatgatattttggtttcgtgtaattaactatagttgcccggagttggaagaacttgtaagcatttgtcgtaagtatggtgctcttggggcaaggcttaccggagctggatggggaggttgtgcagttgctttggtgaaagagaatattgtcccacaatttattctcaacttaaaggttagtgtattaattaataatacctatgtttccagatatatgattatatatatatatatataacatcaaatgtacatgtgtatgtttttcaggagcattactaccagtctaggattgagaaaggagtgattagtaataatgatcttggtctttatgtgtttgcttccaagccttccagtggtgctgctatttttaagttttaattattttgttttagtttagtatagtaactaattttattcactatcttttgtgatttcacataatttttaacttataaataaatgtatatctttctccatagatgaggagatttaagaaaggaataattaccactattttttttgtaaaaattgtttaaacatttttttgttcacattttacgagattttataaaaacaatacgaaaa

SEQ ID NO: 189449 - DNA, 1969 bp, Cannabis indica
aaaatgagttgagcagccttcaacaacagctcttataatccaatgattatgcaacaaaaaaaaagagtatccttttttaaaaaggaaccaattcttaaagacataaacctctctaaatctatgaaaaaacaattaacattttcatcattgtccaaggcaaaatctggtccaagttgttatgcaactctttcaatttcaactagtttaagctcccccagaaccatacttctttccgaaaacaatgacctgaagcttgtcataaccggcaaggacaccagcaccagcgacagcacgtaggatgttggcaccagctcccttgaagagagatttggcaccctcattcttaagaatttgagagaatgcatcgaatgaactcttgtacttaacggcttcgcctgatgtcatcatcattcttctgcgaacggtgtcaattgggtacgaagcaagacctgcaccgttggtgataacccaaccaagagcaaaactagcaaagaaactatcctgaaaaaggtttcgaaaagagaatagagttattagcttaagaacattcacaacaaaattcaaattacaagaaactatataatcaaaggctttcaaaagctgtttttggactctacaaagctcttttaagataagctagtttaacatttggtgttaatcataaccgaatctttacctgcatctttccagttaggatcacaggcttcaaagaatcatacattccgaagtacaaaccacggtagacaatgataccaacacaagaaatgttgaaaccgcggtaaaggccagcaataccatcagactttagagtctttctgtagacatcaaccaagccgttaaattgcctctctcctcccttctttgctgccttagaatcatttgctagacgggttctggcatagtcaagagagtaaacaaagagcaaagaagaggcaccagcagcaccacccgaagccaagttaccagcaaaccatttccagtaaccatccctgtctttcttgaagttaaagagtctcttgaaatagtctttgaatgcaaagttcaaagcctaaaatgttaaagacaaagcaataatgtcagcttagacaaaatcaacaagttgggaaacagaagattccaatcaagatattcgaacctgagttgggaaataacggatgacattagctgtgtttcctctccacaatgaaccaaatccttcatctttgatagtacggcgaaagcattctccaatacccttgtaaggttcagagagcctaccggccttgatcatttcatcctggttttgaatcaagagcttcacacgctcgattggggcagcagcggttttggacacagcagctgaaactccacccatgagaaaatcaatggcaaagccagcaattcctttctctgaaggagcttggacaaaaacaggcgatgaggccgaagtgatcattgacagatcaacttggcttgaaggcatcataggagactgcaatgctgcagtttttgagtaatttccatacgagaaacgcctttgatggaccgcaggccttggaagagcagcgtagcggttttgaatatcgttggaaaggctggagcccaagtggacttgaccggcaaatttttgcatcacagatggttgttggtgcttctcagccattgcttttcaacaaaagactcctgaagaaaatatgtatcacatttgtaatgagagaatgaactctttagatatatatatgtatatcacatttgtatttactcgtacaacaaaaggaagaggttttattatgggattacttcataaatactcaaaaattacaaaagtttactttttaatggatctacaatattttttaatgttttatggatatttttctaaatagacatgtgggttgttggtttaaagttgttctaaaaaaattgttttcatattacattaacattatattatttccaaaaaaaaaaaaaaactaaaataaagtaaagt

SEQ ID NO: 189450 - DNA, 3770 bp, Cannabis indica
tcagattttgtgtttttctatggaagcgaaggtgcagcataaatcttgttggaaaagaaattgagacttcaaaaaaacgagaggatcttatctgttagtcacctaatcttccagcacagttatctccaccttgttggctggtgatgaatgctgccactatcaccttcacttgctgttgtatcagaagtctctccacccaattgtttattatcgcctatcttagcaccagcacgactttcttgttgttggggatgatcgcgatttggttgtggaacatctctagcagtacggcggtcctgcatattgagaacaaaaatggataaaggagctcgctttgcaaataataaaatgaatgaattggaaatcactgggacataagacgtacatctcgaaatagcaagtcatctgcctcaagcatgtgaataacatgccccatctttggcctttttgttgcatcaggatcaacacatttaagggcaactaggagaacacgcttgagtgctttggaagttggcatctcaggcagcttgggatcaattacttgctcagatttccgattcccaaccaaagtttttaaccattcaaccatattcacctgcaaatatagattcactttcagcctataattagcagcaggaaagcaaactacaaggtttaacaaatcataattaagactaacctctccttgttgtcgactataatcaacggggtttcttccagaaattagctccatgatgagaattccaaagctatagatatcacttttttcattcagcattccagtgcaagcatattctggtgcaacataactgaaagaaaatgccaatgtgagctttcttgatgatcttaataacaatgcaagcattaaattcttacataaataacccccataaacagattaccaagcgagagaaaacaaaggatatcaacaaaatgtaactaacccaaatgttcccattacacgagtagtgacatagcttgtatcggaacacaagagctttgcaagcccgaaatcggacaccttagcattccattgtcgatcaattagtatgttgctagacttcacatcacggtgaacaaccttcggttcaagaccctcatgaagataggccaaactacacaatagaaaaatgcaatttcagacagacttttacatagacataaacaaaggtgaaaatcatacagaaaataatttatggcagtacccttttgctgttcccagtaagatgttcatccggatctcccatgttaatgggcttacttcaccaacatccccatggagccattgatccagattaccattgtcaacatactcatacacaagcatcctaataaacaaaacaatgtcaatgaatgaaatctcttgactgaacaaaaccttagttcagatatgaagatatacaataagttacctataggcaccctcaacacagtatccaagtaacctcactaggtttttgtgtctcacacgcccaattacttctacctccaccttaaattccttctcagcttgacccctaacagttgaaaagtctcgttagaaagcccgttagccaatatgcatacacggaaataatgattaaaaaaaaacaaaaaattggttataaactcgcgaagagcctagataaacagtggaagacatgaaaaaggaggacacaaaggtgtgtagaagaagtgaacaagtgcttaatttcgaatataaggaaaaagatgttctttctcagagagaaaaaaaaaacacacacacaccgaattcaccgcaaaatgcaattaaagaaattacatgagaaacaaacagagtttaagaacataaaaaggctttcttttcttatgctttcaacagtgaaagagatcaatttcgtttcccagaaaccaaacacttaagcagccatagaaaaataaaatgagtacctgttattcaagaggtttttgactgcgattctggtaccgtcaccgagaataccactgtagacaatcccatacccaccttccccaatcacattctcaggagacaacccattagtggccgcttcaagctctctcagagtataccatcttccccacccaagatgcgaaacctcaggacctacgttaccgctgccaaacgacgtcgtatcacctccactcatcatcgttcccctgctttccccactggatgctcgatccgagaacacgacgaccctatggtcgggtttgccgatctcaacatggatttcaggctgcggatggtggtgaacgatctcctgtatttccttggagatcactggggtttgtaaatcaatggcagaggccatggttgatgtgggcttggtcgaagatttggacttgtgcttggtccgatggcgagaagtgatgcagattgagaggaggaagagtgtgatgactataagtgaaccgacaaggattccgatgacgacccagagccgtagcccgaatatggaagtgggcttggagagctcagagttcacaaacgcagcgtcgtagattgacatcgttatcttatctgggtttccttttttgttgtcgttttcttgtgggttttaagaggcgtcggtttgggttgaagtgagttcggcgaggtgagttttgaggggcattggctccgccggaaaatcccaagaaatggtttttctctgtatgggaattatcggactctccggcgaccagaggaagaggattatagagagagaaagatggagactttttgaaaacttgaatggattcttacagtggcagcagtaccagttgagctgtctgtctctgtattttttggattctttttaaaaattaaataataccctctggataatatttaatgacatttatatcctctctttctattataaatatttaattgctaagatagatatacagatgatacttttgaaatcttgactctcctctctctctctttccttttcggcctctgaggatgaataaaatactaaactagtagtacatcatgcactgatttattagtatagggtttatataatcttaataataataataatattgatgtaattgcttgtagagacaacaatatattgtaaggatcgtaaggatcggtttcataaccatggtcaatcgaagatgatagtagtagtgtgagtgagtgtgtgtgtatacaagatttctattatttttatattgggttgcgtagttaatgagttagaccaaaattagtaatataaatatttataataggcataagttaacaagtggagaaaccattttggataatggtagcattggtctgtcgtaaccacctttggtggcatagttcaaggctattcgctatggtgttagggccgcaaccagtctcgacttttatttgaattcaacttgcttgttatattaattttcattatgttagttataattttattgttaaagaggtttatagagttgttcattctttagctaaatcattcatttctataaaagatgacgtgtttcgtagtgttatcattgtaacatatgcctattatcaatgatactttgctcaattttcagactctctcaagttttgtgtatttcgagatatttttccatcaaaaaataagtcatggaaagtatttagttgaaatgatttaagaaaataatgctctgtcaaaattatacatataaggtaattgttatttgttttgctattacatacactgattaattaagttattactctatttattatataatatgaatataaatatttttagtaattttttgacctgaacagagacacataatataatttacagtaaaccaga

SEQ ID NO: 189451 - DNA, 3507 bp, Cannabis indica
aggtttttgttttagagaaatgatgggttctcttcttccatttcaagatcttaatcttcttcctgtagagttcctccgccgcggcagccatggcagccaccactaccgccgccgccgccgtcaccgccgctgctactgctactactactactccaaacatccctttgaaagttcctaaactcgaacctaagcacgaaccgtttgaagaaacgttacagaatccttaccaacaacaacaacaacaacaaaccttgcaatttcttcctcaactacgagaaagtactcaagaacaaccgttcttctcttctttacctaattcatctccatctttatctccaaatccagtatctgattctcttcagctaaccccttacgtaccttttactgaccaaacccttgttgcgttttcgcaaaactcgggtgacgagagcaatgtgtattcggagtttcatcggatttcggagctttttaaaactgctttttcttctaatggtgatggggatagtcaggtgtttgatcccgattcgcgagcgattgttccgtttgctgaagaaaacaaccaggttgaggtcgcacctattgttgtttcgaggaagagggttcctcctcggtctgctgagcttgtgagggttacgaatttgggaatcgaagatgagacttattttcgtaacgttgtgaggcgtacgaggatggtattcgattcgcttcgggttctttctacggcggaggaggtaaggaaacacggtgtggggaatgcgagacgattgcgtggtgatttgagggcttcttcgttgatgagagatcgagagttgtggcttaatcgagataagaggattgtgggttcaattcctggggtttatgttggtgatttgtttttctttcgtatggagctttgtgtggttgggttacatggtcaggtccaggccggaatcgattatgttccggctagtcagagctccaacggtgagccaattgcgacgagtgtcattgtctctggtgggtatgaagatgacgaggacgctggagatgtggtaatctatactggtcatggtggacaggacaagttcaataagcaatgcgctcatcagaagcttgaaggtggtaatcttgcacttgaaaggagtatgcattatgggattgaagtgagggttatcagaggaatcaaacacccaggtagtgttgctagcaaagtatatgtatatgatggtttgtatcgaattatggattgttggtttgatgtgggcaagtctggttttggggtttataagtataagcttgttagaattgatggtcaacctgaaatgggtagcaccattcttaggtatgcagcatctctaagagctaagcccttgacagtgaggccggctggctaccttagtttagatatctcggcgcaaaaggagagccttccagttttgctttttaatgatattgacactgatcaggaaccattgttttatgactatcttgtgagaactgtgtttccgccatttgcttatcatcaatctgggactggtactggatgtgaatgcaatgggggttgtactgatgattgcttgtgtgctatgaagaatggaggtgagcttgcttatgatcataatgggattctcttgagaggcaagcctttagttttcgaatgtgggccattctgtcgctgtcccccacagtgccggaatcgggttacacagaatgggatgaaaagtagactggaagtgtttagatcaagggaaacaggttggggagtaaggtctttggacttgatacaggctggtgcgtttatatgtgagtatacaggggttattctcacgagggaacaagcccatattgtttcaatgaatggtgatagcttagtttatccgcatcggttttctgatagatgggcagaatggggagaattgtctcaaatatatgatgattatgtaaggccatcgtacccggcagtgccaccgttggattttgcaatagatgtatcaaagatgaggaatgttgcctgttatatgacccacagttcaactcctaatgtaatggtacagtttgtgctttatgaccacaataacttaatgtttccacatctgatgttgtttgcaatggaaaacatccctcctctgagggagctcagccttgactatggagtggctgaggaagtgtcaccgaagctttctatctgtaactgagtaagattttagggcatggtgtatttttgaatgatgcagtgaagttatggagacatgactaacgaggtaaacacaactttctatctcacaatagttgaattactttgttacaatcaaatctgtgtgcactttttaccttctcattgttgaaacttccttgatggtttgtcttttgtattctttgttgtagcttaacttaaatgtaagctttgttctgtgtaacattcttttatgacatcacagaagcaagtacactttagagagaggcctattgaaattttggtgagatatatgagttgatgtatatcattattaattattatacaattgctagcattgcaaatttatgccatgtaattggtttgttgttttgaacttttatactagctacacttctgtttatatgaaattataagatgggatcttataattttccatttgatataactatataatgtttaacttgcattactgtttttttcctactttaaggcttacatgtctaaagtactttaaggcttacatattatttataaagtatactatattcagattgttgttggccttgttctttctaactctagaatagagatcatttttttggctctcattcatagtgctaccagaatcattagtggtctatgtttttgtaatgttttctaggagtgtaatttcaagtatgagctgagtgaaatgtttttttgcctcatcagctaactgactcacttttaatgtattgagagaggtgctttgctgtagatctctacttgacttgaatattaacatttcttccgtaagtgggagtttcttgtaaaataagtgataatcatgctctagttttaataaaattgtagactgtttgcaagtttatcaattgatcgtgcttttctcttctattcgagtaaaggagttgcatgtctgattcaacatcttgcttctgtaaagttgggatggacaacattgaaaagaaacttattataaatcaacaatgttaattaattaaattttgtatggtactgtagttgtattgtactagtggtttttaaatgatgaaggtatactagcatcatctctgattcctataactactagtggcatggcagtggcttgatgctttatctctctttcattctcttgaacaatttcctgcatctgtttcatatagaatagaacaattacgggcttagaatgttgtatgtgaacctcatttgaaaattctagcttttagcgccttgtaactcaggttttgctctgtgttcttttacgttgattagatttaagcagaagctgattattgatcaactttagaccaaggtggcgtttggttggaggt

SEQ ID NO: 189452 - DNA, 3213 bp, Cannabis indica
tagaaaaaccatgacagccccaacatcaatagttttaatatttctgcttcatctcaccagatttaatggtaatttttcggctgttgtggtgttgctgcggtaattctgtctgttggtgtggaaaatggagacctcattttttattttcggtacacagtacaaaagaaaaaaaaagtctcgaggcagtataaaaattatttttgccgtataacagtatttttgtaatgattaagttaaaatccaatatttttgtaagtttccatatgaaatcgtccttctgtattggtatatttgcataaaccatttcgtgggcttcaagattgggctttcgggggcccacatcaaaagttctcctttgttattccgttagatatgattcaattttagggggttttagctgggtttttcagcaattttcttttcgaattctggaatcatctcccggcgtctatggtatatacttacaaattctctttcggatttcttacacatttctgaattttaatgtgcttgacctcgacttcattgatttgtaaatactttcggttttgattttggtagaagaggctttcagcttcgaacttcaactcactcacccggattgtgagcatcgctgccggcgggtctggtttgtcgtatttgtactcctctgacaatggtgattctgaaatcttttgttaaaaataagtccactattagtggcatgtgattaaattatgttaagaagttcgttgctctcactacacgttttgatccgtgagcttttaattatatatagctgataatgttcttatgaattttactttagaagtgagcataggagtgtctgttcctgtaccatggcgtgaatcgatttctctgccgtggaaaattgctgaaagaatgcctaattgcctttcatcttcctcgccagtgaactccgaattgggtttgtccctcgatatttcttatcttaatttgctgacctcttaaattcattgtagagttttgatttaattattcatggccatcttatttaagcttcatagtgtaggtccatttcaattattttctttgagtgctggttctattccatcatcggaatcttctggggcatcggatggttgccataatgaacattcttgtggatgctttggtagagatacgtttgccaaagcagctgcaaaggtgggacctgctgttgttaatatctcccttcatcagggtatatactctttttcattggttcattttgagaacagtttcagttgttggttttcaagaatagagtttgttaattgtaactgttgtgtttaattttaggtatgtatgggggggtctttggtgggaagagcataggctctggaactattattgacaaggatggtactattttaacgtgtgctcatgcggtggtcaatgtacagggacggagtatttcatccaaaggaaaggtaggttagtggtttgattttatttttgtaacgtgttctcatggtatggctgtgaaaaggccattttagtgtccttttggagcggcttagtcattgtttgcagtgatatgtttatttgagtcattcttggttataaaagaccattatgatcatgattttttttaagttgattcattttttagatcacaaggacatgacatgatgttttcctgaatgggctattatgagtgtcactatcgtattcatctttacaagcctctttgatattatgtctgcgttaatgctcttgagctatgtgcattatggaaatgccctttggaaaccccaaggtcatttttggtcaattcatgcttagtttcttgtgttcagaattattctgcttactgaaatgttgatttctggaggaaaaatgtcacattgtagtcaattcaagctcagtttttcttcagttttcacctgcttggcttaattatgagaaagagatactatcagtatttgtttaggcaggccaatgtagtgcaaggaactagtgaagttttgagtattgaaaggcatgcgaaatatgagcttatagatgtaaataaggatttgagatcaccctaaagaggaagaagagtgttcttattgagaactatgctttctcacctctgcataaattatgtgcagtaaatgaattgtaaattatctgtaagatttaaattcaaatattacttctagaattgttattagatatttttccttaaaaaaaataacaaattttaatcaactatttatttcttaatttgaatttgaatttagttgttatattactgtttgtgtataggtttggcgtataattgctgcagtggtcatttttgtatgttctaccacgtggatgtataagtttatagcacatattatctttatgaaatcaaaaagctggtttttggatgattttttttttttatggaaatgcccttatcatcgtgtggtaatatttattgttgatattgagtcatatcttttgaaagtgtttattatgactgctaactgataatatcagcaataaatacaatattcatccacatgctgaaacaatttcaccaagattgtttggtgccaatggcttggcactacatatttagtctaataaaattgatgcttctcactccaatgtggttctaagattatttttcatatatgctactaagtgacatcttgttgtctacattaggtttttaagtatgttatttgttgcaggttgatgttactttacaagatggtaggacatttgagggtactgtgttgaatgctgatatacattccgatattgctattgtaaaaattgattccaaaaccccactcccaactgcaaaaatcggctcttcaagtaggcttcaacctggagattgggtgctagctgtgggctgtccactctcacttcagaatactgtaactgctggtattgtgaggttgttaatatactctagaatagtaaagaatttattgcatcttatgaattgtcatcaagacttcatttctgagtattaagcatttaaatcagtattacttttgtcctgaaaatttttggtgggtgcagtgctgtgccgtgtcttgttagtttctcatgtttgcatgtaggttcaatgtatgaagaaaaggctctttattcttttctattgtctttgtggttttgtcatccagtgataaaatgtatttttacctgtatcttatgcttttatgtaactatttttcctactccatacagttcatagaccgtacgagcagtgatttgggtctt

SEQ ID NO: 189453 - DNA, 3596 bp, Cannabis indica
aagaaaagaaaaaaaaacaaaaccagaaagcccctaatggttgcaccttgctcccattgtgattcttctccatcccaagttatcccccacatacttactatgatcaatgaccctaaccacggccaaatatctgtcgataagctacagagagagagataaattaatcgtcagagtaatatgcccacctaaaattaattagataagtatctaattcaaaaacaagcatatgattaattaggtaagatcttcaatcatcatttacaataaacgaggatgaagatcattctgccaaaagcccaaacaatttcgaggattctgactccgccatacttgttgacacctatgtttggatcggtctggtttttgtagttgatgacatttatgcagagaaagatgagagtggtgatgaagttggcaattagagctttgtagaaggatcatttgcgcagtggaactccggtgagctcagggatcgaggtgtgggggtggggtgggggtcaggggttggtggggggggggtgaggaagaggctggggtggagatgaagaagaggaagatgaagacgaagaaaagaaaatgatgacttacaagaaacttgacattagggactattgtccatatttctcgagattagggactaatttatcaaagtaaattttttggagaattttaccgtaaatttcccaagttataattattattcacactttacgtaagtgaaagtattttattttttcgatccaacttcttgtgggtaaaatttacccactttacgtacgtgaaaatattttattttttcaaaaaatatggaaataaaatatttttcaactaagaatttctagctattagggttgttaatcatgacacccacaccacattaaagatgtcgtatataattgtttgtggtataattatagattatatttcagtgagttatatgatgaatattatatttacataattttcatgatatatgcaagattttattgagtacgcataattttcaagatatatgtaatattttatcgatgatacataatcttctggatatatgtatagtttatataaattttcactatcatatcatagataaacaataagagatacaatatgtacatgtatattaattcaaaaataaacatataaaaatatatacatgcatatataatatatagataaataaaaaaaaagttattgaaattgtttcagtgtatcgtgaccttaaaacaactcaagaacttcaacaaaatatttaccttgaaacttagatattgataacgtgttataaaataatatagaataatataaaataaataagaagaaaagaagaagaaaagagaaagaaaaactgaatgagaatttctcagttgtttattctaagtataactaaaagaatgagaaattaaatcaatataataaaaagaaaatacaataaagcattaatattaataattaatttggtggtttggacatctataaataatattttataagaagatataaaaaggttgaaagaagtgaaggaattcttaaaagcatgtaaaattttgtaacttttttttttagtaatttaattttgtaaattttgttttaggtatataaagatatgaaaaattgcctttattgcaagaaaatatgcaccatgttttgaaaagaaaagcgccgattaccctttgtattggtttttttccctttaaaaaacaagtgcatttaattaaaaatgaaaataaaaaataataatgatatagaaagcacagccgcctcaatttccttccaggttccaagttaatactactgagactccaacctcatttctcctcgttctctccgctccttatctctcactcttcttcttcttcttccacaaatgttcatctcctgattcattgtctttccttttcaacttcaaggtacgctcaaacctccctctttcttgttccattttcttttcctaccaaatgcgggcatgacattgtgctctaaatgatgaacttccattgttgattgcaattttttttttacaactttgatatataacacattttgaatctgcattctcgctcatttttttcttctttacattgatttgtgtgcatataagtaaaatttaatttcagctaccatttcatgattctgagctcttaggtactcgaataagtttcaacttaaactcaatggtagaataaatattgtcttggttactatatgcatctccaactcacctttaccgtctcttatgaacgttttagaaagtgggtcttgcagaaataattactacactaactgggtttgtttgttttcatttttaaaatactcacctttgaatgaattagatgctagagattttctcacacgaagagcgtacccattttttttccaaacaattttgttcagagatgctatataatttggagataaatgtggtgcaacttttggtagaatagaatttagtttgacattacctgaataacagacgtgaaattctactttgcagggttcaaacgggtacatacagtcctgaaaggatgaatccctacattgttggtgttgttgttcctcttgttgtctctcttattcttcgcaattccaagacagagaagaaacgaggtttgcctgttgatgttggtgttgaacctggttatgcaattcgaaaccgtcgcttcacttatactgtacagacagcatgggaaggcatcacaactcttactgaactttttgagcaatcatgcaagaagtaccaggagaagtgcttccttggaacccggaagttgatttcgagggaagttgaggttgcagatgatggaagatcctttgaaaagcttcatttgggggagtatgaatggctgacatacgggagaacatttgaagctgtgtgcaattttgcttctggtttagctcgacttgggcataacaaggaagaacgagtagcaatctttgcagacacaagagaggagtggcttatagcgttgcaggtgctatgtcatcttgtttcatggatattagttttctgctttgttgactgcatttgatatgtttttgattaaaaaaaaaaaattcttttagaaataatgttttctgcttaacatatgatgtgtttgaattttcacctacactctatgctacttcctaaagaaattttatgtggcagtattaataaaatcataggtaatcatgtaagtgatgattttcatgtaagctgaagtatgtaacttttaggtggcagcattcatgtatctggtttcttttaaatttttataagggttatggctaacgtggttttcttttgtcagggttgctttaggcgtaatgtcactgtcgtcaccatatatgcatctttgggggaggaagctctttgtcactcactaaatgaggttctatatttctcccttggagtaggagtactacttggttcacattttatttcatttttttttttggaaaaggagaacgaggcctttgtcttagattagccccaccccccgaaatggataaaaccctctcttgtggcggaggaaaaccgtggttacaaaggtaaaaacaaaactaaatctgcatacaaaactagacagtataaattgcagcagacaacataaact

SEQ ID NO: 189454 - DNA, 1425 bp, Cannabis indica
aaaataaaaattgattcacaattttcattctattctattctaaccaaatacaacctaaaactagtacatttctattacaactaaatgattgagcactcaaaatatttatgtaaatttactagtctagctaacaaaaaacaaagatgtagtatttaaacaaataatgtgattgtgtataatataattaattttttttttgagagagacacatgccattgctctattcaaaaattaatgcgatataaatgtgtgtgtaaaatttaatatattaaaaattcaacaaatactgttcaaattagaaaattatatttttgtgtgaagaaattttgcaaaactatgctgcaaaaataaataaatcaatcattcattaagagatatcaacttgtacatatcttcatcaccttttctctgtataaatacattaataagagaaatacaagaatctaagttgaacttgattattactaaatgcaaatccatcatgaaattaaaaatgacaattgacattgtactagaactctcaaattttgttgtccacatctttggcatgcaatcactaataaatacattaaattttaacttagtggtggccaatatcgccaccgccgccaccaccgaacccaccaccaaatccgccacctccacctccacctgctccaccaccaaatccacttcctcctccaaaaccaccacctttaccgaatccaccaccacctccaaagcctccacctttaccgaatccacctcctcctccaatacccccacctttaccaaatccacctcctcctccaaagccgccacctttaccaaatccgcccccaattccaccaccaccaccttttccaatacctccgccaaaaccgccacctttaccgatcccaccaccaattccaccacctttaccgattccacctccaattccaccgcccccacctttaccaataccacctccaattccgccccctccgccctttccaataccaccaccaaagccaccacctttaccaataccaccaccaactccaccacctttaccgattccacctccaatgccaccacctccacctttaccaattccacctccaactccgccacctccaccgtttccaatgcctccaccaaagccgccgcctttgccaactccaccacctttaccgattccacctccaactcctccaccttttccaatacctccaccaaagccaccacctttaccaataccacccccgactcctccacctttacctattccaccgcctttcccaatgcctccaccaaagccaccacctttaccatgtccccctccaacaccgcctccaattccgccacctttaccaaatcctcctccttttccgtgtccccctccaataccacccccaatcccactacctttcccatgtcctcctcctatgccaccaccctttc

SEQ ID NO: 189455 - DNA, 4673 bp, Cannabis indica
atataaacctctaatgatattaataataataatatttaggtgtgggatttctgggtggctgtaggtggaggatagttaaaggcattttgaaagtgatacacatatcctattccttctcttactttttgttttatttttgggtatgcttgtttttcacaaaagtaccaattataattaccattctatataatacttttctttagtttattttcttattattataaattttagttttaagctaatattcccttattatggaattgtgagacgtacgatgttgcgtataaaatagtgtttgactaaaataatcactatcaatgtactctaattaacaagaaaaaaaaagattcaatttttatcacccctatacatatataaatatatttatatatatattttagagagtggcaatgatgagagagaaggatagaagtgggtgcaggataagcacgtgggcgtcttctctttagaattgcacgctggcatggcatgttgctgtagtttatactaagctcatagagaagattaaaaagaaaaaaggttaaatttttattgctattcttcaatttacaaaagagaagaaaaaaaaatgatacatgggattttctttttcttttttaatttctttttttcagattgagttgtctggtgaatgattggcatatctgcagctaagaagtatcacaaacttttttagatttcaggttgtcatatattatatattattatcattattattcactatatactttctaatttaagtattattctctaatgtattctggttagtatgcttgtttataaagcagaaatatttcttctttcttcttcttcttcttcttcttctacttttgatatgtttttcttagctatgtgggttggtttttgagtggcttattaggaagactgaagtgtgttgttgtgattgtagtgaatttgattctttgtttgcatgtcaaaatcaaaatggggtatagtatagaatatagtagatagatagaaagaaagaacaatttttttgactgataagacatggcccttcttctgggtttttgtcatttttgactgttattctgttatatatatatatagatataaattcccaatttattaaactcatttttttgtatcttctcaccacaccactcacaaaaagctcttgtctttctttcctctattcttggatatcccttaactcttacctatctttctcattcaaaaatactctctttattaagaaaaaaaggtaaaagttaattaaattctgaatttttggggttgtggtgtgtttgagaagaattctagttagttaggtaaacttagtgggaaaaagctttcttctcctttagtacaggaaatggttggtcttgactgttttctttttccaagagctttgtgattagattactgttaaagaaggaaccattcttatttttttactggctcctggtgtactgaaagggtagtcttttataaatcaggaagtgttttttttattttcaatttttgtttttaattttttctttaatttttgatacatataatctttatttagataccttaagaagtgtctgatgaactactcataaggagagaaggagaataaaaaagaatcagtagtcatgaagtttatgaagcttggatctcgcccagatactttctatactactgaagctgttaggtaaaaacatatcattatcatatatataaatatatgtatctgtatagactaaaaggtgtttgaagaaattcaccaatgaaagactgattttttattttattttcaggtctatttcctctgaggtttctagtgatcttataattcaagtcaagggaagcagatatttgcttcacaaggtaattaagttcaagttcttatattaaaagaagtaattaattaaactgttcctttaattaattgatgttctttgtttttttgcatacagtttcctcttctgtccaagtgttctaggcttcagaagctatgttctgaatctcctgagtcatcacaacaccaaatagtacaactccctgatttcccaggtggggttgaagcatttgagctctgtgcaaagttttgttatggtataaccataacacttagtgcatacaacatagtgtccacacgttgtgctgctgagtatttgcagatgacagaagatgttgagaaaggtaaccttatttacaagattgaagttttcttcaactcttgcatccttaatggttggagagactcaattgtgacactacaaagcacaaaagcttatgctttgtggtcagaggaacttgaaattacaagcagatgtattgaagcaattgcttccaaggtcttaactcacccctcaaaggtgagcctttcgcacagttactcaaggagaggtactagagatgatgtgtcatcatgcaatggtggtggtggtggagagagccaaagacataggacaacatccaaagggtggtgggctgaggatttagcagagttggatatagacctttattggagaactatgatagctattaaatcaggtggaaagatcccaaccaatctaattggagatgccttgaaaatttatgctgctagatggttaccaaacattcctagaaatggatttgttcacaacaagcatggagattctgagtctgattctgattctgagtcagcaagtgaagtaaatctaagcatagattactgttggaatctatagtgagtctacttccagctgagaaaggtgctgtttcttgtagttttctcctcaaacttgtcaaggcagccaatcttcttaatgcttcttcctcttctaaaatggaattggcaaaaagggtggcactccaattagatgaagctactgtcagtgatttgttaataccttctggttcttacttaaacggcacacgttatgatgtagacatagtgatgactatattggaacagttcctgttgcaggggcagagtcctccaactagtcctcccaggtctaagttcggctttgaaaggaggaggtctcgttcagctgagaatattgactttgagtttcaggagagcaggaggtcttcttctgcatcacatggatcaaagttgaaagtggcaaagcttgtggatggttatcttcaagagattgctagggaagtgaatttgtcactctccaagttcattgttatttctgagtctatacctgattttgctaggattgaccatgatgatctctacagagctattgacatttatcttaaggtaaaagacaaaactactgattgaggggtctttcataattttcactgatttttgtttacatttgaataaattttaatatctgagcatgctcacactatcattgtttaggatgtgggtcattatagcagtagctaaccaactctcttgaccttaaaaaaaatcttgtcacgtttgcatatttaattagcagttgggattaggatgacccaccagaaaactaatcagcaaaaggggtctcttgatgagtttagtaatgcctgaagttatttgattctgaaagttaatcttaattaaaaaggtcttatctttctctgttttgaagatgatgttattatatttatctttgctaacataaattcttaatgactaaaatctaggcacacccagatctcaataagagtgaaagaaagagattatgtcgaattctagactgcaaaaaactatctatggaagcttgtatgcacgctgcacaaaacgagttactcccactaagagtggtggtccaagttttattctttgagcaagctagagctgctatggcaggtggtaaagtggctgaactacctagcaacataaaagcacttctagcctcacatggaattgacccatcaaagcctccaccaccattaagtaccacaaccaccatagcaggtgatgatcaatggagtgtctctggccttaagtcaccaaggtccaagatctcaactttaagaatgaagttggctgaagatgatggtttagatgaaaattacatcaaccctgatgggactgcaagaagctctaggcttaaaaatactatatgtgctcttcccagtagacccaaagaattttcagtaagttatggtcagccagcagaactccaagtgaaaaaaattgagtgaattttcttctttctttcctggctgggtaatatggtaatcaaaagggtaacatatactctgctttttctttttggtttcttataattcatgcaaaactcaatcccatgtaacttgtagtaggaagaaaagaaaaaaaaaggaatcccaatgctcattaatgtgatcaatgtaacctaaagtaataagtaacaagattttcaggagttgagatggaaaatctcttgctgaatctttattagttgtaaatgactaattgtgggaccaattttgttgtgtttgtctataaatctgcaacacctgtctttgtctcttatgtttcaactcattggattctcacaccagtaaatcaagatttattttttggtattccatgtgtatgaattgaacataatgcattgctttgaattggattttcctatctttatttctttcttttgttttaaaccaattattaagctcccatctaaattctttaagactgtctttgtgtttctcatttgatcaaaaagagaacttatacaaaatttaaaatgtataaaaaagatgataaaaaagttatt

SEQ ID NO: 189456 - DNA, 4388 bp, Cannabis indica
ttttgtctggtatactatattattatttttaggtttctgcgtttctcagtcaccatttttctgaggttaccgactacagttttactgctgatatggagactgaggtacttatcctgttattagattacgttgacttggaaattttcacagactacttttggcttcatgatgacgatctttctgcataacgtcaccaatcactattctgcaattgttataatattacttattatagttactgctgtttttgttgttattgttactataaatagttatcttaaagaaaaaacaagacagcagaataattatttatcttatgtggttattcatattcattctttctccttgcttcagcttgataatgtttctgctggtttaactgaatggaaaggtctcttgggagactattggacacgatttagctcttattgtgaaagcacatccaatgttcacatccatcaggtaatttttttttcttcttaatcgctactataagtgtattttcttatgatttcctacgttacattactggtttgatttttcaggtggagaagatgttggagaaaaaatttggggattccttgtttgcttctttacccgacagtagcaggacatgtccaaggtatggctgtactgtaaattctattgcaatcttacttgtagaaaataattataacttgctttatcttgctctaaggactctggatgtagcaactggcagctactattaactgatacaaatatccttcacatgctcacttacaattttcactagtttgcatgtattttgtcgagtgtaaagacttttttttgtaagggatgaggtgtaaaaactgaagtgtatacaatcgatgaattttagggaatgaggactgaatacgttttgatgtgttattgactggtgctctaaaaacatgagccttgaaattgatgattaagtaatagtaaaatgtattgtgtttattgtcctctatttaatatttctgacatgcatttcataacttctgcttttatttttccttctccgcattgtgtatgatttctattattcctctttaatggagaatgtcctaatgtgatgcttatttatttattacattttaattattctatttcatggtttgttccttagctgttttgagggcacactggtttttaaagtcagtcggttcggagccggctactttattggctgcgatcaacacccaaaatgcaagtaagtttggagctttattactgtgataatatttgtttttggctccttttgtgtgcatatattttttgctttatgctcatggcatgtagtttccagtcacttgaagcttagtatagtgtctggtgcaatttgataaattttagtatatagattagtatttttttttaacagagtatgttttctttaatacatacaaattctccaaattatatcgttaaaaggagaataaataataaaacaaatgataagaggaacaaaaccaagattacaacgagtaaagtcagtgaggactggttagggaaggaaacacaaaaacattgttgaatcaactcctctgagaaacaaacgaataacaagagattatagcttaagccgcttatagcttagtcctataaaataggagttcataaaagagaaacaacttgacaacatgggtcgtaaactaattggataaagcttctaaactaagtcaaccaaattttaagatgaataacaaattaaacagcaactaattttgataacttgattgtaccaagattgttcaattttttttttttttggtataattggatttcttataaatcctatttttttcttacagtaagttgcttcttttatttttaactcaagaaaatggaaaccatagaaaaggaacacaagtaattctatggttatcctttgacttacattgtatgagctaagattgttatgatatctggttaatataaaccaaattactgtctctttctctctcaagactcagttttcaaaactttttttaaattagagaggaattgcacaactgtagagaagacaagaaagaaactactgatatatttttgcatcgattttgttgagctgaaaataatttagatatttttatattatgaaagcaagagcacatttcatgccaaaattttcactccaattttcttgctacaacaataattcaagagctaaatttgttggttgtttgcttgcttgggagtaaggtacattgctaagacattatatggtgaagatgatgacgaggatgaaacacctcaaaacaacctcgttatagaggagccaaagttactagggctcaatccagcttcccaagaaaaagtagagtttttatctttgtatatcagctaatatgaagccttttgtttcaaattttgcatgattatgtcaatatattctgtgcatgagttgacattacacactttttctgcagattcttttgaagagcggtccttatggattttatgtacagcttggtgaggataggaagggcttcttgcctaaaagagcttccctttcccatgtatgtaaagcagaatacatattgaattgtttcttacctgaattcttatgtatttgatttgattttggccttgtttaattttttgtggggaaattaattccttctttcagataaaagacgttcaatctgttaagcttgaagatgccctcgagttgcttcgctatccagttacactggttagtttttctctcttaaactttgtcatgttttatgttctgtctcaatgcatctctaatttccttttcttgtaatctcctactagggtacccatccagccgatggacagccggtggtattaaaattggcaaagggcgggcctgttgtaaaatatagaagaagttttgttacagttcctaaggtatcttttcattcatcagtcttctcttgtattgtgttcttcctacattttttcagatttagaccaagttggatgtgttggtgacatgagataatcaaatgcagaatgtgaaaccaaatgaagtcgacctagagaaagcattaaagtatttaaatggtcccgatgtaagacaatctggtcgaccgaaggccaaatcgaaggctgatgcagccgttgaggcattgtagtcatccacgtgagttgcatagggaaggaagtgcaaacttttctgatacctgtgaccaattatcatcacaaactattcaggggtgggagtgagcttgcaatgcaacttttcttattggcagtgagttgactatgctatacaagagaactagatcactttatatgcttgagattctttttcacagctagaaggggtataggacaaaacaattcttttgtaacattatatgtttatttatttatatagatatcattttgtgtaggtaattttttgttttttttttactatttaatgagccttttccgggtgatgtaaggctcagatgtgagattatatcctcacaactttgagtcatttccggaagatgttaataaatatttacattagcaagttaaactgtgaacaagagtagtgtaactatatatctaatatttatactggtgtctgtatcgctgtgatactgtagtttattattctatgaccaaagatagtgaaattgcttgatgctaattcatttccatctattagttgcttttcaattcaaaaatgaaaattgttgcagccttcaaacagagctgagatttttatgttttctaattttattttaaaaaaggccctgtagatatacatacttggcagcacaaagaatattcggctgttaacttgtttatgattatgaacagaacaactctaggctatagtctatacctgaaatgacaccattcaggccaagctaattgaaaatctgtgcctaaaaagtacaaacttgtttagttagttccattccaggtccagcatctctggcagcatggtatggtgcctggctttgtttgtagcatagtttactttggtcaaaactcaaaaatggcggtgttatgtaatcggggatataaccaaattaaatgtcaagaaagggagggcacatattctcatgtgtccatgaccattgccatggaaatcttgtaaacatatcaacgtacagctataataatatgaactcaaatgtattaaactcacctatctaacaaaattaccctttcatcatgtgttgttacaagcctttggtagttacatatttccggtttctttttcgactatgaaacaatactggatgatggtgttcttgagctagcaagtgagcttgtatatgaattactatcctgcattaaaaggcatataatattatcatgtaagtttgaaaaataataaattgcttggacagaacatggttgtttgtgcataaaaatggagatttagacatgctttgatttgaagaatt

SEQ ID NO: 189457 - DNA, 1596 bp, Cannabis indica
tttataaacaaagataaaattaagtcaaaataaaatattttcaacaaacaactatataaaattaattttatgacaatattatttaaatttaattaattttatatttttacactattaaatatataatattttgacatttaacactttataataggcacattaagagagtttcactatattatgtttttgtttcaaaaaaaattaatgtgttgctatatcaaatttattttctttttaaccaaaaaatccacttcgtatgtgtaacctcctgcaattgcttctcccctctccgatcccccactttgcaaccatgaactccatcatttatgagtttactattggcatctcccttctcaatatccacgatatataccatctactttcttctttctgtaagcactttcaacctatttccatggagcgtgttcttaaaaatatgtcatcacagatcacccctactgataaagaaaaggttgtccatcaaattggagaatctagcaactctacaattcccacaatctctaaatggagcgtctttgctttcgttctcacccacaaaaaaatcaaccctggcgcattcatactccaaatggcagagatttggtccaagcgttttcccgtcaccatcactgatcgcaaaggccactttcttgttcaatttggatgcgctggagacatgcaaaggatcatctatcatcaaccttggcactttaacaaccaacctattatttttgctgctattactaatttaaaaattcctattgaatctaactttactgatatccctctttgggttcaggttcatggcttacctttccttagtaaagcagatccttggcggaaaaaattgggtctgatatgggtgaattgttggaggtagatgatgctctcttcttgagggatgggaccgtttatgagaatttgggtcgacctcaatgccactcaggccctcctccgtggcacttttctcaaatttactaacacccctgacagtttgtgggtgaattttaaatatgagaaattgcctgacttttgccacaaatgtgggagattgggacatacctatttgagttgccttcttttcttagaaaccgaggatgaaggtggtgatatctctcttccttatggggcctgggtaaaaggtgatcctttaccaagacctggagccggtcgatctctaagagaaagcagagctaataatgtggtgtggcctttgcttactcgttttgtctgaaacaccatcaaccaatttttccaaccttcacctataacctccccctgcttttcctaaccaacacaaacacattctcaacactcccatagccgcacttgaattgcctactaattctaccatccactccacacctacacaaccttttcccacaaccatcaacccccttacatctcagtaccttcatcctctaatcctgcaattaatacagcctctaacataccagatcactctactctcttaacagaccaacctgccctcaccaactcttttaaaagacagaccattcacatttgagactccctacgtctatccttaaacgctgccatttgtagcttaacgatggcaaccatattgttgggttt
